United States Patent Application Publication US 2024/0327476 A1 - sequence listing, part 14

SEQ ID NO: 15271 - DNA, 1977 bp, Homo sapiens
  source 1..1977: mol_type = unassigned DNA
gagtgcgcggggcggcgcgcggcgtgcaggtcgcagctgtggctcgggtgctggcaggtgctggcgggactggcggggatcgccgtggactgcctcaggggcgccgcagcccgctcggcccgagggcccgcctaaccgcgccgcccgcgcccgctcctcctcggcccgcgcccggagcgcgggggccgccggcgctgggtactcggcggccaccggggatcggggctgagcggtcggttcccgcccccgtgccgccgccgccgccttccggccgaccgcccggcttggccgctgctgccgcgtctggcccccgggtccccgccgctgggggcgcgggcggggtcgggggttgccgggcgccgccccccgtgcgcctggagtccacatcccgggcccggcggccggcgagcatggaggagaagtacctgcccgagctgatggcggagaaggactccctggacccctccttcacgcacgccctgcgcctggtgaaccaagaaatagaaaagtttcaaaaaggagaaggcaaggatgaagaaaagtacatcgatgtggtgattaataagaacatgaagctgggacagaaagtgttaattcccgtaaaacagttccctaagttcaactttgtggggaaacttttgggtccacgtggcaattctctgaagcgtttacaagaagaaaccttgacaaaaatgtccatccttgggaaaggttccatgagagacaaggccaaggaagaagagttgaggaaaagtggagaagcgaagtacttccatctcaatgatgatctccatgttctcattgaagtgtttgccccacctgcagaagcttatgccaggatgggacatgctttggaagaaatcaaaaagttcctcatccctgattataatgatgagatcaggcaagcacagctccaggagttaacatatttgaatggtggttcagaaaatgcagatgttccagtggttcgagggaaacccaccttgcgtacaagaggtgtaccagccccagcaataaccaggggaaggggaggagttacagcccggccagttggagttgtagtaccacgagggacgccaactcccagaggagtcctgtccacccgagggccagtgagtcggggaagaggacttctcactcccagagcaagaggagtccccccaactgggtacagacctccaccgccacccccgacacaagagacttatggagaatatgactatgatgatggatatggcactgcttatgatgaacagagttatgattcctatgataacagctatagcaccccagcccaaagtggtgctgattactatgattacggacatggactcagtgaggagacttatgattcctacgggcaagaagagtggactaactcaagacacaaggcaccttcagcgaggacagcaaagggcgtctacagagaccagccatatggcagatactgattgtactgtctgatgttgtgaaatagccaatctccaccagtcctgtatactgttcaaagtaatttttttctatgaacaatccctttttaaataaatcagaatgcttaaaatctgaatggatggaacttaaaactactttgttgaaacatcaacctgggcagaaaaaaaaaaaaaaagacatgtaaaattttgttatttccagtctgtatatgaaaaaataggtcatcaaaaggaaaaaaaataactttgattaactagtgttaaacaaaaaataggtttactaaatatgttaatctattcttttaacataagcctcacctttcattttaaaggtttccatagaatttagttattttatctttcagccatatgctagtttttttttctcttgccaacatgcgtaaaaagggaagccaattacaagtgcaaataatgtggtattcttttgtaactcaagtcttgaaatgttctgtagtgttaagcaaagtctcctcttgcttgatactaaataaacttttgaaagaaa

SEQ ID NO: 15272 - DNA, 1134 bp, Homo sapiens
  source 1..1134: mol_type = unassigned DNA
gcgcgcctcgcgcggccgcggcgcgagccgggacccctggaagggtcgggtgcgcggcccaggaggtaccgctgtctcctcacaatcggccaggcctgcagccgctgccgccgctgccgccgccgccgccgccgccgccgccgccctactcagggagtggcccaggcctgcggcgcgccaccctcacctccttcattcctaccgtcaaagcccagccttggctacctgacccccctgtggtctcgaactcggttagtccggtgaagggacagagaagcctgggttcccggcggcatcactgagatgctcagtcctgaattctgccctccattaggattatctgctttgtgggataatttcctcattggttgagtcagtgagttgcgtgtctgcaagagagcatcctatctggtcggagcagagcatggacatgggaacgagtgctctcagcaagaagccgtggtggaccctgcctcaaaactttcatgcaccaatggtgtttcacatggaagaggaccaggaggagctcatcttcgggcatggtgacacataccttcgctgcattgaggtgcacagccacacccttattcagctggagagttggttcacagctacaggccagactcgtgtgactgtagtcggaccacacagggcaaggcagtggctgctgcacatgttttgttgtgtggggagccaggactcctatcatcatgctcgaggcctggagatgctggaacgtgtccgaagccagcctctgaccaacgatgacctggtcacctccattagtgtgccaccatacactggagacctgtctttggctcccaggataagtggaaccgtgtgtcttagcgttcctcagccttccccttaccaagtgattggttgttcgggtttccatttgagttcactgtatccgtaattaaggactgatctcccctgggaagtggggatgagaggagaaatcttggcttcacttttggtgagaaagacatgatagacactgaggaaagtttgaacttgtggccgggacctgtccctctcaggtcttctagacatgtctgagggaagtctcttgaatgtaagaaagtgttattggcaaagcaatccaataaaataagctacctatgatgcaaa

SEQ ID NO: 15273 - DNA, 1430 bp, Homo sapiens
  source 1..1430: mol_type = unassigned DNA
ggcggaagaggcgggtccagggcggtgtaattaaggcgcggagcccagaccctcctgctacagtgcctcgggctttcctggaggcgggcggcgggatgctgctccgttctccgggtcctctcctccggttcttgtcgtttggtcacgccctcagttcagtcggttattggaaaacgatcaaggcccaaagatggtttacgtggcgttgtggatgttatcaccgttgtttggtgaccgagcctggagcttgagccctgggacgtcttgccagccgcatgtggtcccgtgcccacttctcgcggtggcgcgttaatccacctagactgtgcattggtccagtctgggttgaccccgacccgaagtggccctttccttcgcgtcctgaacttcgcttctccgtcggtgtctggtctcttcccgccggcgggctctgcggtggcgggaggagctgtactactcgtgccttagcgcacccttactttcccaggccagaaacgcgaaatgctgtcggccttccagaggctgttccgagtcttatttgtgattgaaacagtctcagaatacggagtcctgatcttcatttatggatggccctttctccagacccttgcgatgctcctgatcgggacagtgtctttccacctttggatccgcagaaatcgagagagaaactcaaggagcggaaagactagatgccgatccaaaaggtcggagcagagcatggacatgggaacgagtgctctcagcaagaagccgtggtggaccctgcctcaaaactttcatgcaccaatggtgtttcacatggaagaggaccaggaggagctcatcttcgggcatggtgacacataccttcgctgcattgaggtgcacagccacacccttattcagctggagagttggttcacagctacaggccagactcgtgtgactgtagtcggaccacacagggcaaggcagtggctgctgcacatgttttgttgtgtggggagccaggactcctatcatcatgctcgaggcctggagatgctggaacgtgtccgaagccagcctctgaccaacgatgacctggtcacctccattagtgtgccaccatacactggagacctgtctttggctcccaggataagtggaaccgtgtgtcttagcgttcctcagccttccccttaccaagtgattggttgttcgggtttccatttgagttcactgtatccgtaattaaggactgatctcccctgggaagtggggatgagaggagaaatcttggcttcacttttggtgagaaagacatgatagacactgaggaaagtttgaacttgtggccgggacctgtccctctcaggtcttctagacatgtctgagggaagtctcttgaatgtaagaaagtgttattggcaaagcaatccaataaaataagctacctatgatgcaaa

SEQ ID NO: 15274 - DNA, 547 bp, Homo sapiens
  source 1..547: mol_type = unassigned DNA
cggccgcggcgcgagccgggacccctggaagggtcgggtgcgcggcccaggaggtaccgctgtctcctcacaatcggccaggcctgcagccgctgccgccgctgccgccgccgccgccgccgccgccgccgccctactcagggagtggcccaggcctgcggcgcgccaccctcacctccttcattcctaccgtcaaagcccagccttggctacctgacccccctgtggtctcgaactcggtcggagcagagcatggacatgggaacgagtgctctcagcaagaagccgtggtggaccctgcctcaaaactttcatgcaccaatggtgtttcacatggaagaggaccaggaggagctcatcttcgggcatggtgacacataccttcgctgcattgaggtgcacagccacacccttattcagctggagagttggttcacagctacaggccagactcgtgtgactgtagtcggaccacacagggcaaggcagtggctgctgcacatgttttgttgtgtggggagccaggactcctatcatcatgctcgag

SEQ ID NO: 15275 - DNA, 2243 bp, Homo sapiens
  source 1..2243: mol_type = unassigned DNA
agagtgctccgcggccgtgtggagcgaggccttgttcccgcgttgagccgccgccgccgccgccgcctcctcagcttcagcctccgcgccaggcccggccccgccgcgccatgtcggactacagcacgggaggacccccgcccgggccgccgccgcccgccggcgggggcgggggagccggaggcgccgggggaggccctccgccgggcccgccaggcgcgggggaccggggcggcggcggtcccggcggcggcggcccgggcggggggtcggccgggggcccctctcagccacccggcggaggcggcccgggaatccgcaaggacgctttcgccgacgccgtgcagcgggcccgccagattgcagccaaaattggaggcgatgctgccacgacagtgaataacagcactcctgattttggttttgggggccaaaagagacagttggaagatggagatcaaccggagagcaagaagctggcttcccagggagactcaatcagttctcaacttggacccatccatcctcccccaaggacttcaatgacagaagagtacagggtcccagacggcatggtgggcctgatcattggcagaggaggtgaacaaattaacaaaatccaacaggattcaggctgcaaagtacagatttctccagacagcggtggcctacccgagcgcagtgtgtccttgacaggagccccagaatctgtccagaaagccaagatgatgctggatgacattgtgtctcggggtcgtgggggccccccaggacagttccacgacaacgccaacgggggccagaacggcaccgtgcaggagatcatgatccccgcgggcaaggccggcctggtcattggcaagggcggggagaccattaagcagctgcaggaacgcgctggagtgaagatgatcttaattcaggacggatctcagaatacgaatgtggacaaacctctccgcatcattggggatccttacaaagtgcagcaagcctgtgagatggtgatggacatcctccgggaacgtgaccaaggcggctttggggaccggaatgagtacggatctcggattggcggaggcatcgatgtgccagtgcccaggcattctgttggcgtggtcattggccggagtggagagatgatcaagaagatccagaatgatgctggcgtgcggatacagttcaagcaagatgacgggacagggcccgagaagattgctcatataatggggcccccagacaggtgcgagcacgcagcccggatcatcaacgacctcctccagagcctcaggagtggtcccccaggtcctccagggggtccaggcatgcccccggggggccgaggccgaggaagaggccaaggcaattggggtccccctggcggggagatgaccttctccatccccactcacaagtgtgggctggtcatcggccgaggtggcgagaatgtgaaagccataaaccagcagacgggagccttcgtagagatctcccggcagctgccacccaacggggaccccaacttcaagttgttcatcatccggggttcaccccagcagattgaccacgccaagcagcttatcgaggaaaagatcgagggtcctctctgcccagttggaccaggcccaggtggcccaggccctgctggcccaatggggcccttcaatcctgggcccttcaaccaggggccacccggggctcccccacatgccggggggccccctcctcaccagtacccaccccagggctggggcaatacctacccccagtggcagccgcctgctcctcatgacccaagcaaagcagctgcagcggccgcggaccccaacgccgcgtgggccgcctactactcacactactaccagcagcccccgggccccgtccccggccccgcaccggcccctgcggccccaccggctcagggtgagccccctcagcccccacccaccggccagtcggactacactaaggcctgggaagagtattacaaaaagatcggccagcagccccagcagcccggagcacccccacagcaggactacacgaaggcttgggaggagtactacaagaagcaagcgcaagtggccaccggagggggtccaggagctcccccaggcttcctggccccccccacggtgttccagcccctcctctcttccgccctggctcagctcccgcggccccgcccgtcccccctcccaggactggtctgttgtcttttcatctgttcaagaggagattga

SEQ ID NO: 15276 - DNA, 3248 bp, Homo sapiens
  source 1..3248: mol_type = unassigned DNA
agagtgctccgcggccgtgtggagcgaggccttgttcccgcgttgagccgccgccgccgccgccgcctcctcagcttcagcctccgcgccaggcccggccccgccgcgccatgtcggactacagcacgggaggacccccgcccgggccgccgccgcccgccggcgggggcgggggagccggaggcgccgggggaggccctccgccgggcccgccaggcgcgggggaccggggcggcggcggtcccggcggcggcggcccgggcggggggtcggccgggggcccctctcagccacccggcggaggcggcccgggaatccgcaaggacgctttcgccgacgccgtgcagcgggcccgccagattgcagccaaaattggaggcgatgctgccacgacagtgaataacagcactcctgattttggttttgggggccaaaagagacagttggaagatggagatcaaccggagagcaagaagctggcttcccagggagactcaatcagttctcaacttggacccatccatcctcccccaaggacttcaatgacagaagagtacagggtcccagacggcatggtgggcctgatcattggcagaggaggtgaacaaattaacaaaatccaacaggattcaggctgcaaagtacagatttctccagacagcggtggcctacccgagcgcagtgtgtccttgacaggagccccagaatctgtccagaaagccaagatgatgctggatgacattgtgtctcggggtcgtgggggccccccaggacagttccacgacaacgccaacgggggccagaacggcaccgtgcaggagatcatgatccccgcgggcaaggccggcctggtcattggcaagggcggggagaccattaagcagctgcaggaacgcgctggagtgaagatgatcttaattcaggacggatctcagaatacgaatgtggacaaacctctccgcatcattggggatccttacaaagtgcagcaagcctgtgagatggtgatggacatcctccgggaacgtgaccaaggcggctttggggaccggaatgagtacggatctcggattggcggaggcatcgatgtgccagtgcccaggcattctgttggcgtggtcattggccggagtggagagatgatcaagaagatccagaatgatgctggcgtgcggatacagttcaagcaagatgacgggacagggcccgagaagattgctcatataatggggcccccagacaggtgcgagcacgcagcccggatcatcaacgacctcctccagagcctcaggagtggtcccccaggtcctccagggggtccaggcatgcccccggggggccgaggccgaggaagaggccaaggcaattggggtccccctggcggggagatgaccttctccatccccactcacaagtgtgggctggtcatcggccgaggtggcgagaatgtgaaagccataaaccagcagacgggagccttcgtagagatctcccggcagctgccacccaacggggaccccaacttcaagttgttcatcatccggggttcaccccagcagattgaccacgccaagcagcttatcgaggaaaagatcgagggtcctctctgcccagttggaccaggcccaggtggcccaggccctgctggcccaatggggcccttcaatcctgggcccttcaaccaggggccacccggggctcccccacatgccggggggccccctcctcaccagtacccaccccagggctggggcaatacctacccccagtggcagccgcctgctcctcatgacccaagcaaagcagctgcagcggccgcggaccccaacgccgcgtgggccgcctactactcacactactaccagcagcccccgggccccgtccccggccccgcaccggcccctgcggccccaccggctcagggtgagccccctcagcccccacccaccggccagtcggactacactaaggcctgggaagagtattacaaaaagatcggccagcagccccagcagcccggagcacccccacagcaggactacacgaaggcttgggaggagtactacaagaagcaagcgcaagtggccaccggagggggtccaggagctcccccaggctcccagccagactacagtgccgcctgggcggaatattacagacagcaggccgcttactacggacagaccccaggtcctggcggcccccagccgccgcccacgcagcagggacagcagcaggctcaatgaatcgaatgaatgtgaacttcttcatctgtgaaaaatcttttttttttccattttgttctgtttgggggcttctgttttgtttggcgagagagcgatggctgccgtggggagtactggggagccctcgcggcaagcagggtgggggggacttgggggcatgccgggccctcactctctcgcctgttctgtgtctcacatgctttttctttcaaaattgggatccttccatgttgagccagccagagaagatagcgagatctaaatctctgccaaaaaaaaaaaaaaacttaaaaattaaaaacacaaagagcaaagcagaacttataaaattatatatatatatattaaaaagtctctattcttcaccccccagccttcctgaacctgcctctctgaggataaagcaattcattttctcccaccctcggccctcttgtttttaaaataaacttttaaaaaggaaaaaaaaaagtcactcttgctatttcttttttttagttagaggtggaacattccttggaccaggtgttgtattgcaggaccccttcccccagcagccaagccccctcttctctccctcccgccctggctcagctcccgcggccccgcccgtcccccctcccaggactggtctgttgtcttttcatctgttcaagaggagattgaaactgaaaacaaaatgagaacaacaaaaaaaattgtatggcagtttttactttttatcgctcgtttttaacttcacaaataaatgataacaaaacctccccgtctgcgggtgctgtctgtctccccccctttccttccctccctgtagttttgaagcggatgtttgttctttatagatgttgtttaaaaagcctgataatggtgattgaaatttacaaactttgtgtttttttttttttaagaaaaatataaaatagttttcttcaggctcaatgtgctttcctaaccgtgccccccccccttttttttttttgttaaataaagtgctttttgttt

SEQ ID NO: 15277 - DNA, 1177 bp, Homo sapiens
  source 1..1177: mol_type = unassigned DNA
gccttgttcccgcgttgagccgccgccgccgccgccgcctcctcagcttcagcctccgcgccaggcccggccccgccgcgccatgtcggactacagcccgggcggggggtcggccgggggcccctctcagccacccggcggaggcggcccgggaatccgcaaggacgctttcgccgacgccgtgcagcgggcccgccagattgcagccaaaattggaggcgatgctgccacgacagtgaataacagcactcctgattttggttttgggggccaaaagagacagttggaagatggagatcaaccggagagcaagaagctggcttcccagggagactcaatcagttctcaacttggacccatccatcctcccccaaggacttcaatgacagaagagtacagggtcccagacggcatggtgggcctgatcattggcagaggaggtgaacaaattaacaaaatccaacaggattcaggctgcaaagtacagatttctccagacagcggtggcctacccgagcgcagtgtgtccttgacaggagccccagaatctgtccagaaagccaagatgatgctggatgacattgtgtctcggggtcgtgggggccccccaggacagttccacgacaacgccaacgggggccagaacggcaccgtgcaggagatcatgatccccgcgggcaaggccggcctggtcattggcaagggcggggagaccattaagcagctgcaggaacgcgctggagtgaagatgatcttaattcaggacggatctcagaatacgaatgtggacaaacctctccgcatcattggggatccttacaaagtgcagcaagcctgtgagatggtgatggacatcctccgggaacgtgaccaaggcggctttggggaccggaatgagtacggatctcggattggcggaggcatcgatgtgccagtgcccaggcattctgttggcgtggtcattggccggagtggagagatgatcaagaagatccagaatgatgctggcgtgcggatacagttcaagcaagatgacgggacagggcccgagaagattgctcatataatggggcccccagacaggtgcgagcacgcagcccggatcatcaacgacccctcctcctcctcctttctccttccaacccccggccaccgtccatcctgccttagtgggtag

SEQ ID NO: 15278 - DNA, 1382 bp, Homo sapiens
  source 1..1382: mol_type = unassigned DNA
cattatgctaacagcataaacatgcagggggtgggagcagggtcacaaaagtgagtgttgtcaattctacttggaatgaaaggttgaaataatttaaacagtacgggaaatgcagagcaattttctcctctggtgacaatatagtgtccaacacttggaagtgatttttaagaatgtttatttaaattaaaaggatggatttccaaggaaaaaaaataaggaaaaggaaagaaaaaactgaacagaaaacgcaaaagtatcagtttggtcactaacctttgcaaggatacctttttattttctttaagattcctgttgtttatacacagattttaagtttactcctactgctgacccaagtgaaattccttctccagtcacagtgtcaacctctaccccccaactgcaacgagagttttgaggggcatcaatcacaccgagaagtcacagcccctcaaccactgaggtgtgggggggtagggatctgcatttcttcatatcaaccccacactatagggcacctaaatgggtgggcggtgggggagaccgactcacttgagtttcttgaaggcttcctggcctccagccacgtaattgcccccgctctggatctggtctagcttccggattcggtggccagtccgcggggtgtagatgttcctgacggccccaaagggtgcctgaacgccgccggtcacctccttcaggaagacttcgaagctggacaccttcttctcatggatgacgacgcggcgccccgcgtagaaggggtccccgttgcggtacacaagcacgctcttcacgacgggctgagacaggtggctggacctggcgctgctgccgctcatcttccccgctggccgccgcctcagctcgctgcttcgcgtcgggaggcacctccgctgtcccagcggcctcaccgcacccagggcgcgggatcgcctcctgaaacgaacgagaaactgacgaatccacaggtgaaagagaagtaacggccgtgcgcctaggcgtccacccagaggagacactaggagcttgcaggactcggagtagacgctcaagtttttcaccgtggcgtgcacagccaatcaggacccgcagtgcgcgcaccacaccaggttcacctgctacgggcagaatcaaggtggacagcttctgagcaggagccggaaacgcgcggggccttcaaacaggcacgcctagtgagggcaggagagaggaggacgcacacacacacacacacacaaatatggtgaaacccaatttcttacatcatatctgtgctaccctttccaaacagcctaatttttcttttctctcttcttgcacctttacccctcaatctcctgcttgctcccaaattaaagcaattaagttcctgg

SEQ ID NO: 15279 - DNA, 1580 bp, Homo sapiens
  source 1..1580: mol_type = unassigned DNA
gtcgagccgagtcactgcgtcctggcagcagaagctgcaccatgtccatgtcacccacggtcatcatcctggcatgtcttgggttcttcttggaccagagtgtgtgggcacacgtgggtggtcaggacaagcccttctgctctgcctggcccagcgctgtggtgcctcaaggaggacacgtgactcttcggtgtcactatcgtcgtgggtttaacatcttcacgctgtacaagaaagatggggtccctgtccctgagctctacaacagaatattctggaacagtttcctcattagccctgtgaccccagcacacgcagggacctacagatgtcgaggttttcacccgcactcccccactgagtggtcggcacccagcaaccccctggtgatcatggtcacaggtctatatgagaaaccttcgcttacagcccggccgggccccacggttcgcgcaggagagaacgtgaccttgtcctgcagctcccagagctcctttgacatctaccatctatccagggagggggaagcccatgaacttaggctccctgcagtgcccagcatcaatggaacattccaggccgacttccctctgggtcctgccacccacggagagacctacagatgcttcggctctttccatggatctccctacgagtggtcagacccgagtgacccactgcctgtttctgtcacaggaaacccttctagtagttggccttcacccactgaaccaagcttcaaaactggtatcgccagacacctgcatgctgtgattaggtactcagtggccatcatcctctttaccatccttcccttctttctccttcatcgctggtgctccaaaaaaaaaatgctgctgtaatgaaccaagagcctgcgggacacagaacagtgaacagggaggactctgatgaacaagaccctcaggaggtgacatacgcacagttggatcactgcattttcacacagagaaaaatcactggcccttctcagaggagcaagagaccctcaacagataccagcgtgtgtatagaacttccaaatgctgagcccagagcgttgtctcctgcccatgagcaccacagtcaggccttgatgggatcttctagggagacaacagccctgtctcaaacccagcttgccagctctaatgtaccagcagctggaatctgaaggcgtgagtctccatcttagagcatcactcttcctcacaccacaaatctggtgcctgtctcttgcttaccaatgtctaaggtccccactgcctgctgcagagaaaacacactcctttgcttagcccacaattctctatttcacttgacccctgcccacctctccaacctaactggcttacttcctagtctacttgaggctgcaatcacactgaggaactcacaattccaaacatacaagaggctctctcttaacacggcacttagacacgtgctgttccaccttccctcgtgctgttccacctttcctcagactatttttcagccttctggcatcagcaaaccttataaaatttttttgatttcagtgtagttctctcctcttcaaataaacatgtctgccttca

SEQ ID NO: 15280 - DNA, 1857 bp, Homo sapiens
  source 1..1857: mol_type = unassigned DNA
tgtctgcaccggcagcaccatgtcgctcatggtcgtcagcatggcgtgtgttgggttgttcttggtccagagggccggtccacacatgggtggtcaggacaaacccttcctgtctgcctggcccagcgctgtggtgcctcgaggaggacacgtgactcttcggtgtcactatcgtcataggtttaacaatttcatgctatacaaagaagacagaatccacattcccatcttccatggcagaatattccaggagagcttcaacatgagccctgtgaccacagcacatgcagggaactacacatgtcggggttcacacccacactcccccactgggtggtcggcacccagcaaccccgtggtgatcatggtcacaggaaaccacagaaaaccttccctcctggcccacccaggtcccctggtgaaatcaggagagagagtcatcctgcaatgttggtcagatatcatgtttgagcacttctttctgcacaaagaggggatctctaaggacccctcacgcctcgttggacagatccatgatggggtctccaaggccaatttctccatcggtcccatgatgcttgcccttgcagggacctacagatgctacggttctgttactcacaccccctatcagttgtcagctcccagtgatcccctggacatcgtggtcacaggtccatatgagaaaccttctctctcagcccagccgggccccaaggttcaggcaggagagagcgtgaccttgtcctgtagctcccggagctcctatgacatgtaccatctatccagggaggggggagcccatgaacgtaggctccctgcagtgcgcaaggtcaacagaacattccaggcagatttccctctgggccctgccacccacggagggacctacagatgcttcggctctttccgtcactctccctacgagtggtcagacccgagtgacccactgcttgtttctgtcacaggaaacccttcaagtagttggccttcacccacagaaccaagctccaaatctggtaaccccagacacctgcacattctgattgggacctcagtggtcatcatcctcttcatcctcctcctcttctttctccttcatctctggtgctccaacaaaaaaaatgctgctgtaatggaccaagagcctgcagggaacagaacagccaacagcgaggactctgatgaacaagaccctgaggaggtgacatacgcacagttggatcactgcgttttcacacagagaaaaatcactcgcccttctcagaggcccaagacaccccctacagataccatcttgtacacggaacttccaaatgctaagcccagatccaaagttgtctcctgcccatgagcaccacagtcaggccttgaggacgtcttctagggagacaacagccctgtctcaaaaccgagttgccagctcccatgtaccagcagctggaatctgaaggcgtgagtcttcatcttagggcatcgctcctcctcacgccacaaatctggtgcctctctcttgcttacaaatgtctaggtccccactgcctgctggaaagaaaacacactcctttgcttagcccacagttctccatttcacttgacccctgcccacctctccaacctaactggcttacttcctagtctacttgaggctgcaatcacactgaggaactcacaattccaaacatacaagaggctccctcttgacgtggcacttacccacgtgctgttccaccttccctcatgctgtttcacctttcttcggactattttccagccttctgtcagcagtgaaacttataaaattttttgtgatttcaatgtagctgtctcctcttcaaataaacatgtctgccctca

SEQ ID NO: 15281 - DNA, 1564 bp, Homo sapiens
  source 1..1564: mol_type = unassigned DNA
ccggcagcaccatgtcgctcatggtcgtcagcatggcgtgtgttgggttgttcttggtccagagggccggtccacacatgggaaaccacagaaaaccttccctcctggcccacccaggtcccctggtgaaatcaggagagagagtcatcctgcaatgttggtcagatatcatgtttgagcacttctttctgcacaaagaggggatctctaaggacccctcacgcctcgttggacagatccatgatggggtctccaaggccaatttctccatcggtcccatgatgcttgcccttgcagggacctacagatgctacggttctgttactcacaccccctatcagttgtcagctcccagtgatcccctggacatcgtggtcacaggtccatatgagaaaccttctctctcagcccagccgggccccaaggttcaggcaggagagagcgtgaccttgtcctgtagctcccggagctcctatgacatgtaccatctatccagggaggggggagcccatgaacgtaggctccctgcagtgcgcaaggtcaacagaacattccaggcagatttccctctgggccctgccacccacggagggacctacagatgcttcggctctttccgtcactctccctacgagtggtcagacccgagtgacccactgcttgtttctgtcacaggaaacccttcaagtagttggccttcacccacagaaccaagctccaaatctggtaaccccagacacctgcacattctgattgggacctcagtggtcatcatcctcttcatcctcctcctcttctttctccttcatctctggtgctccaacaaaaaaaatgctgctgtaatggaccaagagcctgcagggaacagaacagccaacagcgaggactctgatgaacaagaccctgaggaggtgacatacgcacagttggatcactgcgttttcacacagagaaaaatcactcgcccttctcagaggcccaagacaccccctacagataccatcttgtacacggaacttccaaatgctaagcccagatccaaagttgtctcctgcccatgagcaccacagtcaggccttgaggacgtcttctagggagacaacagccctgtctcaaaaccgagttgccagctcccatgtaccagcagctggaatctgaaggcgtgagtcttcatcttagggcatcgctcctcctcacgccacaaatctggtgcctctctcttgcttacaaatgtctaggtccccactgcctgctggaaagaaaacacactcctttgcttagcccacagttctccatttcacttgacccctgcccacctctccaacctaactggcttacttcctagtctacttgaggctgcaatcacactgaggaactcacaattccaaacatacaagaggctccctcttgacgtggcacttacccacgtgctgttccaccttccctcatgctgtttcacctttcttcggactattttccagccttctgtcagcagtgaaacttataaaattttttgtgatttcaatgtagctgtctcctcttcaaataaacatgtctgccctca

SEQ ID NO: 15282 - DNA, 1871 bp, Homo sapiens
  source 1..1871: mol_type = unassigned DNA
ggggcgcagccgcctgtctgcaccggcagcaccatgtcgctcatggtcgtcagcatggcgtgtgttgggttgttcttggtccagagggccggtccacacatgggtggtcaggacaaacccttcctgtctgcctggcccagcgctgtggtgcctcgaggaggacacgtgactcttcggtgtcactatcgtcataggtttaacaatttcatgctatacaaagaagacagaatccacattcccatcttccatggcagaatattccaggagagcttcaacatgagccctgtgaccacagcacatgcagggaactacacatgtcggggttcacacccacactcccccactgggtggtcggcacccagcaaccccgtggtgatcatggtcacaggaaaccacagaaaaccttccctcctggcccacccaggtcccctggtgaaatcaggagagagagtcatcctgcaatgttggtcagatatcatgtttgagcacttctttctgcacaaagaggggatctctaaggacccctcacgcctcgttggacagatccatgatggggtctccaaggccaatttctccatcggtcccatgatgcttgcccttgcagggacctacagatgctacggttctgttactcacaccccctatcagttgtcagctcccagtgatcccctggacatcgtggtcacaggtccatatgagaaaccttctctctcagcccagccgggccccaaggttcaggcaggagagagcgtgaccttgtcctgtagctcccggagctcctatgacatgtaccatctatccagggaggggggagcccatgaacgtaggctccctgcagtgcgcaaggtcaacagaacattccaggcagatttccctctgggccctgccacccacggagggacctacagatgcttcggctctttccgtcactctccctacgagtggtcagacccgagtgacccactgcttgtttctgtcacaggaaacccttcaagtagttggccttcacccacagaaccaagctccaaatctggtaaccccagacacctgcacattctgattgggacctcagtggtcatcatcctcttcatcctcctcctcttctttctccttcatctctggtgctccaacaaaaaaaatgctgctgtaatggaccaagagcctgcagggaacagaacagccaacagcgaggactctgatgaacaagaccctgaggaggtgacatacgcacagttggatcactgcgttttcacacagagaaaaatcactcgcccttctcagaggcccaagacaccccctacagataccatcttgtacacggaacttccaaatgctaagcccagatccaaagttgtctcctgcccatgagcaccacagtcaggccttgaggacgtcttctagggagacaacagccctgtctcaaaaccgagttgccagctcccatgtaccagcagctggaatctgaaggcgtgagtcttcatcttagggcatcgctcctcctcacgccacaaatctggtgcctctctcttgcttacaaatgtctaggtccccactgcctgctggaaagaaaacacactcctttgcttagcccacagttctccatttcacttgacccctgcccacctctccaacctaactggcttacttcctagtctacttgaggctgcaatcacactgaggaactcacaattccaaacatacaagaggctccctcttgacgtggcacttacccacgtgctgttccaccttccctcatgctgtttcacctttcttcggactattttccagccttctgtcagcagtgaaacttataaaattttttgtgatttcaatgtagctgtctcctcttcaaataaacatgtctgccctca

SEQ ID NO: 15283 - DNA, 1663 bp, Homo sapiens
  source 1..1663: mol_type = unassigned DNA
ggggcgcagccgcctgtctgcaccggcagcaccatgtcgctcatggtcgtcagcatggcgtgtgttgggttgttcttggtccagagggccggtccacacatgggtggtcaggacaaacccttcctgtctgcctggcccagcgctgtggtgcctcgaggaggacacgtgactcttcggtgtcactatcgtcataggtttaacaatttcatgctatacaaagaagacagaatccacattcccatcttccatggcagaatattccaggagagcttcaacatgagccctgtgaccacagcacatgcagggaactacacatgtcggggttcacacccacactcccccactgggtggtcggcacccagcaaccccgtggtgatcatggtcacaggaaaccacagaaaaccttccctcctggcccacccaggtcccctggtgaaatcaggagagagagtcatcctgcaatgttggtcagatatcatgtttgagcacttctttctgcacaaagaggggatctctaaggacccctcacgcctcgttggacagatccatgatggggtctccaaggccaatttctccatcggtcccatgatgcttgcccttgcagggacctacagatgctacggttctgttactcacaccccctatcagttgtcagctcccagtgatcccctggacatcgtggtcacaggtccatatgagaaaccttctctctcagcccagccgggccccaaggttcaggcaggagagagcgtgaccttgtcctgtagctcccggagctcctatgacatgtaccatctatccagggaggggggagcccatgaacgtaggctccctgcagtgcgcaaggtcaacagaacattccaggcagatttccctctgggccctgccacccacggagggacctacagatgcttcggctctttccgtcactctccctacgagtggtcagacccgagtgacccactgcttgtttctgtcacaggaaacccttcaagtagttggccttcacccacagaaccaagctccaaatctggtatctgcagacacctgcatgttctgattgggacctcagtggtcatcttcctcttcatcctcctcctcttctttctcctttatcgctggtgctccaacaaaaagaatgctgctgtaatggaccaagagcctgcgggggacagaacagtgaataggcaggactctgatgaacaagaccctcaggaggtgacgtacgcacagttggatcactgcgttttcatacagagaaaaatcagtcgcccttctcagaggcccaagacacccctaacagataccagcgtgtacacggaacttccaaatgctgagcccagatccaaagttgtctcctgcccacgagcaccacagtcaggtcttgagggggttttctagggagacaacagccctgtctcaaaaccaggttgccagatccaatgaaccagcagctggaatctgaaggcatcagtctgcatcttaggggatcgctcttcctcacaccacgaatctgaacatgcctctctcttgcttacaaatgcctaaggtcgccactgcctgctgcagagaaaacacactcctttgcttagcccacaagtatctatttcacttgacccctgcccacctctccaacctaactggcttacttcctagtcctact

SEQ ID NO: 15284 - DNA, 1864 bp, Homo sapiens
  source 1..1864: mol_type = unassigned DNA
cagccgcctgtctgcaccggcagcaccatgtcgctcatggtcgtcagcatggcgtgtgttgggttgttcttggtccagagggccggtccacacatgggtggtcaggacaaacccttcctgtctgcctggcccagcgctgtggtgcctcgaggaggacacgtgactcttcggtgtcactatcgtcataggtttaacaatttcatgctatacaaagaagacagaatccacattcccatcttccatggcagaatattccaggagagcttcaacatgagccctgtgaccacagcacatgcagggaactacacatgtcggggttcacacccacactcccccactgggtggtcggcacccagcaaccccgtggtgatcatggtcacaggaaaccacagaaaaccttccctcctggcccacccaggtcccctggtgaaatcaggagagagagtcatcctgcaatgttggtcagatatcatgtttgagcacttctttctgcacaaagaggggatctctaaggacccctcacgcctcgttggacagatccatgatggggtctccaaggccaatttctccatcggtcccatgatgcttgcccttgcagggacctacagatgctacggttctgttactcacaccccctatcagttgtcagctcccagtgatcccctggacatcgtggtcacaggtccatatgagaaaccttctctctcagcccagccgggccccaaggttcaggcaggagagagcgtgaccttgtcctgtagctcccggagctcctatgacatgtaccatctatccagggaggggggagcccatgaacgtaggctccctgcagtgcgcaaggtcaacagaacattccaggcagatttccctctgggccctgccacccacggagggacctacagatgcttcggctctttccgtcactctccctacgagtggtcagacccgagtgacccactgcttgtttctgtcacaggaaacccttcaagtagttggccttcacccacagaaccaagctccaaatctggtaaccccagacacctgcacattctgattgggacctcagtggtcatcatcctcttcatcctcctcctcttctttctccttcatctctggtgctccaacaaaaaaaatgctgctgtaatggaccaagagcctgcagggaacagaacagccaacagcgaggactctgatgaacaagaccctgaggaggtgacatacgcacagttggatcactgcgttttcacacagagaaaaatcactcgcccttctcagaggcccaagacaccccctacagataccatcttgtacacggaacttccaaatgctaagcccagatccaaagttgtctcctgcccatgagcaccacagtcaggccttgaggacgtcttctagggagacaacagccctgtctcaaaaccgagttgccagctcccatgtaccagcagctggaatctgaaggcgtgagtcttcatcttagggcatcgctcctcctcacgccacaaatctggtgcctctctcttgcttacaaatgtctaggtccccactgcctgctggaaagaaaacacactcctttgcttagcccacagttctccatttcacttgacccctgcccacctctccaacctaactggcttacttcctagtctacttgaggctgcaatcacactgaggaactcacaattccaaacatacaagaggctccctcttgacgtggcacttacccacgtgctgttccaccttccctcatgctgtttcacctttcttcggactattttccagccttctgtcagcagtgaaacttataaaattttttgtgatttcaatgtagctgtctcctcttcaaataaacatgtctgccctc

SEQ ID NO: 15285 - DNA, 1810 bp, Homo sapiens
  source 1..1810: mol_type = unassigned DNA
ccgcctgtctgcaccggcagcaccatgtcgctcatggtcgtcagcatggcgtgtgttgggttgttcttggtccagagggccggtccacacatgggtggtcaggacaaacccttcctgtctgcctggcccagcgctgtggtgcctcgaggaggacacgtgactcttcggtgtcactatcgtcataggtttaacaatttcatgctatacaaagaagacagaatccacattcccatcttccatggcagaatattccaggagagcttcaacatgagccctgtgaccacagcacatgcagggaactacacatgtcggggttcacacccacactcccccactgggtggtcggcacccagcaaccccgtggtgatcatggtcacaggaaaccacagaaaaccttccctcctggcccacccaggtcccctggtgaaatcaggagagagagtcatcctgcaatgttggtcagatatcatgtttgagcacttctttctgcacaaagaggggatctctaaggacccctcacgcctcgttggacagatccatgatggggtctccaaggccaatttctccatcggtcccatgatgcttgcccttgcagggacctacagatgctacggttctgttactcacaccccctatcagttgtcagctcccagtgatcccctggacatcgtggtcacaggtccatatgagaaaccttctctctcagcccagccgggccccaaggttcaggcaggagagagcgtgaccttgtcctgtagctcccggagctcctatgacatgtaccatctatccagggaggggggagcccatgaacgtaggctccctgcagtgcgcaaggtcaacagaacattccaggcagatttccctctgggccctgccacccacggagggacctacagatgcttcggctctttccgtcactctccctacgagtggtcagacccgagtgacccactgcttgtttctgtcacaggtaaccccagacacctgcacattctgattgggacctcagtggtcatcatcctcttcatcctcctcctcttctttctccttcatctctggtgctccaacaaaaaaaatgctgctgtaatggaccaagagcctgcagggaacagaacagccaacagcgaggactctgatgaacaagaccctgaggaggtgacatacgcacagttggatcactgcgttttcacacagagaaaaatcactcgcccttctcagaggcccaagacaccccctacagataccatcttgtacacggaacttccaaatgctaagcccagatccaaagttgtctcctgcccatgagcaccacagtcaggccttgaggacgtcttctagggagacaacagccctgtctcaaaaccgagttgccagctcccatgtaccagcagctggaatctgaaggcgtgagtcttcatcttagggcatcgctcctcctcacgccacaaatctggtgcctctctcttgcttacaaatgtctaggtccccactgcctgctggaaagaaaacacactcctttgcttagcccacagttctccatttcacttgacccctgcccacctctccaacctaactggcttacttcctagtctacttgaggctgcaatcacactgaggaactcacaattccaaacatacaagaggctccctcttgacgtggcacttacccacgtgctgttccaccttccctcatgctgtttcacctttcttcggactattttccagccttctgtcagcagtgaaacttataaaattttttgtgatttcaatgtagctgtctcctcttcaaataaacatgtctgccctc

SEQ ID NO: 15286 - DNA, 1877 bp, Homo sapiens
  source 1..1877: mol_type = unassigned DNA
ggggcgcggcctcctgtctgcaccggcagcaccatgtcgctcacggtcgtcagcatggcgtgcgttgggttcttcttgctgcagggggcctggccactcatgggtggtcaggacaaacccttcctgtctgcccggcccagcactgtggtgcctcgaggaggacacgtggctcttcagtgtcactatcgtcgtgggtttaacaatttcatgctgtacaaagaagacagaagccacgttcccatcttccacggcagaatattccaggagagcttcatcatgggccctgtgaccccagcacatgcagggacctacagatgtcggggttcacgcccacactccctcactgggtggtcggcacccagcaaccccctggtgatcatggtcacaggaaaccacagaaaaccttccctcctggcccacccagggcccctgctgaaatcaggagagacagtcatcctgcaatgttggtcagatgtcatgtttgagcacttctttctgcacagagaggggatctctgaggacccctcacgcctcgttggacagatccatgatggggtctccaaggccaacttctccatcggtcccttgatgcctgtccttgcaggaacctacagatgttatggttctgttcctcactccccctatcagttgtcagctcccagtgaccccctggacatcgtgatcacaggtctatatgagaaaccttctctctcagcccagccgggccccacggttcaggcaggagagaacgtgaccttgtcctgtagctcctggagctcctatgacatctaccatctgtccagggaaggggaggcccatgaacgtaggctccgtgcagtgcccaaggtcaacagaacattccaggcagactttcctctgggccctgccacccacggagggacctacagatgcttcggctctttccgtgccctgccctgcgtgtggtcaaactcaagtgacccactgcttgtttctgtcacaggaaacccttcaagtagttggccttcacccacagaaccaagctccaaatctggtatctgcagacacctgcatgttctgattgggacctcagtggtcatcttcctcttcatcctcctcctcttctttctcctttatcgctggtgctccaacaaaaagaatgctgctgtaatggaccaagagcctgcgggggacagaacagtgaataggcaggactctgatgaacaagaccctcaggaggtgacgtacgcacagttggatcactgcgttttcatacagagaaaaatcagtcgcccttctcagaggcccaagacacccctaacagataccagcgtgtacacggaacttccaaatgctgagcccagatccaaagttgtctcctgcccacgagcaccacagtcaggtcttgagggggttttctagggagacaacagccctgtctcaaaaccaggttgccagatccaatgaaccagcagctggaatctgaaggcatcagtctgcatcttaggggatcgctcttcctcacaccacgaatctgaacatgcctctctcttgcttacaaatgcctaaggtcgccactgcctgctgcagagaaaacacactcctttgcttagcccacaagtatctatttcacttgacccctgcccacctctccaacctaactggcttacttcctagtcctacttgaggctgcaatcacactgaggaactcacaattccaaacatacaagaggctccctcttaacacggcacttacacacttgctgttccaccttccctcatgctgttccacctcccctcagactatctttcagccttctgtcatcagtaaaatttataaattttttttataacttcagtgtagctctctcctcttcaaataaacatgtctgccctca

SEQ ID NO: 15287 - DNA, 1587 bp, Homo sapiens
  source 1..1587: mol_type = unassigned DNA
cgcggccgcctgtctgcacagacagcaccatgtcgctcatggtcgtcagcatggcgtgtgttgggttcttcttgctgcagggggcctggccacatgagggagtccacagaaaaccttccctcctggcccacccaggtcgcctggtgaaatcagaagagacagtcatcctgcaatgttggtcagatgtcaggtttgagcacttccttctgcacagagaagggaagtttaaggacactttgcacctcattggagagcaccatgatggggtctccaaagccaacttctccatcggtcccatgatgcaagaccttgcagggacctacagatgctacggttctgttactcactccccctatcagttgtcagctcccagtgaccctctggacatcgtcatcacaggtctatatgagaaaccttctctctcagcccagccgggccccacggttctggcaggagagagcgtgaccttgtcctgcagctcccggagctcctatgacatgtaccatctatccagggagggggaggcccatgaatgtaggttctctgcagggcccaaggtcaacggaacattccaggccgactttcctctgggccctgccacccacggaggaacctacagatgcttcggctctttccgtgactctccatacgagtggtcaaactcgagtgacccactgcttgtttctgtcacaggaaacccttcaaatagttggccttcacccactgaaccaagctctaaaaccggtaacccccgacacctgcacattctgattgggacctcagtggtcatcatcctcttcatcctcctcttctttctccttcatcgctggtgctccaacaaaaaaaatgctgcggtaatggaccaagagtctgcagggaacagaacagcgaatagcgaggactctgatgaacaagaccctcaggaggtgacatacacacagttgaatcactgcgttttcacacagagaaaaatcactcgcccttctcagaggcccaagacacccccaacagatatcatcgtgtacacggaacttccaaatgctgagtccagatccaaagttgtctcctgcccatgagcaccacagtcaggccttgagggcgtcttctagggagacaacagccctgtctcaaaaccgggttgccagctcccatgtaccagcagctggaatctgaaggcatgagtctgcatcttagggcatcgctcttcctcacaccacaaatctgaatgtgcctctcacttgcttacaaatgtctaaggtccccactgcctgctggagaaaaaacacactcctttgcttagcccacagttctccatttcacttgacccctgcccacctctccaacctaactggcttacttcctagtctacttgaggctgcaatcacactgaggaactcacaattccaaacatacaagaggctccctcttaacgcagcacttagacacgtgttgttccaccttccctcatgctgttccacctcccctcagactagctttcagtcttctgtcagcagtaaaacttatatattttttaaaataacttcaatgtagttttccatccttcaaataaacatgtctgcccccatg

SEQ ID NO: 15288 - DNA, 1442 bp, Homo sapiens
  source 1..1442: mol_type = unassigned DNA
ccgcctgtctgcaccggcagcaccatgtcgctcatggtcgtcagcatggcgtgtgttgggttcttcttgctgcagggggcctggccacatgagggtggtcaggacaagcccttgctgtctgcctggcccagcgctgtggtgcctcgaggaggacatgtgactcttctgtgtcgctctcgtcttgggtttaccatcttcagtctgtacaaagaagatggggtgcctgtccctgagctctacaacaaaatattctggaagagcatcctcatgggccctgtgacccctgcacacgcagggacctacagatgtcggggttcacacccacgctcccccattgagtggtcagcacccagcaaccccctggtgatcgtggtcacaggtctatttgggaaaccttcactctcagcccagccgggccccacggttcgcacaggagagaacgtgaccttgtcctgcagctccaggagctcatttgacatgtaccatctatccagggaggggagggcccatgaacctaggctccctgcagtgcccagcgtcaatggaacattccaggctgactttcctctgggccctgccacccacggagggacctacacatgcttcggctctctccatgactcaccctatgagtggtcagacccgagtgacccactgcttgtttctgtcacaggaaactcttcaagtagttcatcttcacccactgaaccaagctccaaaactggtatccgcagacacctgcacattctgattgggacctcagtggctatcatcctcttcatcatcctcttcttctttctccttcattgctgctgctccaacaaaaagaatgctgctgtaatggaccaagagcctgccggggacagaacagtgaacagggaggactctgatgatcaagaccctcaggaggtgacatatgcacagttggatcactgcgttttcacacagacaaaaatcacttccccttctcagaggcccaagacacctccaacagataccaccatgtacatggaacttccaaatgctaagccaagatcattgtctcctgcccataagcaccacagtcaggccttgaggggatcttctagggagacaacagccctgtctcaaaaccgggttgctagctcccatgtaccagcagctggaatctgaaggcatcagtcttcatcttaggggatcgctcttcctcacaccacaaatctgaacatgcctctctcttgcttacaaatgtctaaggtccccactgcctgctggagagaagacacactcctttgcttagcccacaattctctatttcacttgacccctgcccacctctccaactgaactggcttacttcctagtctacttgaggctgcaatcacactgaggaactcacaattccagacatacaagaggctccctcttaacatggcactgagacacgtgctgttccaccttcc

SEQ ID NO: 15289 - DNA, 1632 bp, Homo sapiens
  source 1..1632: mol_type = unassigned DNA
atgtcgctcatggtcatcagcatggcgtgtgttgggttcttcttgctgcagggggcctggacacatgagggtggtcaggacaagcccttgctgtctgcctggcccagcgctgtggtgcctcgaggaggacatgtgactcttctgtgtcgctctcgtcttgggtttaccatcttcagtctgtacaaagaagatggggtgcctgtccctgagctctacaacaaaatattctggaagagcatcctcatgggccctgtgacccctgcacacgcagggacctacagatgtcggggttcacacccacgctcccccattgagtggtcagcacccagcaaccccctggtgatcgtggtcacaggtctatttgggaaaccttcactctcagcccagccgggccccacggttcgcacaggagagaacgtgaccttgtcctgcagctccaggagctcatttgacatgtaccatctatccagggaggggagggcccatgaacctaggctccctgcagtgcccagcgtcaatggaacattccaggctgactttcctctgggccctgccacccacggagggacctacacatgcttcggctctctccatgactcaccctatgagtggtcagacccgagtgacccactgcttgtttctgtcacaggaaactcttcaagtagttcatcttcacccactgaaccaagctccaaaactggtatccgcagacacctgcacattctgattgggacctcagtggctatcatcctcttcatcatcctcttcttctttctccttcattgctgctgctccaacaaaaagaatgctgctgtaatggaccaagagcctgccggggacagaacagtgaacagggaggactctgatgatcaagaccctcaggaggtgacatatgcacagttggatcactgcgttttcacacagacaaaaatcacttccccttctcagaggcccaagacacctccaacagataccaccatgtacatggaacttccaaatgctaagccaagatcattgtctcctgcccataagcaccacagtcaggccttgaggggatcttctagggagacaacagccctgtctcaaaaccgggttgctagctcccatgtaccagcagctggaatctgaaggcatcagtcttcatcttaggggatcgctcttcctcacaccacaaatctgaacatgcctctctcttgcttacaaatgtctaaggtccccactgcctgctggagagaagacacactcctttgcttagcccacaattctctatttcacttgacccctgcccacctctccaactgaactggcttacttcctagtctacttgaggctgcaatcacactgaggaactcacaattccagacatacaagaggctccctcttaacatggcactgagacacgtgctgttccaccttccctcatgctgtttcacctttcctcagactattttccagccttctgtcagtcagcagtgaaacttataaaattttttgtgatttcaatgtagctgtctccttttcaaataaacatgtctgccctcattgctttaggtaatgtgacactatttgctgaaagaaaccgctgttatcattaccatgtccacataaccccatctgttatccactgggttc

SEQ ID NO: 15290 - DNA, 1740 bp, Homo sapiens
  source 1..1740: mol_type = unassigned DNA
ccggcagcaccatgtcgctcatggtcgtcagcatggcgtgtgttgggttgttcttggtccagagggccggtccacacatgggtggtcaggacaagcccttcctgtctgcctggcccagcgctgtggtgcctcgcggaggacacgtgactcttcggtgtcactatcgtcataggtttaacaatttcatgctatacaaagaagacagaatccacgttcccatcttccatggcagaatattccaggagggcttcaacatgagccctgtgaccacagcacatgcagggaactacacatgtcggggttcacacccacactcccccactgggtggtcggcacccagcaaccccatggtgatcatggtcacaggaaaccacagaaaaccttccctcctggcccacccaggtcccctggtgaaatcaggagagagagtcatcctgcaatgttggtcagatatcatgtttgagcacttctttctgcacaaagagtggatctctaaggacccctcacgcctcgttggacagatccatgatggggtctccaaggccaatttctccatcggttccatgatgcgtgcccttgcagggacctacagatgctacggttctgttactcacaccccctatcagttgtcagctcccagtgatcccctggacatcgtggtcacaggtctatatgagaaaccttctctctcagcccagccgggccccaaggttcaggcaggagagagcgtgaccttgtcctgtagctcccggagctcctatgacatgtaccatctatccagggaggggggagcccatgaacgtaggctccctgcagtgcgcaaggtcaacagaacattccaggcagatttccctctgggccctgccacccacggagggacctacagatgcttcggctctttccgtcactctccctacgagtggtcagacccgagtgacccactgcttgtttctgtcacaggaaacccttcaagtagttggccttcacccacagaaccaagctccaaatctggtaacctcagacacctgcacattctgattgggacctcagtggtcaaaatccctttcaccatcctcctcttctttctccttcatcgctggtgctccaacaaaaaaaatgctgctgtaatggaccaagagcctgcagggaacagaagtgaacagcgaggattctgatgaacaagaccatcaggaggtgtcatacgcataattggaacactgtgttttcacacagagaaaaatcactcgcccttctcagaggcccaagacacccccaacagataccagcatgtacatagaacttccaaatgctgagcccagatccaaagttgtcttctgtccacgagcaccacagtcaggccttgaggggatcttctagggagacaacagccctgtctcaaaactgggttgccagctcccatgtaccagcagctggaatctgaaggcatcagtcttcatcttagggcatcgctcttcctcacaccacaaatctgaatgtgcctctcacttgcttacaaatgtctaaggtccccactgcctgctggagaaaaaacacactcctttgcttagcccacagttctccatttcacttgacccctgcccacctctccaacctaactggcttacttcctagtctacttgaggctgcaatcacactgaggaactcacaattccacacatacaagaggctccgtcttaacgcagcacttagacacgtgctgttccaccttccctcatgctg

SEQ ID NO: 15291 - DNA, 1741 bp, Homo sapiens
  source 1..1741: mol_type = unassigned DNA
ccggcagcaccatgttgctcatggtcgtcagcatggcgtgtgttgggttgttcttggtccagagggccggtccacacatgggtggtcaggacaagcccttcctgtctgcctggcccagcgctgtggtgcctcgcggaggacacgtgactcttcggtgtcactatcgtcataggtttaacaatttcatgctatacaaagaagacagaatccacgttcccatcttccatggcagaatattccaggagggcttcaacatgagccctgtgaccacagcacatgcagggaactacacatgtcggggttcacacccacactcccccactgggtggtcggcacccagcaaccccatggtgatcatggtcacaggaaaccacagaaaaccttccctcctggcccacccaggtcccctggtgaaatcaggagagagagtcatcctgcaatgttggtcagatatcatgtttgagcacttctttctgcacaaagagtggatctctaaggacccctcacgcctcgttggacagatccatgatggggtctccaaggccaatttctccatcggttccatgatgcgtgcccttgcagggacctacagatgctacggttctgttactcacaccccctatcagttgtcagctcccagtgatcccctggacatcgtggtcacaggtctatatgagaaaccttctctctcagcccagccgggccccaaggttcaggcaggagagagcgtgaccttgtcctgtagctcccggagctcctatgacatgtaccatctatccagggaggggggagcccatgaacgtaggctccctgcagtgcgcaaggtcaacagaacattccaggcagatttccctctgggccctgccacccacggagggacctacagatgcttcggctctttccgtcactctccctacgagtggtcagacccgagtgacccactgcttgtttctgtcacaggaaacccttcaagtagttggccttcacccacagaaccaagctccaaatctggtaacctcagacacctgcacattctgattgggacctcagtggtcaaaatccctttcaccatcctcctcttctttctccttcatcgctggtgctccaacaaaaaaaaatgctgctgtaatggaccaagagcctgcagggaacagaagtgaacagcgaggattctgatgaacaagaccatcaggaggtgtcatacgcataattggaacactgtgttttcacacagagaaaaatcactcgcccttctcagaggcccaagacacccccaacagataccagcatgtacatagaacttccaaatgctgagcccagatccaaagttgtcttctgtccacgagcaccacagtcaggccttgaggggatcttctagggagacaacagccctgtctcaaaactgggttgccagctcccatgtaccagcagctggaatctgaaggcatcagtcttcatcttagggcatcgctcttcctcacaccacaaatctgaatgtgcctctcacttgcttacaaatgtctaaggtccccactgcctgctggagaaaaaacacactcctttgcttagcccacagttctccatttcacttgacccctgcccacctctccaacctaactggcttacttcctagtctacttgaggctgcaatcacactgaggaactcacaattccacacatacaagaggctccgtcttaacgcagcacttagacacgtgctgttccaccttccctcatgctg

SEQ ID NO: 15292 - DNA, 1596 bp, Homo sapiens
  source 1..1596: mol_type = unassigned DNA
atgtcgctcatggtcgtcagcatggcgtgtgttgggttcttcttggaccagagtgtgtgggcacacgtgggtggtcaggacaagcccttctgctctgcctggcccagcgctgtggtgcctcaaggaggacacgtgactcttcggtgtcactgtcgtcgtgggtttaacatcttcacgctgtacaagaaagatggggtccctgtccctgagctctacaacagaatattctggaacagtttcctcattagccctgtgaccccagcacacgcagggacctacagatgtcgaggttttcacccgcactcccccactgagtggtcggcacccagcaaccccctggtgatcatggtcacaggtctatatgagaaaccttcgcttacagcccggccgggccccacggttcgcgcaggagagaacgtgaccttgtcctgcagctcccagagctcctttgacatctaccatctatccagggagggggaagcccatgaacttaggctccctgcagtgcccagcatcaatggaacattccaggccgacttccctctgggtcctgccacccacggagagacctacagatgcttcggctctttccatggatctccctacgagtggtcagacccgagtgacccactgcctgtttctgtcacaggaaacccttctagtagttggccttcacccactgaaccaagcttcaaaactggtatcgccagacacctgcatgctgtgattaggtactcagtggccatcatcctcttcaccatccttcccttctttctccttcatcgctggtgctccaaaaaaaaagtaagcctcacgaagcagaggccagagaactcagggccctgtgcggaagcaggatgggagcacgcagatgctgctgtaatgaaccaagagcctgcgggacacagaacagtgaacagggaggactctgatgaacaagaccctcaggaggtgacatacgcacagttggatcactgcattttcacacagagaaaaatcactggcccttctcagaggagcaagagaccctcaacagataccagcgtgtgtatagaacttccaaatgctgagcccagagcgttgtctcctgcccatgagcaccacagtcaggccttgatgggatcttctagggagacaacagccctgtctcaaacccagcttgccagctctaatgtaccagcagctggaatctgaaggcgtgagtctccatcttagagcatcactcttcctcacaccacaaatctggtgcctgtctcttgcttaccaatgtctaaggtccccactgcctgctgcagagaaaacacactcctttgcttagcccacaattctctatttcacttgacccctgcccacctctccaacctaactggcttacttcctagtctacttgaggctgcaatcacactgaggaactcacaattccaaacatacaagaggctctctcttaacacggcacttagacacgtgctgttccaccttccctcgtgctgttccacctttcctcagactatttttcagccttctggcatcagcaaaccttataaaatttttttgatttcagtgtagttctctcctcttcaaataaacatgtctgcc

SEQ ID NO: 15293 - DNA, 1475 bp, Homo sapiens
  source 1..1475: mol_type = unassigned DNA
gtcgagccgagtcactgcgtcctggcagcagaagctgcaccatgtccatgtcacccacggtcatcatcctggcatgtcttgggttcttcttggaccagagtgtgtgggcacacgtgggtggtcaggacaagcccttctgctctgcctggcccagcgctgtggtgcctcaaggaggacacgtgactcttcggtgtcactgtcgtcgtgggtttaacatcttcacgctgtacaagaaagatggggtccctgtccctgagctctacaacagaatattctggaacagtttcctcattagccctgtgaccccagcacacgcagggacctacagatgtcgaggttttcacccgcactcccccactgagtggtcggcacccagcaaccccctggtgatcatggtcacaggtctatatgagaaaccttcgcttacagcccggccgggccccacggttcgcgcaggagagaacgtgaccttgtcctgcagctcccagagctcctttgacatctaccatctatccagggagggggaagcccatgaacttaggctccctgcagtgcccagcatcaatggaacattccaggccgacttccctctgggtcctgccacccacggagagacctacagatgcttcggctctttccatggatctccctacgagtggtcagacccgagtgacccactgcctgtttctgtcacaggaaacccttctagtagttggccttcacccactgaaccaagcttcaaaactgatgctgctgtaatgaaccaagagcctgcgggacacagaacagtgaacagggaggactctgatgaacaagaccctcaggaggtgacatacgcacagttggatcactgcattttcacacagagaaaaatcactggcccttctcagaggagcaagagaccctcaacagataccagcgtgtgtatagaacttccaaatgctgagcccagagcgttgtctcctgcccatgagcaccacagtcaggccttgatgggatcttctagggagacaacagccctgtctcaaacccagcttgccagctctaatgtaccagcagctggaatctgaaggcgtgagtctccatcttagagcatcactcttcctcacaccacaaatctggtgcctgtctcttgcttaccaatgtctaaggtccccactgcctgctgcagagaaaacacactcctttgcttagcccacaattctctatttcacttgacccctgcccacctctccaacctaactggcttacttcctagtctacttgaggctgcaatcacactgaggaactcacaattccaaacatacaagaggctctctcttaacacggcacttagacacgtgctgttccaccttccctcgtgctgttccacctttcctcagactatttttcagccttctggcatcagcaaaccttataaaatttttttgatttcagtgtagttctctcctcttcaaataaacatgtctgccttc

SEQ ID NO: 15294 - DNA, 1529 bp, Homo sapiens
  source 1..1529: mol_type = unassigned DNA
gtcgagccgagtcactgcgtcctggcagcagaagctgcaccatgtccatgtcacccacggtcatcatcctggcatgtcttgggttcttcttggaccagagtgtgtgggcacacgtgggtggtcaggacaagcccttctgctctgcctggcccagcgctgtggtgcctcaaggaggacacgtgactcttcggtgtcactgtcgtcgtgggtttaacatcttcacgctgtacaagaaagatggggtccctgtccctgagctctacaacagaatattctggaacagtttcctcattagccctgtgaccccagcacacgcagggacctacagatgtcgaggttttcacccgcactcccccactgagtggtcggcacccagcaaccccctggtgatcatggtcacaggtctatatgagaaaccttcgcttacagcccggccgggccccacggttcgcgcaggagagaacgtgaccttgtcctgcagctcccagagctcctttgacatctaccatctatccagggagggggaagcccatgaacttaggctccctgcagtgcccagcatcaatggaacattccaggccgacttccctctgggtcctgccacccacggagagacctacagatgcttcggctctttccatggatctccctacgagtggtcagacccgagtgacccactgcctgtttctgtcacaggtatcgccagacacctgcatgctgtgattaggtactcagtggccatcatcctcttcaccatccttcccttctttctccttcatcgctggtgctccaaaaaaaaaaatgctgctgtaatgaaccaagagcctgcgggacacagaacagtgaacagggaggactctgatgaacaagaccctcaggaggtgacatacgcacagttggatcactgcattttcacacagagaaaaatcactggcccttctcagaggagcaagagaccctcaacagataccagcgtgtgtatagaacttccaaatgctgagcccagagcgttgtctcctgcccatgagcaccacagtcaggccttgatgggatcttctagggagacaacagccctgtctcaaacccagcttgccagctctaatgtaccagcagctggaatctgaaggcgtgagtctccatcttagagcatcactcttcctcacaccacaaatctggtgcctgtctcttgcttaccaatgtctaaggtccccactgcctgctgcagagaaaacacactcctttgcttagcccacaattctctatttcacttgacccctgcccacctctccaacctaactggcttacttcctagtctacttgaggctgcaatcacactgaggaactcacaattccaaacatacaagaggctctctcttaacacggcacttagacacgtgctgttccaccttccctcgtgctgttccacctttcctcagactatttttcagccttctggcatcagcaaaccttataaaatttttttgatttcagtgtagttctctcctcttcaaataaacatgtctgccttc

SEQ ID NO: 15295 - DNA, 1580 bp, Homo sapiens
  source 1..1580: mol_type = unassigned DNA
gtcgagccgagtcactgcgtcctggcagcagaagctgcaccatgtccatgtcacccacggtcatcatcctggcatgtcttgggttcttcttggaccagagtgtgtgggcacacgtgggtggtcaggacaagcccttctgctctgcctggcccagcgctgtggtgcctcaaggaggacacgtgactcttcggtgtcactgtcgtcgtgggtttaacatcttcacgctgtacaagaaagatggggtccctgtccctgagctctacaacagaatattctggaacagtttcctcattagccctgtgaccccagcacacgcagggacctacagatgtcgaggttttcacccgcactcccccactgagtggtcggcacccagcaaccccctggtgatcatggtcacaggtctatatgagaaaccttcgcttacagcccggccgggccccacggttcgcgcaggagagaacgtgaccttgtcctgcagctcccagagctcctttgacatctaccatctatccagggagggggaagcccatgaacttaggctccctgcagtgcccagcatcaatggaacattccaggccgacttccctctgggtcctgccacccacggagagacctacagatgcttcggctctttccatggatctccctacgagtggtcagacccgagtgacccactgcctgtttctgtcacaggaaacccttctagtagttggccttcacccactgaaccaagcttcaaaactggtatcgccagacacctgcatgctgtgattaggtactcagtggccatcatcctcttcaccatccttcccttctttctccttcatcgctggtgctccaaaaaaaaaaatgctgctgtaatgaaccaagagcctgcgggacacagaacagtgaacagggaggactctgatgaacaagaccctcaggaggtgacatacgcacagttggatcactgcattttcacacagagaaaaatcactggcccttctcagaggagcaagagaccctcaacagataccagcgtgtgtatagaacttccaaatgctgagcccagagcgttgtctcctgcccatgagcaccacagtcaggccttgatgggatcttctagggagacaacagccctgtctcaaacccagcttgccagctctaatgtaccagcagctggaatctgaaggcgtgagtctccatcttagagcatcactcttcctcacaccacaaatctggtgcctgtctcttgcttaccaatgtctaaggtccccactgcctgctgcagagaaaacacactcctttgcttagcccacaattctctatttcacttgacccctgcccacctctccaacctaactggcttacttcctagtctacttgaggctgcaatcacactgaggaactcacaattccaaacatacaagaggctctctcttaacacggcacttagacacgtgctgttccaccttccctcgtgctgttccacctttcctcagactatttttcagccttctggcatcagcaaaccttataaaatttttttgatttcagtgtagttctctcctcttcaaataaacatgtctgccttc

SEQ ID NO: 15296 - DNA, 1694 bp, Homo sapiens
  source 1..1694: mol_type = unassigned DNA
gtctgcaccggcagcaccatgtcgctcatggtcgtcagcatggcgtgtgttgggttcttcttgctggaggggccctggccacatgtgggtggtcaggacaagcccttcctctctgcctggcccggcactgtggtgtctgaaggacaacatgtgactcttcagtgtcgctctcgtcttgggtttaacgaattcagtctgtccaaagaagacgggatgcctgtccctgagctctacaacagaatattccggaacagctttctcatgggccctgtgaccccagcacatgcagggacctacagatgttgcagttcacacccacactcccccactgggtggtcggcacccagcaaccctgtggtgatcatggtcacaggagtccacagaaaaccttccctcctggcccacccaggtcccctggtgaaatcgggagagacggtcatcctgcaatgttggtcagatgtcaggtttgagcgcttccttctgcacagagaggggatcactgaggaccccttgcgcctcattggacagctccacgatgcgggttcccaggtcaactattccatgggtcccatgacacctgcccttgcagggacctacagatgctttggttctgtcactcacttaccctatgagttgtcggctcccagtgaccctctggacatcgtggtcgtaggtctatatgggaaaccttctctctcagcccagccgggccccacggttcaggcaggagagaatgtgaccttgtcctgcagctcccggagcttgtttgacatttaccatctatccagggaggcagaggccggtgaacttaggctcactgcggtgctgagggtcaatggaacattccaggccaacttccctctgggccctgtgacccacggagggaactacagatgcttcggctctttccgtgccctgccccacgcgtggtcagacccgagtgacccactgcccgtttctgtcacaggtaactccagatacctgcacgctctgattgggacctcagtggtcatcatcccctttgctatcctcctcttctttctccttcatcgctggtgtgccaacaaaaagaatgctgttgtaatggaccaagagcctgcagggaacagaacagtgaacagggaggactctgatgaacaagaccctcaggaggtgacatacgcacagttgaatcactgcgttttcacacagagaaaaatcactcgcccttctcagaggcccaagacacccccaacagataccagcgtgtaacacggaacttccaaatgctgagcgcagatccaaagttgtcttctgtccaccagcaccacagtcaggccttgatgggatcttctagggagacaatagccctgtctcaaaaccgggttgccagctcccatgtaccagcagctggaatctgaaggcgtgagtctgcatcttagggcatcgctcttcctcacaccacgaatctgaacatgcctctctcttgcttacaaatgtctaaggtccccactgcctgctggagagaaaacacactcctttgcttagcccacaattctccatttcacttgacccctgcccacctctccaacctaactggcttacttcctagtctacttgaggctgcgatcacactgaggaactcacaattccaaacatataagaggctccctcttaacacggcacttagatacatgctattccacctttcctca

SEQ ID NO: 15297 - DNA, 1320 bp, Homo sapiens
  source 1..1320: mol_type = unassigned DNA
ctgagctcggtcgcggctgcctgtctgctccggcagcaccatgtcgctcttggtcgtcagcatggcgtgtgttgggttcttcttgctgcagggggcctggccacatgagggagtccacagaaaaccttccctcctggcccacccaggtcgcctggtgaaatcagaagagacagtcatcctgcagtgttggtcagatgtcatgtttgaacacttccttctgcacagagaggggatgtttaacgacactttgcgcctcattggagaacaccatgatggggtctccaaggccaacttctccatcagtcgcatgacgcaagacctggcagggacctacagatgctacggttctgttactcactccccctatcaggtgtcagctcccagtgaccctctggacatcgtgatcataggtctatatgagaaaccttctctctcagcccagctgggccccacggttctggcaggagagaatgtgaccttgtcctgcagctcccggagctcctatgacatgtaccatctatccagggaaggggaggcccatgaacgtaggctccctgcagggcccaaggtcaacggaacattccaggctgactttcctctgggccctgccacccacggagggacctacagatgcttcggctctttccatgactctccatacgagtggtcaaagtcaagtgacccactgcttgtttctgtcacaggaaacccttcaaatagttggccttcacccactgaaccaagctccaaaaccggtaacccccgacacctgcacattctgattgggacctcagtggtcatcatcctcttcatcctcctcttctttctccttcatcgctggtgctccaacaaaaaaaatgctgcggtaatggaccaagagtctgcaggaaacagaacagcgaatagcgaggactctgatgaacaagaccctcaggaggtgacatacacacagttgaatcactgcgttttcacacagagaaaaatcactcgcccttctcagaggcccaagacacccccaacagatatcatcgtgtacacggaacttccaaatgctgagtccagatccaaagttgtctcctgcccatgagcaccacagtcaggccttgagggcgtcttctagggagacaacagccctgtctcaaaaccgggttgccagctcccatgtaccagcagctggaatctgaaggcgtgagtctgcatcttagggcatcgatcttcctcacaccacaaatctgaatgtgcctctctcttgcttacaaatgtctaaggtccccactgcctgctggagaaaaaacacactcctttgcttaacccacagtt

SEQ ID NO: 15298 - DNA, 1590 bp, Homo sapiens
  source 1..1590: mol_type = unassigned DNA
ggcgcggccgcctgtctgcacagacagcaccatgtcgctcatggtcgtcagcatggtgtgtgttgggttcttcttgctgcagggggcctggccacatgagggagtccacagaaaaccttccctcctggcccacccaggtcccctggtgaaatcagaagagacagtcatcctgcaatgttggtcagatgtcaggtttcagcacttccttctgcacagagaagggaagtttaaggacactttgcacctcattggagagcaccatgatggggtctccaaggccaacttctccatcggtcccatgatgcaagaccttgcagggacctacagatgctacggttctgttactcactccccctatcagttgtcagctcccagtgaccctctggacatcgtcatcacaggtctatatgagaaaccttctctctcagcccagccgggccccacggttctggcaggagagagcgtgaccttgtcctgcagctcccggagctcctatgacatgtaccatctatccagggagggggaggcccatgaacgtaggttctctgcagggcccaaggtcaacggaacattccaggccgactttcctctgggccctgccacccacggaggaacctacagatgcttcggctctttccgtgactctccatacgagtggtcaaactcgagtgacccactgcttgtttctgtcacaggaaacccttcaaatagttggccttcacccactgaaccaagctccgaaaccggtaaccccagacacctgcatgttctgattgggacctcagtggtcatcatcctcttcatcctcctcctcttctttctccttcatcgctggtgctgcaacaaaaaaaatgctgttgtaatggaccaagagcctgcagggaacagaacagtgaacagggaggactctgatgaacaagaccctcaggaggtgacatatgcacagttgaatcactgcgttttcacacagagaaaaatcactcgcccttctcagaggcccaagacacccccaacagatatcatcgtgtacacggaacttccaaatgctgagccctgatccaaagttgtctcctgcccatgagcaccacagtcaggccttgaggggatcttctagggagacaacagccctgtctcaaaactgggttgccagctccaatgtaccagcagctggaatctgaaggcgtgagtctgcatcttagggcatcgctcttcctcacaccacaaatctgaacgtgcctctcccttgcttacaaatgtctaaggtccccactgcctgctggagagaaaacacactcctttgcttagcccacaattctccatttcacttgacccctgcccacctctccaacctaactggcttacttcctagtctacttgaggctgcaatcacactgaggaactcacaattccaaacatacaagaggctccctcttaacacggcacttagacacgtgctgttccaccttccctcatgctgttccacctcccctcagactagctttcagccttctgtcagcagtaaaacttatatattttttaaaataatttcaatgtagttttccctccttcaaataaacatgtctgccctca

SEQ ID NO: 15299 - DNA, 1587 bp, Homo sapiens
  source 1..1587: mol_type = unassigned DNA
cgcggccgcctgtctgcacagacagcaccatgtcgctcatggtcgtcagcatggtgtgtgttgggttcttcttgctgcagggggcctggccacatgagggagtccacagaaaaccttccctcctggcccacccaggtcccctggtgaaatcagaagagacagtcatcctgcaatgttggtcagatgtcaggtttcagcacttccttctgcacagagaagggaagtttaaggacactttgcacctcattggagagcaccatgatggggtctccaaggccaacttctccatcggtcccatgatgcaagaccttgcagggacctacagatgctacggttctgttactcactccccctatcagttgtcagctcccagtgaccctctggacatcgtcatcacaggtctatatgagaaaccttctctctcagcccagccgggccccacggttctggcaggagagagcgtgaccttgtcctgcagctcccggagctcctatgacatgtaccatctatccagggagggggaggcccatgaacgtaggttctctgcagggcccaaggtcaacggaacattccaggccgactttcctctgggccctgccacccacggaggaacctacagatgcttcggctctttccgtgactctccatacgagtggtcaaactcgagtgacccactgcttgtttctgtcacaggaaacccttcaaatagttggccttcacccactgaaccaagctccaaaaccggtaacccccgacacctgcacattctgattgggacctcagtggtcatcatcctcttcatcctcctcttctttctccttcatcgctggtgctccaacaaaaaaaatgctgcggtaatggaccaagagtctgcaggaaacagaacagcgaatagcgaggactctgatgaacaagaccctcaggaggtgacatacacacagttgaatcactgcgttttcacacagagaaaaatcactcgcccttctcagaggcccaagacacccccaacagatatcatcgtgtacacggaacttccaaatgctgagtccagatccaaagttgtctcctgcccatgagcaccacagtcaggccttgagggcgtcttctagggagacaacagccctgtctcaaaaccgggttgccagctcccatgtaccagcagctggaatctgaaggcgtgagtctgcatcttagggcatcgatcttcctcacaccacaaatctgaatgtgcctctctcttgcttacaaatgtctaaggtccccactgcctgctggagaaaaaacacactcctttgcttaacccacagttctccatttcacttgacccctgcccacctctccaacctaactggcttacttcctagtctacttgaggctgcaatcacactgaggaactcacaattccaaacatacaagaggctccctcttaacgcagcacttagacacgtgttgttccaccttccctcatgctgttccacctcccctcagactagctttcagtcttctgtcagcagtaaaacttatatattttttaaaataacttcaatgtagttttccatccttcaaataaacatgtctgcccccatg

SEQ ID NO: 15300 - DNA, 1447 bp, Homo sapiens
  source 1..1447: mol_type = unassigned DNA
agaagctgcaccatgtccatgtcacccacggtcatcatcctggcatgtcttgggttcttcttggaccagagtgtgtgggcacacgtgggtggtcaggacaagcccttctgctctgcctggcccagcgctgtggtgcctcaaggaggacacgtgactcttcggtgtcactatcgtcgtgggtttaacatcttcacgctgtacaagaaagatggggtccctgtccctgagctctacaacagaatattctggaacagtttcctcattagccctgtgaccccagcacacgcagggacctacagatgtcgaggttttcacccgcactcccccactgagtggtcggcacccagcaaccccctggtgatcatggtcacaggtctatatgagaaaccttcgcttacagcccggccgggccccacggttcgcgcaggagagaacgtgaccttgtcctgcagctcccagagctcctttgacatctaccatctatccagggagggggaagcccatgaacttaggctccctgcagtgcccagcatcaatggaacattccaggccgacttccctctgggtcctgccacccacggagagacctacagatgcttcggctctttccatggatctccctacgagtggtcagacccgagtgacccactgcctgtttctgtcacaggaaacccttctagtagttggccttcacccactgaaccaagcttcaaaactgatgctgctgtaatgaaccaagagcctgcgggacacagaacagtgaacagggaggactctgatgaacaagaccctcaggaggtgacatacgcacagttggatcactgcattttcacacagagaaaaatcactggcccttctcagaggagcaagagaccctcaacagataccagcgtgtgtatagaacttccaaatgctgagcccagagcgttgtctcctgcccatgagcaccacagtcaggccttgatgggatcttctagggagacaacagccctgtctcaaacccagcttgccagctctaatgtaccagcagctggaatctgaaggcgtgagtctccatcttagagcatcactcttcctcacaccacaaatctggtgcctgtctcttgcttaccaatgtctaaggtccccactgcctgctgcagagaaaacacactcctttgcttagcccacaattctctatttcacttgacccctgcccacctctccaacctaactggcttacttcctagtctacttgaggctgcaatcacactgaggaactcacaattccaaacatacaagaggctctctcttaacacggcacttagacacgtgctgttccaccttccctcgtgctgttccacctttcctcagactatttttcagccttctggcatcagcaaaccttataaaatttttttgatttcagtgtagttctctcctcttcaaataaacatgtctgccttca

SEQ ID NO: 15301 - DNA, 1396 bp, Homo sapiens
  source 1..1396: mol_type = unassigned DNA
agaagctgcaccatgtccatgtcacccacggtcatcatcctggcatgtcttgggttcttcttggaccagagtgtgtgggcacacgtgggtggtcaggacaagcccttctgctctgcctggcccagcgctgtggtgcctcaaggaggacacgtgactcttcggtgtcactatcgtcgtgggtttaacatcttcacgctgtacaagaaagatggggtccctgtccctgagctctacaacagaatattctggaacagtttcctcattagccctgtgaccccagcacacgcagggacctacagatgtcgaggttttcacccgcactcccccactgagtggtcggcacccagcaaccccctggtgatcatggtcacaggtctatatgagaaaccttcgcttacagcccggccgggccccacggttcgcgcaggagagaacgtgaccttgtcctgcagctcccagagctcctttgacatctaccatctatccagggagggggaagcccatgaacttaggctccctgcagtgcccagcatcaatggaacattccaggccgacttccctctgggtcctgccacccacggagagacctacagatgcttcggctctttccatggatctccctacgagtggtcagacccgagtgacccactgcctgtttctgtcacagatgctgctgtaatgaaccaagagcctgcgggacacagaacagtgaacagggaggactctgatgaacaagaccctcaggaggtgacatacgcacagttggatcactgcattttcacacagagaaaaatcactggcccttctcagaggagcaagagaccctcaacagataccagcgtgtgtatagaacttccaaatgctgagcccagagcgttgtctcctgcccatgagcaccacagtcaggccttgatgggatcttctagggagacaacagccctgtctcaaacccagcttgccagctctaatgtaccagcagctggaatctgaaggcgtgagtctccatcttagagcatcactcttcctcacaccacaaatctggtgcctgtctcttgcttaccaatgtctaaggtccccactgcctgctgcagagaaaacacactcctttgcttagcccacaattctctatttcacttgacccctgcccacctctccaacctaactggcttacttcctagtctacttgaggctgcaatcacactgaggaactcacaattccaaacatacaagaggctctctcttaacacggcacttagacacgtgctgttccaccttccctcgtgctgttccacctttcctcagactatttttcagccttctggcatcagcaaaccttataaaatttttttgatttcagtgtagttctctcctcttcaaataaacatgtctgccttca

SEQ ID NO: 15302 - DNA, 1596 bp, Homo sapiens
  source 1..1596: mol_type = unassigned DNA
atgtcgctcatggtcgtcagcatggcgtgtgttgggttcttcttggaccagagtgtgtgggcacacgtgggtggtcaggacaagcccttctgctctgcctggcccagcgctgtggtgcctcaaggaggacacgtgactcttcggtgtcactatcgtcgtgggtttaacatcttcacgctgtacaagaaagatggggtccctgtccctgagctctacaacagaatattctggaacagtttcctcattagccctgtgaccccagcacacgcagggacctacagatgtcgaggttttcacccgcactcccccactgagtggtcggcacccagcaaccccctggtgatcatggtcacaggtctatatgagaaaccttcgcttacagcccggccgggccccacggttcgcgcaggagagaacgtgaccttgtcctgcagctcccagagctcctttgacatctaccatctatccagggagggggaagcccatgaacttaggctccctgcagtgcccagcatcaatggaacattccaggccgacttccctctgggtcctgccacccacggagagacctacagatgcttcggctctttccatggatctccctacgagtggtcagacccgagtgacccactgcctgtttctgtcacaggaaacccttctagtagttggccttcacccactgaaccaagcttcaaaactggtatcgccagacacctgcatgctgtgattaggtactcagtggccatcatcctctttaccatccttcccttctttctccttcatcgctggtgctccaaaaaaaaagtaagcctcacgaagcagaggccagagaactcagggccctgtgcggaagcaggatgggagcacgcagatgctgctgtaatgaaccaagagcctgcgggacacagaacagtgaacagggaggactctgatgaacaagaccctcaggaggtgacatacgcacagttggatcactgcattttcacacagagaaaaatcactggcccttctcagaggagcaagagaccctcaacagataccagcgtgtgtatagaacttccaaatgctgagcccagagcgttgtctcctgcccatgagcaccacagtcaggccttgatgggatcttctagggagacaacagccctgtctcaaacccagcttgccagctctaatgtaccagcagctggaatctgaaggcgtgagtctccatcttagagcatcactcttcctcacaccacaaatctggtgcctgtctcttgcttaccaatgtctaaggtccccactgcctgctgcagagaaaacacactcctttgcttagcccacaattctctatttcacttgacccctgcccacctctccaacctaactggcttacttcctagtctacttgaggctgcaatcacactgaggaactcacaattccaaacatacaagaggctctctcttaacacggcacttagacacgtgctgttccaccttccctcgtgctgttccacctttcctcagactatttttcagccttctggcatcagcaaaccttataaaatttttttgatttcagtgtagttctctcctcttcaaataaacatgtctgcc

SEQ ID NO: 15303 - DNA, 715 bp, Homo sapiens
  source 1..715: mol_type = unassigned DNA
gaagctgcaccatgtccatgtcacccacggtcatcatcctggcatgtcttgggttcttcttggaccagagtgtgtgggcacacgtgggtctatatgagaaaccttcgcttacagcccggccgggccccacggttcgcgcaggagagaacgtgaccttgtcctgcagctcccagagctcctttgacatctaccatctatccagggagggggaagcccatgaacttaggctccctgcagtgcccagcatcaatggaacattccaggccgacttccctctgggtcctgccacccacggagagacctacagatgcttcggctctttccatggatctccctacgagtggtcagacccgagtgacccactgcctgtttctgtcacagatgctgctgtaatgaaccaagagcctgcgggacacagaacagtgaacagggaggactctgatgaacaagaccctcaggaggtgacatacgcacagttggatcactgcattttcacacagagaaaaatcactggcccttctcagaggagcaagagaccctcaacagataccagcgtgtgtatagaacttccaaatgctgagcccagagcgttgtctcctgcccatgagcaccacagtcaggccttgatgggatcttctagggagacaacagccctgtctcaaacccagcttgccagctctaatgtaccagcagctggaatctgaaggcgtgagtc

SEQ ID NO: 15304 - DNA, 1448 bp, Homo sapiens
  source 1..1448: mol_type = unassigned DNA
gagtttgttcttacacacaagtttaatgccaccttcctctgtctgccatggaccaacaagcaatatatgctgagttaaacttacccacagactcaggcccagaaagttcttcaccttcatctcttcctcgggatgtctgtcagggttcaccttggcatcaatttgccctgaaacttagctgtgctgggattattctccttgtcttggttgttactgggttgagtgtttcagtgacatccttaatacagaaatcatcaatagaaaaatgcagtgtggacattcaacagagcaggaataaaacaacagagagaccgggtctcttaaactgcccaatatattggcagcaactccgagagaaatgcttgttattttctcacactgtcaacccttggaataacagtctagctgattgttccaccaaagaatccagcctgctgcttattcgagataaggatgaattgatacacacacagaacctgatacgtgacaaagcaattctgttttggattggattaaatttttcattatcagaaaagaactggaagtggataaacggctcttttttaaattctaatgacttagaaattagaggtgatgctaaagaaaacagctgtatttccatctcacagacatctgtgtattctgagtactgtagtacagaaatcagatggatctgccaaaaagaactaacacctgtgagaaataaagtgtatcctgactcttgactatgaatcccatctcaatttatttgcttcccattactgatctctgtacttgtagctgcacatactattggtactacctaatagtgccacatttagtggcacaaagtgaacaattctgagaattgacaactgttatgaatcttacagaagttcatgtttatcatattcattctattaaatgaggaaacagagacatagagaaaaacgtgcatcgttttaaagaaacagtgatattctatggtgaaggagtgaaggatgtccccgaatatgccagattggtatatgattgttttgtgtttaaaacagtggagaaattgtagattcagaaagggagagctgacctgtctcttcccgcacgcggcaagccgtgaagattcctctgggagggctatccgagtcatacaagggcaagaaaatagctcttatcgccagagacctggaattggatgctgcaatgaacctgaataaagatacttaataaacacctatctttcacctattttacagccccccgcaaccaatatatctcctagtgactcctctagaaaatttattgcccctagccagcttttcttcatcctgtcatttcttttcaaatttatcattcttggtctaaaaagcataaaagcatcttgcttaggccacttctatggatttcactctcttgcgagttcctcatgtacatgcaaaacgaataaaatgtgtatacttttattttgttca

SEQ ID NO: 15305 - DNA, 1332 bp, Homo sapiens
  source 1..1332: mol_type = unassigned DNA
gcaggcattgtttgttcttgtcttggatttatgcctttaaatttcaccttttattacacagctatagcaggcctttttatgagactaacctggcctctccactaaaggatgtgtgactttctggggacagaagagtacagtccctgacatcacacactgcagagatggataaccaaggagtaatctactcagacctgaatctgcccccaaacccaaagaggcagcaacgaaaacctaaaggcaataaaaactccattttagcaactgaacaggaaataacctatgcggaattaaaccttcaaaaagcttctcaggattttcaagggaatgacaaaacctatcactgcaaagatttaccatcagctccagagaagctcattgttgggatcctgggaattatctgtcttatcttaatggcctctgtggtaacgatagttgttattccctcacgtcattgtggccattgtcctgaggagtggattacatattccaacagttgttactacattggtaaggaaagaagaacttgggaagagagtttgctggcctgtacttcgaagaactccagtctgctttctatagataatgaagaagaaatgaaatttctgtccatcatttcaccatcctcatggattggtgtgtttcgtaacagcagtcatcatccatgggtgacaatgaatggtttggctttcaaacatgagataaaagactcagataatgctgaacttaactgtgcagtgctacaagtaaatcgacttaaatcagcccagtgtggatcttcaataatatatcattgtaagcataagctttagaggtaaagcgtttgcatttgcagtgcatcagataaattgtatatttcttaaaatagaaatatattatgattgcataaatcttaaaatgaattatgttatttgctctaataagaaaattctaaatcaattattgaaacaggatacacacaattactaaagtacagacatcctagcatttgtgtcgggctcattttgctcaacatggtatttgtggttttcagcctttctaaaagttgcatgttatgtgagtcagcttataggaagtaccaagaacagtcaaacccatggagacagaaagtagaatagtggttgccaatgtctgagggaggttgaaataggagatgacctctaactgatagaacgttactttgtgtcgtgatgaaaactttctaaatttcagtagtggtgatggttgtaactctgcgaatatactaaacatcattgatttttaatcattttaagtgcatgaaatgtatgctttgtacacgacacttcaataaagctatccagaaaaaaaaaa

SEQ ID NO: 15306 - DNA, 1407 bp, Homo sapiens
  source 1..1407: mol_type = unassigned DNA
gggcagtctgcgaagattgcaggcattgtttgttcttgtcttggatttatgcctttaaatttcaccttttattacacagctatagcaggcctttttatgagactaacctggcctctccactaaaggatgtgtgactttctggggacagaagagtacagtccctgacatcacacactgcagagatggataaccaaggagtaatctactcagacctgaatctgcccccaaacccaaagaggcagcaacgaaaacctaaaggcaataaaaactccattttagcaactgaacaggaaataacctatgcggaattaaaccttcaaaaagcttctcaggattttcaagggaatgacaaaacctatcactgcaaagatttaccatcagctccagagaagctcattgttgggatcctgggaattatctgtcttatcttaatggcctctgtggtaacgatagttgttattccctctacattaatacagaggcacaacaattcttccctgaatacaagaactcagaaagcacgtcattgtggccattgtcctgaggagtggattacatattccaacagttgttactacattggtaaggaaagaagaacttgggaagagagtttgctggcctgtacttcgaagaactccagtctgctttctatagataatgaagaagaaatgaaatttctgtccatcatttcaccatcctcatggattggtgtgtttcgtaacagcagtcatcatccatgggtgacaatgaatggtttggctttcaaacatgagataaaagactcagataatgctgaacttaactgtgcagtgctacaagtaaatcgacttaaatcagcccagtgtggatcttcaataatatatcattgtaagcataagctttagaggtaaagcgtttgcatttgcagtgcatcagataaattgtatatttcttaaaatagaaatatattatgattgcataaatcttaaaatgaattatgttatttgctctaataagaaaattctaaatcaattattgaaacaggatacacacaattactaaagtacagacatcctagcatttgtgtcgggctcattttgctcaacatggtatttgtggttttcagcctttctaaaagttgcatgttatgtgagtcagcttataggaagtaccaagaacagtcaaacccatggagacagaaagtagaatagtggttgccaatgtctgagggaggttgaaataggagatgacctctaactgatagaacgttactttgtgtcgtgatgaaaactttctaaatttcagtagtggtgatggttgtaactctgcgaatatactaaacatcattgatttttaatcattttaagtgcatgaaatgtatgctttgtacacgacacttcaataaagctatccagaaaaaaaaaaaaa

SEQ ID NO: 15307 - DNA, 1559 bp, Homo sapiens
  source 1..1559: mol_type = unassigned DNA
gcatgccccagaggtacagatgtatatgtctcccaggaagtctctgtgggtgaaggactgatctcaagttgtggctgacactagttaaagccaagttagagggctgtttcagggtctacattgagactacagttgatatgcctacctcctgagacactagtgtgtgagtctcctcctgggcccctgggcaaatggttttggcagcatgaccaaggcctaaatggggctgaaggcaagcacaggaggatgggtcccttttcaggtctggagatggaatcactgttgctatagcaggcctttttatgagactaacctggcctctccactaaaggatgtgtgactttctggggacagaagagtacagtccctgacatcacacactgcagagatggataaccaaggagtaatctactcagacctgaatctgcccccaaacccaaagaggcagcaacgaaaacctaaaggcaataaaaactccattttagcaactgaacaggaaataacctatgcggaattaaaccttcaaaaagcttctcaggattttcaagggaatgacaaaacctatcactgcaaagatttaccatcagctccagagaagctcattgttgggatcctgggaattatctgtcttatcttaatggcctctgtggtaacgatagttgttattccctcacgtcattgtggccattgtcctgaggagtggattacatattccaacagttgttactacattggtaaggaaagaagaacttgggaagagagtttgctggcctgtacttcgaagaactccagtctgctttctatagataatgaagaagaaatgaaatttctgtccatcatttcaccatcctcatggattggtgtgtttcgtaacagcagtcatcatccatgggtgacaatgaatggtttggctttcaaacatgagataaaagactcagataatgctgaacttaactgtgcagtgctacaagtaaatcgacttaaatcagcccagtgtggatcttcaataatatatcattgtaagcataagctttagaggtaaagcgtttgcatttgcagtgcatcagataaattgtatatttcttaaaatagaaatatattatgattgcataaatcttaaaatgaattatgttatttgctctaataagaaaattctaaatcaattattgaaacaggatacacacaattactaaagtacagacatcctagcatttgtgtcgggctcattttgctcaacatggtatttgtggttttcagcctttctaaaagttgcatgttatgtgagtcagcttataggaagtaccaagaacagtcaaacccatggagacagaaagtagaatagtggttgccaatgtctgagggaggttgaaataggagatgacctctaactgatagaacgttactttgtgtcgtgatgaaaactttctaaatttcagtagtggtgatggttgtaactctgcgaatatactaaacatcattgatttttaatcattttaagtgcatgaaatgtatgctttgtacacgacacttcaataaagctatccagaaaaaaaaaaaaa

SEQ ID NO: 15308 - DNA, 1598 bp, Homo sapiens
  source 1..1598: mol_type = unassigned DNA
gcatgccccagaggtacagatgtatatgtctcccaggaagtctctgtgggtgaaggactgatctcaagttgtggctgacactagttaaagccaagttagagggctgtttcagggtctacattgagactacagttgatatgcctacctcctgagacactagtgtgtgagtctcctcctgggcccctgggcaaatggttttggcagcatgaccaaggcctaaatggggctgaaggcaagcacaggaggatgggtcccttttcaggtctggagatggaatcactgttgctatagcaggcctttttatgagactaacctggcctctccactaaaggatgtgtgactttctggggacagaagagtacagtccctgacatcacacactgcagagatggataaccaaggagtaatctactcagacctgaatctgcccccaaacccaaagaggcagcaacgaaaacctaaaggcaataaaaactccattttagcaactgaacaggaaataacctatgcggaattaaaccttcaaaaagcttctcaggattttcaagggaatgacaaaacctatcactgcaaagatttaccatcagctccagagaagctcattgttgggatcctgggaattatctgtcttatcttaatggcctctgtggtaacgatagttgttattccctctacattaatacagaggcacaacaattcttccctgaatacaagaactcagaaagcacgtcattgtggccattgtcctgaggagtggattacatattccaacagttgttactacattggtaaggaaagaagaacttgggaagagagtttgctggcctgtacttcgaagaactccagtctgctttctatagataatgaagaagaaatgaaatttctgtccatcatttcaccatcctcatggattggtgtgtttcgtaacagcagtcatcatccatgggtgacaatgaatggtttggctttcaaacatgagataaaagactcagataatgctgaacttaactgtgcagtgctacaagtaaatcgacttaaatcagcccagtgtggatcttcaataatatatcattgtaagcataagctttagaggtaaagcgtttgcatttgcagtgcatcagataaattgtatatttcttaaaatagaaatatattatgattgcataaatcttaaaatgaattatgttatttgctctaataagaaaattctaaatcaattattgaaacaggatacacacaattactaaagtacagacatcctagcatttgtgtcgggctcattttgctcaacatggtatttgtggttttcagcctttctaaaagttgcatgttatgtgagtcagcttataggaagtaccaagaacagtcaaacccatggagacagaaagtagaatagtggttgccaatgtctgagggaggttgaaataggagatgacctctaactgatagaacgttactttgtgtcgtgatgaaaactttctaaatttcagtagtggtgatggttgtaactctgcgaatatactaaacatcattgatttttaatcattttaagtgcatgaaatgtatgctttgtacacgacacttcaataaagctatcc

SEQ ID NO: 15309 - DNA, 1209 bp, Homo sapiens
  source 1..1209: mol_type = unassigned DNA
tgcagagatgaataaacaaagaggaaccttctcagaagtgagtctggcccaggacccaaagcggcagcaaaggaaacctaaaggcaataaaagctccatttcaggaaccgaacaggaaatattccaagtagaattaaatcttcaaaatccttccctgaatcatcaagggattgataaaatatatgactgccaaggtttactgccacctccagagaagctcactgccgaggtcctaggaatcatttgcattgtcctgatggccactgtgttaaaaacaatagttcttattcctttcctggagcagaacaattcttccccaaatacaagaacccagaaaacacgtcattgtggccattgtcctgaggagtggattacatattccaacagttgttattacattggtaaggaaagaagaacttgggaagagagtttgctggcctgtacttcgaagaactccagtctgctttctatagataatgaagaagaaatgaaatttctggccagcattttaccttcctcatggattggtgtgtttcgtaacagcagtcatcatccatgggtgacaataaatggtttggctttcaaacataagataaaagactcagataatgctgaacttaactgtgcagtgctacaagtaaatcgacttaaatcagcccagtgtggatcttcaatgatatatcattgtaagcataagctttagaagtaaagcatttgcgtttgcagtgcatcagatacattttatatttcttaaaatagaaatattatgattgcataaatctgaaaatgaattatgttatttgctctgatacaaaaattctaaatcaattattgaaataggatgcacacaattactaaagtacagacatcctagcatttgtgtcgggctcattttgctcaacatggtatttgtggttttcagcctttctaaaagttgcatgttatgtgagtcagcttataggaagtaccaagaacagtcaaacccatggagacagaaagtagaatagtggttgccaatgtctcagggaggttgaaataggagatgaccactaattgatagaacgtttctttgtgtcgtgatgaaaactttctaaatttcagtagtggtgatggttgtaactctgcgaatatactaaacatcattgatttttaatcattttaagtgcatgaaatgtatgctttgtacatgacacttcaataaagctatcc

SEQ ID NO: 15310 - DNA, 1221 bp, Homo sapiens
  source 1..1221: mol_type = unassigned DNA
tgcagagatgaataaacaaagaggaaccttctcagaagtgagtctggcccaggacccaaagcggcagcaaaggaaacctaaaggcaataaaagctccatttcaggaaccgaacaggaaatattccaagtagaattaaatcttcaaaatccttccctgaatcatcaagggattgataaaatatatgactgccaaggtttactgccacctccagagaagctcactgccgaggtcctaggaatcatttgcattgtcctgatggccactgtgttaaaaacaatagttcttattcctttcctggagcagaacaatttttccccgaatacaagaacgcagaaagcacgtcattgtggccattgtcctgaggagtggattacatattccaacagttgttattacattggtaaggaaagaagaacttgggaagagagtttgctggcctgtacttcgaagaactccagtctgctttctatagataatgaagaagaaatgaaatttctggccagcattttaccttcctcatggattggtgtgtttcgtaacagcagtcatcatccatgggtgacaataaatggtttggctttcaaacataagataaaagactcagataatgctgaacttaactgtgcagtgctacaagtaaatcgacttaaatcagcccagtgtggatcttcaatgatatatcattgtaagcataagctttagaagtaaagcatttgcgtttgcagtgcatcagatacattttatatttcttaaaatagaaatattatgattgcataaatctgaaaatgaattatgttatttgctctgatacaaaaattctaaatcaattattgaaataggatgcacacaattactaaagtacagacatcctagcatttgtgtcgggctcattttgctcaacatggtatttgtggttttcagcctttctaaaagttgcatgttatgtgagtcagcttataggaagtaccaagaacagtcaaacccatggagacagaaagtagaatagtggttgccaatgtctcagggaggttgaaataggagatgaccactaattgatagaacgtttctttgtgtcgtgatgaaaactttctaaatttcagtagtggtgatggttgtaactctgcgaatatactaaacatcattgatttttaatcattttaagtgcatgaaatgtatgctttgtacatgacacttcaataaagctatccagaaaaaaaaaa

SEQ ID NO: 15311 - DNA, 881 bp, Homo sapiens
  source 1..881: mol_type = unassigned DNA
atgataccaacacgtcattgtggccattgtcctgaggagtggattacatattccaacagttgttattacattggtaaggaaagaagaacttgggaagagagtttgctggcctgtacttcgaagaactccagtctgctttctatagataatgaagaagaaatgaaatttctggccagcattttaccttcctcatggattggtgtgtttcgtaacagcagtcatcatccatgggtgacaataaatggtttggctttcaaacataagataaaagactcagataatgctgaacttaactgtgcagtgctacaagtaaatcgacttaaatcagcccagtgtggatcttcaatgatatatcattgtaagcataagctttagaagtaaagcatttgcgtttgcagtgcatcagatacattttatatttcttaaaatagaaatattatgattgcataaatctgaaaatgaattatgttatttgctctgatacaaaaattctaaatcaattattgaaataggatgcacacaattactaaagtacagacatcctagcatttgtgtcgggctcattttgctcaacatggtatttgtggttttcagcctttctaaaagttgcatgttatgtgagtcagcttataggaagtaccaagaacagtcaaacccatggagacagaaagtagaatagtggttgccaatgtctcagggaggttgaaataggagatgaccactaattgatagaacgtttctttgtgtcgtgatgaaaactttctaaatttcagtagtggtgatggttgtaactctgcgaatatactaaacatcattgatttttaatcattttaagtgcatgaaatgtatgctttgtacatgacacttcaataaagctatcc

SEQ ID NO: 15312 - DNA, 798 bp, Homo sapiens
  source 1..798: mol_type = unassigned DNA
atgagtaaacaaagaggaaccttctcagaagtgagtctggcccaggacccaaagtggcagcaaaggaaacctaaaggcaataaaagctccatttcaggaaccgaacaggaaatattccaagtagaattaaaccttcaaaatgcttctctgaatcatcaagggattgataaaatatatgactgccaaggtttactgccacctccagaaaagctcactgccgaggtcctaggaatcatttgcattgtcctgatggccactgtgttaaaaacaatagttcttattcctttcctggagcagaacaattcttccccgaatgcaagaacccagaaagcacgtcattgtggccattgtcctgaggagtggattacatattccaacagttgttattacattggtaaggaaagaagaacttgggaagagagtttgcaggcctgtgcttcaaagaactcttctagtctgctttgtatagataatgaagaagaaatgaaatttctggccagcattttaccttcctcatggattggtgtgtttcgtaacagcagtcatcatccatgggtgacaataaatggtttggctttcaaacatgagataaaagactcagatcatgctgaacgtaactgtgcaatgctacatgtacgtggacttatatcagaccagtgtggatcttcaagaatcattgtgagcataagctttagaattaaagcgcttgagcttgcagtgcatcagataaaattttatatttgttcaaacagaaatgatattatgattgcataagccttaaaatgaattgtgttattt

SEQ ID NO: 15313 - DNA, 973 bp, Homo sapiens
  source 1..973: mol_type = unassigned DNA
atgagtaaacaaagaggaaccttctcagaagtgagtctggcccaggacccaaagtggcagcaaaggaaacctaaaggcaataaaagctccatttcaggaaccgaacaggaaatattccaagtagaattaaaccttcaaaatgcttctctgaatcatcaagggattgataaaatatatgactgccaaggtttactgccacctccagaaaagctcactgccgaggtcctaggaatcatttgcattgtcctgatggccactgtgttaaaaacaatagttcttattcctttcctggagcagaacaattcttccccaaatacaagaacccagaaaacacgtcattgtggccattgtcctgaggagtggattacatattccaacagttgttattacattggtaaggaaagaagaacttgggaagagagtttgcaggcctgtgcttcaaagaactcttctagtctgctttgtatagataatgaagaagaaatgaaatttctggccagcattttaccttcctcatggattggtgtgtttcgtaacagcagtcatcatccatgggtgacaataaatggtttggctttcaaacatgagataaaagactcagatcatgctgaacgtaactgtgcaatgctacatgtacgtggacttatatcagaccagtgtggatcttcaagaatcattagacggggtttcatcatgttgaccaggctggtcttgaactcctgagctcaagaaatcaacacatcttggcctcccaagttgctgggattactgacacaagccaccgcccctgagtgctcatgtaccatttagcttgtgttttaaaaatctactttttctgccctccctatttttaactagatgatgttttaaaaattacttttccctctctatatagtttgatttaagcattagtcatttacaacaaatattaatattaaaatgcagaccgttatgattggaaaataaatcaatg

SEQ ID NO: 15314 - DNA, 1028 bp, Homo sapiens
  source 1..1028: mol_type = unassigned DNA
gcagttatcatagagcacagtccctcacatcacacagctgcagagatgagtaaacaaagaggaaccttctcagaagtgagtctggcccaggacccaaagtggcagcaaaggaaacctaaaggcaataaaagctccatttcaggaaccgaacaggaaatattccaagtagaattaaaccttcaaaatgcttctctgaatcatcaagggattgataaaatatatgactgccaaggtttactgccacctccagaaaagctcactgccgaggtcctaggaatcatttgcattgtcctgatggccactgtgttaaaaacaatagttcttattcctttcctggagcagaacaattcttccccgaatgcaagaacccagaaagcacgtcattgtggccattgtcctgaggagtggattacatattccaacagttgttattacattggtaaggaaagaagaacttgggaagagagtttgcaggcctgtgcttcaaagaactcttctagtctgctttgtatagataatgaagaagaaatgaaatttctggccagcattttaccttcctcatggattggtgtgtttcgtaacagcagtcatcatccatgggtgacaataaatggtttggctttcaaacatgagataaaagactcagatcatgctgaacgtaactgtgcaatgctacatgtacgtggacttatatcagaccagtgtggatcttcaagaatcattagacggggtttcatcatgttgaccaggctggtcttgaactcctgagctcaagaaatcaacacatcttggcctcccaagttgctgggattactgacacaagccaccgcccctgagtgctcatgtaccatttagcttgtgttttaaaaatctactttttctgccctccctatttttaactagatgatgttttaaaaattacttttccctctctatatagtttgatttaagcattagtcatttacaacaaatattaatattaaaatgcagaccgttatgattggaaaataaatcaatgaacaatataa

SEQ ID NO: 15315 - DNA, 928 bp, Homo sapiens
  source 1..928: mol_type = unassigned DNA
taaaactttaggaaattagtaccagacttttatattggtcaacagcaaaatgaacattactactcagcctccaacacatgcagtttgcctataccagggatcctgtcaaaatatacaccacttatagcttcttaagtgcagttatcatagagcacagtccctgacatcacacagctgcagagatgaataaacaaagaggaacctactcagaagtgagtctggcccaggacccaaagaggcagcaaaggaaacttaagggcaataaaatctccatttcaggaaccaaacaggaaatattccaagtagaattaaaccttcaaaatgcttcttcggatcatcaagggaatgacaagacatatcactgcaaaggtttactgccacctccagagaagctcactgctgaggtcctaggaatcatttgcattgtcctgatggccactgtgttaaaaacaatagttcttattccttgtattggagtactggagcagaacaatttttccctgaatagaagaatgcagaaagcacgtcattgtggccattgtcctgaggagtggattacatattccaacagttgttattacattggtaaggaaagaagaacttgggaagaaagagtttgctggcctgtgcttcgaagaactctgatctgctttctatagataatgaggaagaaatggtaagacgtaaatgtttcaacactttactaaaagcttatttctgtcaatatcatatttgtagaaatcatccatatgtttatacatatatttacttcatatatttttaagtctgtgtagtattcaactgacttcataatatttttatattcatatactgttaatgcacatttggttatttccagttttgcttttcatggaaacccatgcttctataaatgtttttatcacaaaataaatataaagaaaactaa

SEQ ID NO: 15316 - DNA, 3258 bp, Homo sapiens
  source 1..3258: mol_type = unassigned DNA
ctgtattgtggttcctggaacacttcagaggcttgtgattctactgcttcttattcacactataatacatgtctcaccaatagatgattcaagaacatcatttaaatacacaatttttcattctctatttttgctaaatttcttcatactcaactttcagattctttaatctccagctcagcttcaacaattcaacgctgttctttctgaaaaagtacacatcgtgccttctctacttcgctcttggaacataatttctcatggcagtgtttaagaccactctgtggaggttaatttctgggaccttagggataatatgcctttcgttgatgtctacgttgggaattttgttgaaaaattcttttactaaactgagtattgagccagcatttactccaggacccaacatagaactccagaaagactctgactgctgttcttgccaagaaaaatgggttgggtaccggtgcaactgttacttcatttccagtgaacagaaaacttggaacgaaagtcggcatctctgtgcttctcagaaatccagcctgcttcagcttcaaaacacagatgaactggattttatgagctccagtcaacaattttactggattggactctcttacagtgaggagcacaccgcctggttgtgggagaatggctctgcactctcccagtatctatttccatcatttgaaacttttaatacaaagaactgcatagcgtataatccaaatggaaatgctttagatgaatcctgtgaagataaaaatcgttatatctgtaagcaacagctcatttaaatgtttcttggggcagagaaggtggagagtaaagacccaacattactaacaatgatacagttgcatgttatattattactaattgtctacttctggagtctataaaatgtttttaaacagtgtcatatacaattgtcatgtatgtgaaacaatgtgttttaaaattgatgaaattcgttcacctacatttgagaattataaaattaacataaagaattttgtattttcatttaatgtatatatttaatgttaaattcaatgtagttttattacacatttatgtaattttatttacattcttgctaattctcagcagaaatttaaataagatttaattcacatcaaataaaatttagaaaataaaatttaactcacactgcccaggctggagcatagtggcaagatcatagctcattgcaagctcaagtgatcctcctgactcagcctcccaagtagctaggactgcaggcaccatgtcactatgcccgactaatttttaatttttaattttttgtcaagacaaggtcttgctatgttgcccaggctggtcttgaactcctggcctcaagggattctcccaccttggattcccaaagtgctgggattataggtgtgaaccaccatccctggccctcttcacattcttgtatgaagattgatttgggaaaaatgcatttcaggtaactgacaaaagatataggatgaaaaataatatctttcaaatgtttaatttgaactaagagagcttatgcattgcactttctggagatttgtaatgttttggttttgttgtccatgtgactacaaaataatatattttttaattaaaaaatttaaaataatacaggcaagcatgtaatgattatcaatatttttttccaccaactatcctatacccctgacctcctttcattaggcattatcttctgttttgattttaacacttagagtggttttctctgttatgaatcaaagctgatctattttcatcatttttgtgatgaaaaaattaattttgattgacttaggatggaaggatttggactgggtgtggtggtttatgcctgtaatcgcagcactttgggaggccaaggcgggtggatcacttgaggtcaggagtttgagaccagcctggccaacatggtgaaaccctgtctctactaaaaatacaaaaattggctgggtgtggtagtgcacacctgtaatcccagctatttgggaggctgagtcgagaggatcgcttgaacctaggaggtggaggttgcagtgagtcgagattgcaccactgcactccagcctgggtgacagagccagactcctctccaaaaaaaaaaaaaaaaaaaaaagatgaaaggatttggaaccttaattgcatctgaaaaactgcctcacctttgttatttagtgtactccaaccacggagtaacatcccatcataatcccaaatcctactcaaacaaaaggggaagggattatgcaggtgtacactaggccactggtgtaccaattagaaaccactttagagttatgcctactgtacccacataatcctaaaaatatgttacaactgctacttcatagtttatgccacttattttattttttacttttattatttttttttctgagacacggtttcattcccattgcccaggctgtagtgcaatgatgcaatcatggttcactgcagcttcaacttcccaggctcaagggatcctcccacctcagccttctgagtacttgggactcaggtgcgagccatcatgctcagctaattttttgtatcatttgtagaaatggggttttgtattgttgcccaggctgatcttgaactcctggggtcaaggattctgcccgccttggcctcctaaagggctggaattacaggcataagccactgtgcccggccagtttatataatttaaacactgccttttggttccttgattcccatatgctaggacaagtaattattattttattttattttactttaagttctgggttacatgtgcagaacctgcaggtttgttacataggtatacatgttccaaggtggtttgctgcacctattgacccatcatctaggttttaagtcccacatgcattaggtatttgtcctaatgctcttcctccccttgccccccaccccccgacaggccttggtctgtgatgttcacctccctgtgtccatgtgttctcattgttcaactcccacttattagtaagaacatgtggtgtttggttttctgttcctgtgttagtttgctgagaatgatggtttccagcttcatccatgtcgctgcaaaggacatgaactcattctttttatggctgcatagtattccatggtgtatatgtgccatattttctttatccagtctatcactgatgggcatttgggttggttccaagtctttgctatggtaaatagtgctgcaataaacatacgtgtgca

SEQ ID NO: 15317 - DNA, 3165 bp, Homo sapiens
  source 1..3165: mol_type = unassigned DNA
ctgtattgtggttcctggaacacttcagaggcttgtgattctactgcttcttattcacactataatacatgtctcaccaatagatgattcaagaacatcatttaaatacacaatttttcattctctatttttgctaaatttcttcatactcaactttcagattctttaatctccagctcagcttcaacaattcaacgctgttctttctgaaaaagtacacatcgtgccttctctacttcgctcttggaacataatttctcatggcagcttttactaaactgagtattgagccagcatttactccaggacccaacatagaactccagaaagactctgactgctgttcttgccaagaaaaatgggttgggtaccggtgcaactgttacttcatttccagtgaacagaaaacttggaacgaaagtcggcatctctgtgcttctcagaaatccagcctgcttcagcttcaaaacacagatgaactggattttatgagctccagtcaacaattttactggattggactctcttacagtgaggagcacaccgcctggttgtgggagaatggctctgcactctcccagtatctatttccatcatttgaaacttttaatacaaagaactgcatagcgtataatccaaatggaaatgctttagatgaatcctgtgaagataaaaatcgttatatctgtaagcaacagctcatttaaatgtttcttggggcagagaaggtggagagtaaagacccaacattactaacaatgatacagttgcatgttatattattactaattgtctacttctggagtctataaaatgtttttaaacagtgtcatatacaattgtcatgtatgtgaaacaatgtgttttaaaattgatgaaattcgttcacctacatttgagaattataaaattaacataaagaattttgtattttcatttaatgtatatatttaatgttaaattcaatgtagttttattacacatttatgtaattttatttacattcttgctaattctcagcagaaatttaaataagatttaattcacatcaaataaaatttagaaaataaaatttaactcacactgcccaggctggagcatagtggcaagatcatagctcattgcaagctcaagtgatcctcctgactcagcctcccaagtagctaggactgcaggcaccatgtcactatgcccgactaatttttaatttttaattttttgtcaagacaaggtcttgctatgttgcccaggctggtcttgaactcctggcctcaagggattctcccaccttggattcccaaagtgctgggattataggtgtgaaccaccatccctggccctcttcacattcttgtatgaagattgatttgggaaaaatgcatttcaggtaactgacaaaagatataggatgaaaaataatatctttcaaatgtttaatttgaactaagagagcttatgcattgcactttctggagatttgtaatgttttggttttgttgtccatgtgactacaaaataatatattttttaattaaaaaatttaaaataatacaggcaagcatgtaatgattatcaatatttttttccaccaactatcctatacccctgacctcctttcattaggcattatcttctgttttgattttaacacttagagtggttttctctgttatgaatcaaagctgatctattttcatcatttttgtgatgaaaaaattaattttgattgacttaggatggaaggatttggactgggtgtggtggtttatgcctgtaatcgcagcactttgggaggccaaggcgggtggatcacttgaggtcaggagtttgagaccagcctggccaacatggtgaaaccctgtctctactaaaaatacaaaaattggctgggtgtggtagtgcacacctgtaatcccagctatttgggaggctgagtcgagaggatcgcttgaacctaggaggtggaggttgcagtgagtcgagattgcaccactgcactccagcctgggtgacagagccagactcctctccaaaaaaaaaaaaaaaaaaaaaagatgaaaggatttggaaccttaattgcatctgaaaaactgcctcacctttgttatttagtgtactccaaccacggagtaacatcccatcataatcccaaatcctactcaaacaaaaggggaagggattatgcaggtgtacactaggccactggtgtaccaattagaaaccactttagagttatgcctactgtacccacataatcctaaaaatatgttacaactgctacttcatagtttatgccacttattttattttttacttttattatttttttttctgagacacggtttcattcccattgcccaggctgtagtgcaatgatgcaatcatggttcactgcagcttcaacttcccaggctcaagggatcctcccacctcagccttctgagtacttgggactcaggtgcgagccatcatgctcagctaattttttgtatcatttgtagaaatggggttttgtattgttgcccaggctgatcttgaactcctggggtcaaggattctgcccgccttggcctcctaaagggctggaattacaggcataagccactgtgcccggccagtttatataatttaaacactgccttttggttccttgattcccatatgctaggacaagtaattattattttattttattttactttaagttctgggttacatgtgcagaacctgcaggtttgttacataggtatacatgttccaaggtggtttgctgcacctattgacccatcatctaggttttaagtcccacatgcattaggtatttgtcctaatgctcttcctccccttgccccccaccccccgacaggccttggtctgtgatgttcacctccctgtgtccatgtgttctcattgttcaactcccacttattagtaagaacatgtggtgtttggttttctgttcctgtgttagtttgctgagaatgatggtttccagcttcatccatgtcgctgcaaaggacatgaactcattctttttatggctgcatagtattccatggtgtatatgtgccatattttctttatccagtctatcactgatgggcatttgggttggttccaagtctttgctatggtaaatagtgctgcaataaacatacgtgtgca

SEQ ID NO: 15318 - DNA, 2088 bp, Homo sapiens
  source 1..2088: mol_type = unassigned DNA
gttttgctcttgtcacccaggctggagtgcaatggtgcgatctcagctcatcaagttcaagagactctaatgcctcagcctcccaagtagcaggggttacagattctttaatctccagctcagcttcaacaattcaacgctgttctttctgaaaaagtacacatcgtgccttctctacttcgctcttggaacataatttctcatggcagtgtttaagaccactctgtggaggttaatttctgggaccttagggataatatgcctttcgttgatgtctacgttgggaattttgttgaaaaattcttttactaaactgagtattgagccagcatttactccaggacccaacatagaactccagaaagactctgactgctgttcttgccaagaaaaatgggttgggtaccggtgcaactgttacttcatttccagtgaacagaaaacttggaacgaaagtcggcatctctgtgcttctcagaaatccagcctgcttcagcttcaaaacacagatgaactggattttatgagctccagtcaacaattttactggattggactctcttacagtgaggagcacaccgcctggttgtgggagaatggctctgcactctcccagtatctatttccatcatttgaaacttttaatacaaagaactgcatagcgtataatccaaatggaaatgctttagatgaatcctgtgaagataaaaatcgttatatctgtaagcaacagctcatttaaatgtttcttggggcagagaaggtggagagtaaagacccaacattactaacaatgatacagttgcatgttatattattactaattgtctacttctggagtctataaaatgtttttaaacagtgtcatatacaattgtcatgtatgtgaaacaatgtgttttaaaattgatgaaattcgttcacctacatttgagaattataaaattaacataaagaattttgtattttcatttaatgtatatatttaatgttaaattcaatgtagttttattacacatttatgtaattttatttacattcttgctaattctcagcagaaatttaaataagatttaattcacatcaaataaaatttagaaaataaaatttaactcacactgcccaggctggagcatagtggcaagatcatagctcattgcaagctcaagtgatcctcctgactcagcctcccaagtagctaggactgcaggcaccatgtcactatgcccgactaatttttaatttttaattttttgtcaagacaaggtcttgctatgttgcccaggctggtcttgaactcctggcctcaagggattctcccaccttggattcccaaagtgctgggattataggtgtgaaccaccatccctggccctcttcacattcttgtatgaagattgatttgggaaaaatgcatttcaggtaactgacaaaagatataggatgaaaaataatatctttcaaatgtttaatttgaactaagagagcttatgcattgcactttctggagatttgtaatgttttggttttgttgtccatgtgactacaaaataatatattttttaattaaaaaatttaaaataatacaggcaagcatgtaatgattatcaatatttttttccaccaactatcctatacccctgacctcctttcattaggcattatcttctgttttgattttaacacttagagtggttttctctgttatgaatcaaagctgatctattttcatcatttttgtgatgaaaaaattaattttgattgacttaggatggaaggatttggactgggtgtggtggtttatgcctgtaatcgcagcactttgggaggccaaggcgggtggatcacttgaggtcaggagtttgagaccagcctggccaacatggtgaaaccctgtctctactaaaaatacaaaaattggctgggtgtggtagtgcacacctgtaatcccagctatttgggaggctgagtcgagaggatcgcttgaacctaggaggtggaggttgcagtgagtcgagattgcaccactgcactccagcctgggtgacagagccagactcctctccaaaaaaaaaaaaaaaaaaaaaa

SEQ ID NO: 15319 - DNA, 3261 bp, Homo sapiens
  source 1..3261: mol_type = unassigned DNA
ctgtattgtggttcctggaacacttcagaggcttgtgattctactgcttcttattcacactataatacatgtctcaccaatagatgattcaagaacatcatttaaatacacaatttttcattctctatttttgctaaatttcttcatactcaactttcagattctttaatctccagctcagcttcaacaattcaacgctgttctttctgaaaaagtacacatcgtgccttctctacttcgctcttggaacataatttctcatggcagtgtttaagaccactctgtggaggttaatttctgggaccttagggataatatgcctttcgttgatgtctacgttgggaattttgttgaaaaattcttttactaaactgagtattgagccagcatttactccaggacccaacatagaactccagaaagactctgactgctgttcttgccaagaaaaatgggttgggtaccggtgcaactgttacttcatttccagtgaacagaaaacttggaacgaaagtcggcatctctgtgcttctcagaaatccagcctgcttcagcttcaaaacacagatgaactgcaggattttatgagctccagtcaacaattttactggattggactctcttacagtgaggagcacaccgcctggttgtgggagaatggctctgcactctcccagtatctatttccatcatttgaaacttttaatacaaagaactgcatagcgtataatccaaatggaaatgctttagatgaatcctgtgaagataaaaatcgttatatctgtaagcaacagctcatttaaatgtttcttggggcagagaaggtggagagtaaagacccaacattactaacaatgatacagttgcatgttatattattactaattgtctacttctggagtctataaaatgtttttaaacagtgtcatatacaattgtcatgtatgtgaaacaatgtgttttaaaattgatgaaattcgttcacctacatttgagaattataaaattaacataaagaattttgtattttcatttaatgtatatatttaatgttaaattcaatgtagttttattacacatttatgtaattttatttacattcttgctaattctcagcagaaatttaaataagatttaattcacatcaaataaaatttagaaaataaaatttaactcacactgcccaggctggagcatagtggcaagatcatagctcattgcaagctcaagtgatcctcctgactcagcctcccaagtagctaggactgcaggcaccatgtcactatgcccgactaatttttaatttttaattttttgtcaagacaaggtcttgctatgttgcccaggctggtcttgaactcctggcctcaagggattctcccaccttggattcccaaagtgctgggattataggtgtgaaccaccatccctggccctcttcacattcttgtatgaagattgatttgggaaaaatgcatttcaggtaactgacaaaagatataggatgaaaaataatatctttcaaatgtttaatttgaactaagagagcttatgcattgcactttctggagatttgtaatgttttggttttgttgtccatgtgactacaaaataatatattttttaattaaaaaatttaaaataatacaggcaagcatgtaatgattatcaatatttttttccaccaactatcctatacccctgacctcctttcattaggcattatcttctgttttgattttaacacttagagtggttttctctgttatgaatcaaagctgatctattttcatcatttttgtgatgaaaaaattaattttgattgacttaggatggaaggatttggactgggtgtggtggtttatgcctgtaatcgcagcactttgggaggccaaggcgggtggatcacttgaggtcaggagtttgagaccagcctggccaacatggtgaaaccctgtctctactaaaaatacaaaaattggctgggtgtggtagtgcacacctgtaatcccagctatttgggaggctgagtcgagaggatcgcttgaacctaggaggtggaggttgcagtgagtcgagattgcaccactgcactccagcctgggtgacagagccagactcctctccaaaaaaaaaaaaaaaaaaaaaagatgaaaggatttggaaccttaattgcatctgaaaaactgcctcacctttgttatttagtgtactccaaccacggagtaacatcccatcataatcccaaatcctactcaaacaaaaggggaagggattatgcaggtgtacactaggccactggtgtaccaattagaaaccactttagagttatgcctactgtacccacataatcctaaaaatatgttacaactgctacttcatagtttatgccacttattttattttttacttttattatttttttttctgagacacggtttcattcccattgcccaggctgtagtgcaatgatgcaatcatggttcactgcagcttcaacttcccaggctcaagggatcctcccacctcagccttctgagtacttgggactcaggtgcgagccatcatgctcagctaattttttgtatcatttgtagaaatggggttttgtattgttgcccaggctgatcttgaactcctggggtcaaggattctgcccgccttggcctcctaaagggctggaattacaggcataagccactgtgcccggccagtttatataatttaaacactgccttttggttccttgattcccatatgctaggacaagtaattattattttattttattttactttaagttctgggttacatgtgcagaacctgcaggtttgttacataggtatacatgttccaaggtggtttgctgcacctattgacccatcatctaggttttaagtcccacatgcattaggtatttgtcctaatgctcttcctccccttgccccccaccccccgacaggccttggtctgtgatgttcacctccctgtgtccatgtgttctcattgttcaactcccacttattagtaagaacatgtggtgtttggttttctgttcctgtgttagtttgctgagaatgatggtttccagcttcatccatgtcgctgcaaaggacatgaactcattctttttatggctgcatagtattccatggtgtatatgtgccatattttctttatccagtctatcactgatgggcatttgggttggttccaagtctttgctatggtaaatagtgctgcaataaacatacgtgtgca

SEQ ID NO: 15320 - DNA, 446 bp, Homo sapiens
  source 1..446: mol_type = unassigned DNA
tctgcactctcccagtatctatttccatcatttgaaacttttaatacaaagaactgcatagcgtataatccaaatggaaatgctttagatgaatcctgtgaagataaaaatcgttatatctacaaggtcttgctatgttgcccaggctggtcttgaactcctggcctcaagggattctcccaccttggattcccaaagtgctgggattataggtgtgaaccaccatccctggccctcttcacattcttgtatgaagattgatttgggaaaaatgcatttcaggtaactgacaaaagatataggatgaaaaataatatctttcaaatgtttaatttgaactaagagagcttatgcattgcactttctggagatttgtaatgttttggttttgttgtccatgtgactacaaaataatatattttttaattaaaaaatttaaaataata

SEQ ID NO: 15321 - DNA, 749 bp, Homo sapiens
  source 1..749: mol_type = unassigned DNA
gccagcccagaaaggggctcccacagtgcagtgggggggctgaagggctcctcaaatgccaccaaagtgggagcccaggcaggggaggtgccgagagcaagcgagggctctgaggactgccagcatgctgtcacttctcagcaggctggattggatttggcacttctttactgaagattctttaatctccagctcagcttcaacaattcaacgctgttctttctgaaaaagtacacatcgtgccttctctacttcgctcttggaacataatttctcatggcagcttttactaaactgagtattgagccagcatttactccaggacccaacatagaactccagaaagactctgactgctgttcttgccaagaaaaatgggttgggtaccggtgcaactgttacttcatttccagtgaacagaaaacttggaacgaaagtcggcatctctgtgcttctcagaaatccagcctgcttcagcttcaaaacacagatgaactggattttatgagctccagtcaacaattttactggattggactctcttacagtgaggagcacaccgcctggttgtgggagaatggctctgcactctcccagtatctatttccatcatttgaaacttttaatacaaagaactgcatagcgtataatccaaatggaaatgctttagatgaatcctgtgaagataaaaatcgttatatctgtaagcaacagctcatttaaatgtttcttggggcagagaaggtgga

SEQ ID NO: 15322 - DNA, 1244 bp, Homo sapiens
  source 1..1244: mol_type = unassigned DNA
atttcatgttatacttaataaaacaaaacatacctgtatacacacacattcactcacattgaagatgcaagatgaagaaagatacatgacattgaatgtacagtcaaagaaaaggagttctgcccaaacatctcaacttacatttaaagattattcagtgacgttgcactggtataaaatcttactgggaatatctggaaccgtgaatggtattctcactttgactttgatctccttgatcctgttggtttctcagggagtattgctaaaatgccaaaaaggaagttgttcaaatgccactcagtatgaggacactggagatctaaaagtgaataatggcacaagaagaaatataagtaataaggacctttgtgcttcgagatctgcagaccagacagtactatgccaatcagaatggctcaaataccaagggaagtgttgttattggttctctaatgagatgaaaagctggagtgacagttatgtgtattgtttggaaagaaaatctcatctactaatcatacatgaccaacttgaaatggcttttatacagaaaaacctaagacaattaaactacgtatggattgggcttaactttacctccttgaaaatgacatggacttgggtggatggttctccaatagattcaaagatattcttcataaagggaccagctaaagaaaacagctgtgctgccattaaggaaagcaaaattttctctgaaacctgcagcagtgttttcaaatggatttgtcagtattagagtttgacaaaattcacagtgaaataatcaatgatcactatttttggcctattagtttctaatattaatctccaggtgtaagattttaaagtgcaattaaatgccaaaatctcttctcccttctccctccatcatcgacactggtctagcctcagagtaacccctgttaacaaactaaaatgtacacttcaaaatttttacgtgatagtataaaccaatgtgacttcatgtgatcatatccaggatttttattcgtcgcttattttatgccaaatgtgatcaaattatgcctgtttttctgtatcttgcgttttaaattcttaataaggtcctaaacaaaatttcttatatttctaatggttgaattataatgtgggtttatacattttttacccttttgtcaaagagaattaactttgtttccaggcttttgctactcttcactcagctacaataaacatcctgaatgttttcttaaata

SEQ ID NO: 15323 - DNA, 1094 bp, Homo sapiens
  source 1..1094: mol_type = unassigned DNA
atttcatgttatacttaataaaacaaaacatacctgtatacacacacattcactcacattgaagatgcaagatgaagaaagatacatgacattgaatgtacagtcaaagaaaaggagttctgcccaaacatctcaacttacatttaaagattattcagtgacgttgcactggtataaaatcttactgggaatatctggaaccgtgaatggtattctcactttgactttgatctccttgatcctgttggtactatgccaatcagaatggctcaaataccaagggaagtgttgttattggttctctaatgagatgaaaagctggagtgacagttatgtgtattgtttggaaagaaaatctcatctactaatcatacatgaccaacttgaaatggcttttatacagaaaaacctaagacaattaaactacgtatggattgggcttaactttacctccttgaaaatgacatggacttgggtggatggttctccaatagattcaaagatattcttcataaagggaccagctaaagaaaacagctgtgctgccattaaggaaagcaaaattttctctgaaacctgcagcagtgttttcaaatggatttgtcagtattagagtttgacaaaattcacagtgaaataatcaatgatcactatttttggcctattagtttctaatattaatctccaggtgtaagattttaaagtgcaattaaatgccaaaatctcttctcccttctccctccatcatcgacactggtctagcctcagagtaacccctgttaacaaactaaaatgtacacttcaaaatttttacgtgatagtataaaccaatgtgacttcatgtgatcatatccaggatttttattcgtcgcttattttatgccaaatgtgatcaaattatgcctgtttttctgtatcttgcgttttaaattcttaataaggtcctaaacaaaatttcttatatttctaatggttgaattataatgtgggtttatacattttttacccttttgtcaaagagaattaactttgtttccaggcttttgctactcttcactcagctacaataaacatcctgaatgttttcttaaata

SEQ ID NO: 15324 - DNA, 838 bp, Homo sapiens
  source 1..838: mol_type = unassigned DNA
atttcatgttatacttaataaaacaaaacatacctgtatacacacacattcactcacattgaagatgcaagatgaagaaagatacatgacattgaatgtacagtcaaagaaaaggagttctgcccaaacatctcaacttacatttaaagattattcagtgacgttgcactggtataaaatcttactgggaatatctggaaccgtgaatggtattctcactttgactttgatctccttgatcctgttggattcttcataaagggaccagctaaagaaaacagctgtgctgccattaaggaaagcaaaattttctctgaaacctgcagcagtgttttcaaatggatttgtcagtattagagtttgacaaaattcacagtgaaataatcaatgatcactatttttggcctattagtttctaatattaatctccaggtgtaagattttaaagtgcaattaaatgccaaaatctcttctcccttctccctccatcatcgacactggtctagcctcagagtaacccctgttaacaaactaaaatgtacacttcaaaatttttacgtgatagtataaaccaatgtgacttcatgtgatcatatccaggatttttattcgtcgcttattttatgccaaatgtgatcaaattatgcctgtttttctgtatcttgcgttttaaattcttaataaggtcctaaacaaaatttcttatatttctaatggttgaattataatgtgggtttatacattttttacccttttgtcaaagagaattaactttgtttccaggcttttgctactcttcactcagctacaataaacatcctgaatgttttcttaaata

SEQ ID NO: 15325 - DNA, 1335 bp, Homo sapiens
  source 1..1335: mol_type = unassigned DNA
agatcttagctgaagatgactgacagtgttatttattccatgttagagttgcctacggcaacccaagcccagaatgactatggaccacagcaaaaatcttcctcttccaggccttcttgttcttgccttgtggcaatagctttggggcttctgactgcagttcttctgagtgtgctgctataccagtggatcctgtgccagggctccaactactccacttgtgccagctgtcctagctgcccagaccgctggatgaaatatggtaaccattgttattatttctcagtggaggaaaaggactggaattctagtctggaattctgcctagccagagactcacacctccttgtgataacggacaatcaggaaatgagcctgctccaagttttcctcagtgaggccttttgctggattggtctgaggaacaattctggctggaggtgggaagatggatcacctctaaacttctcaaggatttcttctaatagctttgtgcagacatgcggtgccatcaacaaaaatggtcttcaagcctcaagctgtgaagttcctttacactgggtgtgtaagaagtgtccctttgcagatcaagctttattctgaagaataaacctagctggcatgctggtgtgtacctgtagtcctagctatttgggaagctgaggtgggagggtcgcttgagcccaggagtttgaggctgcagtgagctatgattgtgccactgtactccagcctgggagatagagcaagactccatctctaaaaaaaaaaaaaaatgctaatgtgagaatataaattgtgggaaatgagtgagggcaaggtggtacttcctccttctgagctcttcacacgtaatgcaaaaacccggtcttaactgattttgttttttttctgagtatgcatatatgtggttgaatgaaccaatgtgtgattgtatcttttccattatgtgactgtttgacctgcatattaatttcaagatagcagtcaattcgataaggcattttcatagaggaaagtttacagaaacagtttatgtggttggatcaccaaattatcttaggtactaaggcctcaaaaataagaaaaactttattatttctcctcagtagagtttggacatacataaggagagaaggtacagtgatgaaggagaccataattctgtagtgttgatgatcctggattataatctttttctctttatctttcatagtttttttaaaaacatggactgtatcttatctaccactatatcccaaatacctaagatagtgcttacgttcagtgactattaaataaataaatggatgaattaaaaagtaagaatgaaaa

SEQ ID NO: 15326 - DNA, 1206 bp, Homo sapiens
  source 1..1206: mol_type = unassigned DNA
agtttagagattgggctgtttcctcactgatacatatcccttcacacttctataatttaactctctcaactgcatgtgaaagatcttagctgaagatgactgacagtgttatttattccatgttagagttgcctacggcaacccaagcccagaatgactatggaccacagcaaaaatcttcctcttccaggccttcttgttcttgccttgtggcaatagctttggggcttctgactgcagttcttctgagtgtgctgctataccagtggatcctgtgccagggctccaactactccacttgtgccagctgtcctagctgcccagaccgctggatgaaatatggtaaccattgttattatttctcagtggaggaaaaggactggaattctagtctggaattctgcctagccagagactcacacctccttgtgataacggacaatcaggaaatgagcctgctccaagttttcctcagtgaggccttttgctggattggtctgaggaacaattctggctggaggtgggaagatggatcacctctaaacttctcaaggatttcttctaatagctttgtgcagacatgcggtgccatcaacaaaaatggtcttcaagcctcaagctgtgaagttcctttacactgggtgtgtaagaaggtcagactttgatagatgaccactctgtcctgaccctcagatctgtcatgtatccctaaaaggagggagctggccactggctgttgggaaagccatgagtatatagttagcaaatactgaactttctcagatatggcattagatgcaagacaacctcctagggattgatgcctaactgatggattctctttgagactatttagatattatgtgagcaatttaaagaccagatctaagcaaattttgaaatagatgtttgttttttgtatttctcagtatggaaactaatgctgccactctcatccccgtcccaaccatctctgtcaaaaatatacctttttcatatgatattctgagctaatctgataaaatctatgccaatatatactattgcttgtgtactagagaagtacattattgctgtactcctctgtacattactgatccctgatggtatatttctatcctaacagtgtccctttgcagatcaagctttattctgaagaataaacctagctggcatgctggtgtgtacctgtagtcctagctattt

SEQ ID NO: 15327 - DNA, 1553 bp, Homo sapiens
  source 1..1553: mol_type = unassigned DNA
tgaggacatatctaaattttctagttttatagaaggcttttatccacaagaatcaagatcttccctctctgagcaggaatcctttgtgcattgaagactttagattcctctctgcggtagacgtgcacttataagtatttgatggggtggattcgtggtcggaggtctcgacacagctgggagatgagtgaatttcataattataacttggatctgaagaagagtgatttttcaacacgatggcaaaagcaaagatgtccagtagtcaaaagcaaatgtagagaaaatgcatctccattttttttctgctgcttcatcgctgtagccatgggaatccgtttcattattatggtaacaatatggagtgctgtattcctaaactcattattcaaccaagaagttcaaattcccttgaccgaaagttactgtggcccatgtcctaaaaactggatatgttacaaaaataactgctaccaattttttgatgagagtaaaaactggtatgagagccaggcttcttgtatgtctcaaaatgccagccttctgaaagtatacagcaaagaggaccaggatttacttaaactggtgaagtcatatcattggatgggactagtacacattccaacaaatggatcttggcagtgggaagatggctccattctctcacccaacctactaacaataattgaaatgcagaagggagactgtgcactctatgcctcgagctttaaaggctatatagaaaactgttcaactccaaatacgtacatctgcatgcaaaggactgtgtaaagatgatcaaccatctcaataaaagccaggaacagagaagagattacaccagcggtaacactgccaactgagactaaaggaaacaaacaaaaacaggacaaaatgaccaaagactgtcagatttcttagactccacaggaccaaaccatagaacaatttcactgcaaacatgcatgattctccaagacaaaagaagagagatcctaaaggcaattcagatatccccaaggctgcctctcccaccacaagcccagagtggatgggctgggggaggggtgctgttttaatttctaaaggtaggaccaacacccaggggatcagtgaaggaagagaaggccagcagatcactgagagtgcaaccccaccctccacaggaaattgcctcatgggcagggccacagcagagagacacagcatgggcagtgccttccctgcctgtgggggtcatgctgccacttttaatgggtcctccacccaacggggtcagggaggtggtgctgccccagtgggccatgattatcttaaaggcattattctccagccttaagtaagatcttaggacgtttcctttgctatgatttgtacttgcttgagtcccatgactgtttctcttcctctctttcttccttttggaatagtaatatccatcctatgtttgtcccactattgtattttggaagcacataacttgtttggtttcacaggttcacagttaagaaggaattttgcctctgaataaatagaatcttgagtctcatgca

SEQ ID NO: 15328 - DNA, 734 bp, Homo sapiens
  source 1..734: mol_type = unassigned DNA
ccagttggctgtaagttgccatttgaactaaacgaaatagatcaggaactgaggacatatctaaattttctagttttatagaaggcttttatccacaagaatcaagatcttccctctctgagcaggaatcctttgtgcattgaagactttagattcctctctgcggtagacgtgcacttataagtatttgatggggtggattcgtggtcggaggtctcgacacagctgggagatgagtgaatttcataattataacttggatctgaagaagagtgatttttcaacacgatggcaaaagcaaagatgtccagtagtcaaaagcaaatgtagagaaaatgcatctccattttttttctgctgcttcatcgctgtagccatgggaatccgtttcattattatggtaacaatatggagtgctgtattcctaaactaaagttactgtggcccatgtcctaaaaactggatatgttacaaaaataactgctaccaattttttgatgagagtaaaaactggtatgagagccaggcttcttgtatgtctcaaaatgccagccttctgaaagtatacagcaaagaggaccaggatttacttaaactggtgaagtcatatcattggatgggactagtacacattccaacaaatggatcttggcagtgggaagatggctccattctctcacccaacctactaacaataattgaaatgcagaagggagactgtgcactctatgcct

SEQ ID NO: 15329 - DNA, 951 bp, Homo sapiens
  source 1..951: mol_type = unassigned DNA
cacaggggaaaagtttctgcattttacttttctattcaaaatattttatctcaccacgggaaagagaacaaaaaacaaatgcccagttttattttattcaggaatcctttgtgcattgaagactttagattcctctctgcggtagacgtgcacttataagtatttgatggggtggattcgtggtcggaggtctcgacacagctgggagatgagtgaatttcataattataacttggatctgaagaagagtgatttttcaacacgatggcaaaagcaaagatgtccagtagtcaaaagcaaatgtagagaaaatgcatctccattttttttctgctgcttcatcgctgtagccatgggaatccgtttcattattatggtaacaatatggagtgctgtattcctaaactcattattcaaccaagaagttcaaattcccttgaccgaaagttactgtggcccatgtcctaaaaactggatatgttacaaaaataactgctaccaattttttgatgagagtaaaaactggtatgagagccaggcttcttgtatgtctcaaaatgccagccttctgaaagtatacagcaaagaggaccaggatttacttaaactggtgaagtcatatcattggatgggactagtacacattccaacaaatggatcttggcagtgggaagatggctccattctctcacccaacctactaacaataattgaaatgcagaagggagactgtgcactctatgcctcgagctttaaaggctatatagaaaactgttcaactccaaatacgtacatctgcatgcaaaggactgtgtaaagatgatcaaccatctcaataaaagccaggaacagagaagagattacaccagcggtaacactgccaactgagactaaaggaaacaaacaaaaacaggacaaaatgaccaaagactgtcagatttcttagactcc

SEQ ID NO: 15330 - DNA, 537 bp, Homo sapiens
  source 1..537: mol_type = unassigned DNA
atggatcgcccggggccaggctccgcgcgccccggccggaccgtgcacgtttggggttaccgggttgagtggaaagtacggaacggtaggaagctgcagcccagcgagtgggcggggcgaggagacctaggagggttcaaaaggaggtggaaggatacacgggccacagtcggaactactttccgaaggaggtcacgtgtgtccctagttggggaactttccaaattcccactccccagtgatagctccggaggcaagtcgtcttcttcctttgctcggggtgctcttgcctggtgcaggcagcggaaccccaacccttcctgcgccgcggcggaaacaggggctcggaccagcctcccgaaggagcgctgtcggggctggcgcttggggaactggttacacaagcacccacatccaaacacgtgcccccgcctccccgcctgctggctgccgccgattcttacagaacgcggggagagagtccccaaactggtgccactcctcgcctgctaccctaagagcaagccaaaggactga

SEQ ID NO: 15331 - DNA, 2724 bp, Homo sapiens
  source 1..2724: mol_type = unassigned DNA
cccagagacccaggccgcggaactggcaggcgtttcagagcgtcagaggctgcggatgagcagacttggaggactccaggccagagactaggctgggcgaagagtcgagcgtgaagggggctccgggccagggtgacaggaggcgtgcttgagaggaagaagttgacgggaaggccagtgcgacggcaaatctcgtgaaccttgggggacgaatgctcaggatgcgggtccccgccctcctcgtcctcctcttctgcttcagagggagagcaggcccgtcgccccatttcctgcaacagccagaggacctggtggtgctgctgggggaggaagcccggctgccgtgtgctctgggcgcctactgggggctagttcagtggactaagagtgggctggccctagggggccaaagggacctaccagggtggtcccggtactggatatcagggaatgcagccaatggccagcatgacctccacattaggcccgtggagctagaggatgaagcatcatatgaatgtcaggctacacaagcaggcctccgctccagaccagcccaactgcacgtgctggtccccccagaagccccccaggtgctgggcggcccctctgtgtctctggttgctggagttcctgcgaacctgacatgtcggagccgtggggatgcccgccctacccctgaattgctgtggttccgagatggggtcctgttggatggagccaccttccatcagaccctgctgaaggaagggacccctgggtcagtggagagcaccttaaccctgacccctttcagccatgatgatggagccacctttgtctgccgggcccggagccaggccctgcccacaggaagagacacagctatcacactgagcctgcagtaccccccagaggtgactctgtctgcttcgccacacactgtgcaggagggagagaaggtcattttcctgtgccaggccacagcccagcctcctgtcacaggctacaggtgggcaaaagggggctctccggtgctcggggcccgcgggccaaggttagaggtcgtggcagacgcctcgttcctgactgagcccgtgtcctgcgaggtcagcaacgccgtgggtagcgccaaccgcagtactgcgctggatgtgctgtttgggccgattctgcaggcaaagccggagcccgtgtccgtggacgtgggggaagacgcttccttcagctgcgcctggcgcgggaacccgcttccacgggtaacctggacccgccgcggtggcgcgcaggtgctgggctctggagccacactgcgtcttccgtcggtggggcccgaggacgcaggcgactatgtgtgcagagctgaggctgggctatcgggcctgcggggcggcgccgcggaggctcggctgactgtgaacgctcccccagtagtgaccgccctgcactctgcgcctgccttcctgaggggccctgctcgcctccagtgtctggttttcgcctctcccgccccagatgccgtggtctggtcttgggatgagggcttcctggaggcggggtcgcagggccggttcctggtggagacattccctgccccagagagccgcgggggactgggtccgggcctgatctctgtgctacacatttcggggacccaggagtctgactttagcaggagctttaactgcagtgcccggaaccggctgggcgagggaggtgcccaggccagcctgggccgtagagacttgctgcccactgtgcggatagtggccggagtggccgctgccaccacaactctccttatggtcatcactggggtggccctctgctgctggcgccacagcaaggcctcagcctctttctccgagcaaaagaacctgatgcgaatccctggcagcagcgacggctccagttcacgaggtcctgaagaagaggagacaggcagccgcgaggaccggggccccattgtgcacactgaccacagtgatctggttctggaggagaaagggactctggagaccaaggacccaaccaacggttactacaaggtccgaggagtcagtccacccgcgtctccagactcacgtgtgacatctttccaatggaagagtcctgggatctccaacttgccataatggattgttctgatttctgaggagccaggacaagttggcgaccttactcctccaaaactgaacacaaggggagggaaagatcattacatttgtcaggagcatttgtatacagtcagctcagccaaaggagatgccccaagtgggagcaacatggccacccaatatgcccacctattccccggtgtaaaagagattcaagatggcaggtaggccctttgaggagagatggggacagggcagtgggtgttgggagtttggggccgggatggaagttgtttctagccactgaaagaagatatttcaagatgaccatctgcattgagaggaaaggtagcataggatagatgaagatgaagagcataccaggccccaccctggctctccctgaggggaactttgctcggccaatggaaatgcagccaagatggccatatactccctaggaacccaagatggccaccatcttgattttactttccttaaagactcagaaagacttggacccaaggagtggggatacagtgagaattaccactgttggggcaaaatattgggataaaaatatttatgtttaataataaaaaaaagtcaaagaggcaagtgtgtctta

SEQ ID NO: 15332 - DNA, 872 bp, Homo sapiens
  source 1..872: mol_type = unassigned DNA
cccagagacccaggccgcggaactggcaggcgtttcagagcgtcagaggctgcggatgagcagacttggaggactccaggccagagactaggctgggcgaagagtcgagcgtgaagggggctccgggccagggtgacaggaggcgtgcttgagaggaagaagttgacgggaaggccagtgcgacggcaaatctcgtgaaccttgggggacgaatgctcaggatgcgggtccccgccctcctcgtcctcctcttctgcttcagagggagagcaggcccgtcgccccatttcctgcaacagccagaggacctggtggtgctgctgggcgagggaggtgcccaggccagcctgggccgtagagcctcagcctctttctccgagcaaaagaacctgatgcgaatccctggcagcagcgacggctccagttcacgaggtcctgaagaagaggagacaggcagccgcgaggaccggggccccattgtgcacactgaccacagtgatctggttctggaggagaaagggactctggagaccaaggacccaaccaacggttactacaaggtccgaggagtcagtgtgagcctgagccttggcgaagcccctggaggaggtctcttcctgccaccaccctccccccttgggcccccagggacccctaccttctatgacttcaacccacacctgggcatggtccccccctgcagactttacagagccagggcaggctatctcaccacaccccaccctcgagctttcaccagctacatcaaacccacatcctttgggcccccagatctggcccccgggactccccccttcccatatgctgccttccccacacctagccacccgcgtctccagactcacgtgtga

SEQ ID NO: 15333 - DNA, 2279 bp, Homo sapiens
  source 1..2279: mol_type = unassigned DNA
cccagagacccaggccgcggaactggcaggcgtttcagagcgtcagaggctgcggatgagcagacttggaggactccaggccagagactaggctgggcgaagagtcgagcgtgaagggggctccgggccagggtgacaggaggcgtgcttgagaggaagaagttgacgggaaggccagtgcgacggcaaatctcgtgaaccttgggggacgaatgctcaggatgcgggtccccgccctcctcgtcctcctcttctgcttcagagggagagcaggcccgtcgccccatttcctgcaacagccagaggacctggtggtgctgctgggggaggaagcccggctgccgtgtgctctgggcgcctactgggggctagttcagtggactaagagtgggctggccctagggggccaaagggacctaccagggtggtcccggtactggatatcagggaatgcagccaatggccagcatgacctccacattaggcccgtggagctagaggatgaagcatcatatgaatgtcaggctacacaagcaggcctccgctccagaccagcccaactgcacgtgctggtccccccagaagccccccaggtgctgggcggcccctctgtgtctctggttgctggagttcctgcgaacctgacatgtcggagccgtggggatgcccgccctacccctgaattgctgtggttccgagatggggtcctgttggatggagccaccttccatcagaccctgctgaaggaagggacccctgggtcagtggagagcaccttaaccctgcccacaggaagagacacagctatcacactgagcctgcagtaccccccagaggtgactctgtctgcttcgccacacactgtgcaggagggagagaaggtcattttcctgtgccaggccacagcccagcctcctgtcacaggctacaggtgggcaaaagggggctctccggtgctcggggcccgcgggccaaggttagaggtcgtggcagacgcctcgttcctgactgagcccgtgtcctgcgaggtcagcaacgccgtgggtagcgccaaccgcagtactgcgctggatgtgctgtttgggccgattctgcaggcaaagccggagcccgtgtccgtggacgtgggggaagacgcttccttcagctgcgcctggcgcgggaacccgcttccacgggtaacctggacccgccgcggtggcgcgcaggtgctgggctctggagccacactgcgtcttccgtcggtggggcccgaggacgcaggcgactatgtgtgcagagctgaggctgggctatcgggcctgcggggcggcgccgcggaggctcggctgactgtgaacgctcccccagtagtgaccgccctgcactctgcgcctgccttcctgaggggccctgctcgcctccagtgtctggttttcgcctctcccgccccagatgccgtggtctggtcttgggatgagggcttcctggaggcggggtcgcagggccggttcctggtggagacattccctgccccagagagccgcgggggactgggtccgggcctgatctctgtgctacacatttcggggacccaggagtctgactttagcaggagctttaactgcagtgcccggaaccggctgggcgagggaggtgcccaggccagcctgggccgtagagacttgctgcccactgtgcggatagtggccggagtggccgctgccaccacaactctccttatggtcatcactggggtggccctctgctgctggcgccacagcaaggcctcagcctctttctccgagcaaaagaacctgatgcgaatccctggcagcagcgacggctccagttcacgaggtcctgaagaagaggagacaggcagccgcgaggaccggggccccattgtgcacactgaccacagtgatctggttctggaggagaaagggactctggagaccaaggacccaaccaacggttactacaaggtccgaggagtcagtgtgagcctgagccttggcgaagcccctggaggaggtctcttcctgccaccaccctccccccttgggcccccagggacccctaccttctatgacttcaacccacacctgggcatggtccccccctgcagactttacagagccagggcaggctatctcaccacaccccaccctcgagctttcaccagctacatcaaacccacatcctttgggcccccagatctggcccccgggactccccccttcccatatgctgccttccccacacctagccacccgcgtctccagactcacgtgtga

SEQ ID NO: 15334 - DNA, 2574 bp, Homo sapiens
  source 1..2574: mol_type = unassigned DNA
cccagagacccaggccgcggaactggcaggcgtttcagagcgtcagaggctgcggatgagcagacttggaggactccaggccagagactaggctgggcgaagagtcgagcgtgaagggggctccgggccagggtgacaggaggcgtgcttgagaggaagaagttgacgggaaggccagtgcgacggcaaatctcgtgaaccttgggggacgaatgctcaggatgcgggtccccgccctcctcgtcctcctcttctgcttcagagggagagcagggtggtcccggtactggatatcagggaatgcagccaatggccagcatgacctccacattaggcccgtggagctagaggatgaagcatcatatgaatgtcaggctacacaagcaggcctccgctccagaccagcccaactgcacgtgctggtccccccagaagccccccaggtgctgggcggcccctctgtgtctctggttgctggagttcctgcgaacctgacatgtcggagccgtggggatgcccgccctacccctgaattgctgtggttccgagatggggtcctgttggatggagccaccttccatcagaccctgctgaaggaagggacccctgggtcagtggagagcaccttaaccctgacccctttcagccatgatgatggagccacctttgtctgccgggcccggagccaggccctgcccacaggaagagacacagctatcacactgagcctgcagtaccccccagaggtgactctgtctgcttcgccacacactgtgcaggagggagagaaggtcattttcctgtgccaggccacagcccagcctcctgtcacaggctacaggtgggcaaaagggggctctccggtgctcggggcccgcgggccaaggttagaggtcgtggcagacgcctcgttcctgactgagcccgtgtcctgcgaggtcagcaacgccgtgggtagcgccaaccgcagtactgcgctggatgtgctgtttgggccgattctgcaggcaaagccggagcccgtgtccgtggacgtgggggaagacgcttccttcagctgcgcctggcgcgggaacccgcttccacgggtaacctggacccgccgcggtggcgcgcaggtgctgggctctggagccacactgcgtcttccgtcggtggggcccgaggacgcaggcgactatgtgtgcagagctgaggctgggctatcgggcctgcggggcggcgccgcggaggctcggctgactgtgaacgctcccccagtagtgaccgccctgcactctgcgcctgccttcctgaggggccctgctcgcctccagtgtctggttttcgcctctcccgccccagatgccgtggtctggtcttgggatgagggcttcctggaggcggggtcgcagggccggttcctggtggagacattccctgccccagagagccgcgggggactgggtccgggcctgatctctgtgctacacatttcggggacccaggagtctgactttagcaggagctttaactgcagtgcccggaaccggctgggcgagggaggtgcccaggccagcctgggccgtagagacttgctgcccactgtgcggatagtggccggagtggccgctgccaccacaactctccttatggtcatcactggggtggccctctgctgctggcgccacagcaaggcctcagcctctttctccgagcaaaagaacctgatgcgaatccctggcagcagcgacggctccagttcacgaggtcctgaagaagaggagacaggcagccgcgaggaccggggccccattgtgcacactgaccacagtgatctggttctggaggagaaagggactctggagaccaaggacccaaccaacggttactacaaggtccgaggagtcagtccacccgcgtctccagactcacgtgtgacatctttccaatggaagagtcctgggatctccaacttgccataatggattgttctgatttctgaggagccaggacaagttggcgaccttactcctccaaaactgaacacaaggggagggaaagatcattacatttgtcaggagcatttgtatacagtcagctcagccaaaggagatgccccaagtgggagcaacatggccacccaatatgcccacctattccccggtgtaaaagagattcaagatggcaggtaggccctttgaggagagatggggacagggcagtgggtgttgggagtttggggccgggatggaagttgtttctagccactgaaagaagatatttcaagatgaccatctgcattgagaggaaaggtagcataggatagatgaagatgaagagcataccaggccccaccctggctctccctgaggggaactttgctcggccaatggaaatgcagccaagatggccatatactccctaggaacccaagatggccaccatcttgattttactttccttaaagactcagaaagacttggacccaaggagtggggatacagtgagaattaccactgttggggcaaaatattgggataaaaatatttatgtttaataataaaaaaaagtcaaagaggcaagtgtgtctta

SEQ ID NO: 15335 - DNA, 2993 bp, Homo sapiens
  source 1..2993: mol_type = unassigned DNA
cccagagacccaggccgcggaactggcaggcgtttcagagcgtcagaggctgcggatgagcagacttggaggactccaggccagagactaggctgggcgaagagtcgagcgtgaagggggctccgggccagggtgacaggaggcgtgcttgagaggaagaagttgacgggaaggccagtgcgacggcaaatctcgtgaaccttgggggacgaatgctcaggatgcgggtccccgccctcctcgtcctcctcttctgcttcagagggagagcaggcccgtcgccccatttcctgcaacagccagaggacctggtggtgctgctgggggaggaagcccggctgccgtgtgctctgggcgcctactgggggctagttcagtggactaagagtgggctggccctagggggccaaagggacctaccagggtggtcccggtactggatatcagggaatgcagccaatggccagcatgacctccacattaggcccgtggagctagaggatgaagcatcatatgaatgtcaggctacacaagcaggcctccgctccagaccagcccaactgcacgtgctggtccccccagaagccccccaggtgctgggcggcccctctgtgtctctggttgctggagttcctgcgaacctgacatgtcggagccgtggggatgcccgccctacccctgaattgctgtggttccgagatggggtcctgttggatggagccaccttccatcagaccctgctgaaggaagggacccctgggtcagtggagagcaccttaaccctgacccctttcagccatgatgatggagccacctttgtctgccgggcccggagccaggccctgcccacaggaagagacacagctatcacactgagcctgcagtaccccccagaggtgactctgtctgcttcgccacacactgtgcaggagggagagaaggtcattttcctgtgccaggccacagcccagcctcctgtcacaggctacaggtgggcaaaagggggctctccggtgctcggggcccgcgggccaaggttagaggtcgtggcagacgcctcgttcctgactgagcccgtgtcctgcgaggtcagcaacgccgtgggtagcgccaaccgcagtactgcgctggatgtgctgtttgggccgattctgcaggcaaagccggagcccgtgtccgtggacgtgggggaagacgcttccttcagctgcgcctggcgcgggaacccgcttccacgggtaacctggacccgccgcggtggcgcgcaggtgctgggctctggagccacactgcgtcttccgtcggtggggcccgaggacgcaggcgactatgtgtgcagagctgaggctgggctatcgggcctgcggggcggcgccgcggaggctcggctgactgtgaacgctcccccagtagtgaccgccctgcactctgcgcctgccttcctgaggggccctgctcgcctccagtgtctggttttcgcctctcccgccccagatgccgtggtctggtcttgggatgagggcttcctggaggcggggtcgcagggccggttcctggtggagacattccctgccccagagagccgcgggggactgggtccgggcctgatctctgtgctacacatttcggggacccaggagtctgactttagcaggagctttaactgcagtgcccggaaccggctgggcgagggaggtgcccaggccagcctgggccgtagagacttgctgcccactgtgcggatagtggccggagtggccgctgccaccacaactctccttatggtcatcactggggtggccctctgctgctggcgccacagcaaggcctcagcctctttctccgagcaaaagaacctgatgcgaatccctggcagcagcgacggctccagttcacgaggtcctgaagaagaggagacaggcagccgcgaggaccggggccccattgtgcacactgaccacagtgatctggttctggaggagaaagggactctggagaccaaggacccaaccaacggttactacaaggtccgaggagtcagtgtgagcctgagccttggcgaagcccctggaggaggtctcttcctgccaccaccctccccccttgggcccccagggacccctaccttctatgacttcaacccacacctgggcatggtccccccctgcagactttacagagccagggcaggctatctcaccacaccccaccctcgagctttcaccagctacatcaaacccacatcctttgggcccccagatctggcccccgggactccccccttcccatatgctgccttccccacacctagccacccgcgtctccagactcacgtgtgacatctttccaatggaagagtcctgggatctccaacttgccataatggattgttctgatttctgaggagccaggacaagttggcgaccttactcctccaaaactgaacacaaggggagggaaagatcattacatttgtcaggagcatttgtatacagtcagctcagccaaaggagatgccccaagtgggagcaacatggccacccaatatgcccacctattccccggtgtaaaagagattcaagatggcaggtaggccctttgaggagagatggggacagggcagtgggtgttgggagtttggggccgggatggaagttgtttctagccactgaaagaagatatttcaagatgaccatctgcattgagaggaaaggtagcataggatagatgaagatgaagagcataccaggccccaccctggctctccctgaggggaactttgctcggccaatggaaatgcagccaagatggccatatactccctaggaacccaagatggccaccatcttgattttactttccttaaagactcagaaagacttggacccaaggagtggggatacagtgagaattaccactgttggggcaaaatattgggataaaaatatttatgtttaataataaaaaaaagtcaaagaggcaagtgtgtctta

SEQ ID NO: 15336 - DNA, 1333 bp, Homo sapiens
  source 1..1333: mol_type = unassigned DNA
tctcaacaggaccccccatcatctccagcacccagacccagcacgccctccacggcgagaagggccagatcaagtgcttcatccggagcacgccgccgccggaccgcatcgcctggtcctggaaggagaacgttctggagtcgggcacatcggggcgctatacggtggagaccatcagcaccgaggagggcgtcatctccaccctgaccatcagcaacatcgtgcgggccgacttccagaccatctacaactgcacggcctggaacagcttcggctccgacactgagatcatccggctcaaggagcaagagtctgtgccgatggccgtcatcattggggtggccgtaggagctggtgtggccttcctcgtccttatggcaaccatcgtggcgttctgctgtgcccgttcccagagaaatctcaaaggtgttgtgtcagccaaaaatgatatccgagtggaaattgtccacaaggaaccagcctctggtcgggagggtgaggagcactccaccatcaagcagctgatgatggaccggggtgaattccagcaagactcagtcctgaaacagctggaggtcctcaaagaagaggagaaagagtttcagaacctgaaggaccccaccaatggctactacagcgtcaacaccttcaaagagcaccactcaaccccgaccatctccctctccagctgccagcccgacctgcgtcctgcgggcaagcagcgtgtgcccacaggcatgtccttcaccaacatctacagcaccctgagcggccagggccgcctctacgactacgggcagcggtttgtgctgggcatgggcagctcgtccatcgagctttgtgagcgggagttccagagaggctccctcagcgacagcagctccttcctggacacgcagtgtgacagcagcgtcagcagcagcggcaagcaggatggctatgtgcagttcgacaaggccagcaaggcttctgcttcctcctcccaccactcccagtcctcgtcccagaactctgaccccagtcgacccctgcagcggcggatgcagactcacgtctaaggatcacacaccgcgggtggggacgggccagggaagaggtcagggcacgttctggttgtccagggacgaggggtactttgcagaggacaccagaattggccacttccaggacagcctcccagcgcctctgccactgccttccttcgaagctctgatcaagcacaaatctgggtccccaggtgctgtgtgccagaggtgggcgggtggggagacagacagaggctgcggctgagtgcgctgtgcttagtgctggacacccgtgtccccggcccttt

SEQ ID NO: 15337 - DNA, 3808 bp, Homo sapiens
  source 1..3808: mol_type = unassigned DNA
cttctccgagtggggacattgctgacaatcccggcttcccgaggcggctaagaacaggcagtttgtgtcggctggctgcagatacccagaggcacaaagagaccgaagccacccggagggacccacggacggacagatggtaggcgcgaacccgagaggaccggcggaggctgagcaccgagagccgccaaggaagagaaactaaccacagccaagttaccccgccggctttccttcgctgcgctaaggaatgaaacccttccagctcgatctgctcttcgtctgcttcttcctcttcagtcaagagctgggcctccagaagagaggatgctgtctggtgctgggctacatggccaaggacaagtttcggagaatgaatgaaggccaagtctattccttcagccagcagccccaggaccaggtggtggtgtcgggacagccagtgacgctactttgcgccatccccgaatacgatggcttcgttctgtggatcaaggacggcttggctctgggtgtgggcagggacctctcaagttacccacagtacctggtggtagggaaccacctgtcaggggagcaccacctgaagatcctgagggcagagctgcaagacgatgcggtgtacgagtgccaggccatccaggccgccatccgctcccgccccgcacgcctcacagtcctggtgccgcctgatgaccccgtcatcctggggggccctgtgatcagcctgcgtgcgggggaccctctcaacctcacctgccacgcagacaatgccaagcctgcagcctccatcatctggttgcgaaagggagaggtcatcaatggggccacctactccaagaccctgcttcgggacggcaagcgggagagcatcgtcagcaccctcttcatctcccctggtgacgtggagaatggccagagcatcgtgtgtcgtgccaccaacaaagccatccccggaggaaaggagacgtcggtcaccattgacatccagcaccctccactggtcaacctctcggtggagccacagccagtgctggaggacaacgtcgtcactttccactgctctgcaaaggccaacccagctgtcacccagtacaggtgggccaagcggggccagatcatcaaggaggcatctggagaggtgtacaggaccacagtggactacacgtacttctcagagcccgtctcctgtgaggtgaccaacgccctgggcagcaccaacctcagccgcacggttgacgtctactttgggccccggatgaccacagaaccccaatccttgctcgtggatctgggctctgatgccatcttcagctgcgcctggaccggcaacccatccctgaccatcgtctggatgaagcggggctccggagtggtcctgagcaatgagaagaccctgaccctcaaatccgtgcgccaggaggacgcgggcaagtacgtgtgccgggctgtggtgccccgtgtgggagccggggagagagaggtgaccctgaccgtcaatggaccccccatcatctccagcacccagacccagcacgccctccacggcgagaagggccagatcaagtgcttcatccggagcacgccgccgccggaccgcatcgcctggtcctggaaggagaacgttctggagtcgggcacatcggggcgctatacggtggagaccatcagcaccgaggagggcgtcatctccaccctgaccatcagcaacatcgtgcgggccgacttccagaccatctacaactgcacggcctggaacagcttcggctccgacactgagatcatccggctcaaggagcaaggttcggaaatgaagtcgggagccgggctggaagcagagtctgtgccgatggccgtcatcattggggtggccgtaggagctggtgtggccttcctcgtccttatggcaaccatcgtggcgttctgctgtgcccgttcccagagaaatctcaaaggtgttgtgtcagccaaaaatgatatccgagtggaaattgtccacaaggaaccagcctctggtcgggagggtgaggagcactccaccatcaagcagctgatgatggaccggggtgaattccagcaagactcagtcctgaaacagctggaggtcctcaaagaagaggagaaagagtttcagaacctgaaggaccccaccaatggctactacagcgtcaacaccttcaaagagcaccactcaaccccgaccatctccctctccagctgccagcccgacctgcgtcctgcgggcaagcagcgtgtgcccacaggcatgtccttcaccaacatctacagcaccctgagcggccagggccgcctctacgactacgggcagcggtttgtgctgggcatgggcagctcgtccatcgagctttgtgagcgggagttccagagaggctccctcagcgacagcagctccttcctggacacgcagtgtgacagcagcgtcagcagcagcggcaagcaggatggctatgtgcagttcgacaaggccagcaaggcttctgcttcctcctcccaccactcccagtcctcgtcccagaactctgaccccagtcgacccctgcagcggcggatgcagactcacgtctaaggatcacacaccgcgggtggggacgggccagggaagaggtcagggcacgttctggttgtccagggacgaggggtactttgcagaggacaccagaattggccacttccaggacagcctcccagcgcctctgccactgccttccttcgaagctctgatcaagcacaaatctgggtccccaggtgctgtgtgccagaggtgggcgggtggggagacagacagaggctgcggctgagtgcgctgtgcttagtgctggacacccgtgtccccggccctttcctggaggcccctctaccacctgctctgcccacaggcacaagtggcagctataactctgctttcatgaaactgcggtccactctctggtctctctgtgggctctacccctcgctgaccagaagctctacctacccctgtgcctgtgctcccatacagccctggggagaaggggatgacgtcttcccagcactgagctgccccagaaaccccggctccccactgctgctcatagcccataccctggaggctgacaagccagaaatggccttggctaaaggagcctctctctcaccaggctggccgggagcccacccccaatttgtttggtgttttgtgtccatactcttgcagttctgtccttggacttgatgccgctgaactctgcggtgggaccggtccggtcagagcctggtgtactggggggagggagggaggagggagcctgtgctgacggagcacctcgccgggtgtgcccctcctgggctgtgtgaccccagcctccccacccacctcctgctttgtgtactcctcccctccccctcagcacaatcggagttcatataagaagtgcgggagcttctctggtcagggttctctgaacacttatggagagagtgcttcctgggaagtgtggcgtttgaaggggctggagggcaggtctttaagatggcgagactgcccttctcagctgataaacacaagaacggcgatcctgtcttcagtaaggctccacgagaagagaggaagtatatctacacctcaaccctcctagtcaccacctgaaataaatgttagggacactactccaacatgtttgttctgttcttttgttcctacaaagccacaggaagaacccaagagctcatagaatgcgttgggaacccaaggttctctgccctcctttgattcaatcttcctagacaataaaggcagttgatagctctg

SEQ ID NO: 15338 - DNA, 2474 bp, Homo sapiens
  source 1..2474: mol_type = unassigned DNA
gcccgcctgaggaagccgtgtgcctgggatgccaagagccagagaatggatcttctccgagtggggacattgctgacaatcccggcttcccgaggcggctaagaacaggcagtttgtgtcggctggctgcagatacccagaggcacaaagagaccgaagccacccggagggacccacggacggacagatggtaggcgcgaacccgagaggaccggcggaggctgagcaccgagagccgccaaggaagagaaactaaccacagccaagttaccccgccggctttccttcgctgcgctaaggaatgaaacccttccagctcgatctgctcttcgtctgcttcttcctcttcagtcaagagctgggcctccagaagagaggatgctgtctggtgctgggctacatggccaaggacaagtttcggagaatgaatgaaggccaagtctattccttcagccagcagccccaggaccaggtggtggtgtcgggacagccagtgacgctactttgcgccatccccgaatacgatggcttcgttctgtggatcaaggacggcttggctctgggtgtgggcagggacctctcaagttacccacagtacctggtggtagggaaccacctgtcaggggagcaccacctgaagatcctgagggcagagctgcaagacgatgcggtgtacgagtgccaggccatccaggccgccatccgctcccgccccgcacgcctcacagtcctggtgccgcctgatgaccccgtcatcctggggggccctgtgatcagcctgcgtgcgggggaccctctcaacctcacctgccacgcagacaatgccaagcctgcagcctccatcatctggttgcgaaagggagaggtcatcaatggggccacctactccaagaccctgcttcgggacggcaagcgggagagcatcgtcagcaccctcttcatctcccctggtgacgtggagaatggccagagcatcgtgtgtcgtgccaccaacaaagccatccccggaggaaaggagacgtcggtcaccattgacatccagcaccctccactggtcaacctctcggtggagccacagccagtgctggaggacaacgtcgtcactttccactgctctgcaaaggccaacccagctgtcacccagtacaggtgggccaagcggggccagatcatcaaggaggcatctggagaggtgtacaggaccacagtggactacacgtacttctcagagcccgtctcctgtgaggtgaccaacgccctgggcagcaccaacctcagccgcacggttgacgtctactttgggccccggatgaccacagaaccccaatccttgctcgtggatctgggctctgatgccatcttcagctgcgcctggaccggcaacccatccctgaccatcgtctggatgaagcggggctccggagtggtcctgagcaatgagaagaccctgaccctcaaatccgtgcgccaggaggacgcgggcaagtacgtgtgccgggctgtggtgccccgtgtgggagccggggagagagaggtgaccctgaccgtcaatggaccccccatcatctccagcacccagacccagcacgccctccacggcgagaagggccagatcaagtgcttcatccggagcacgccgccgccggaccgcatcgcctggtcctggaaggagaacgttctggagtcgggcacatcggggcgctatacggtggagaccatcagcaccgaggagggcgtcatctccaccctgaccatcagcaacatcgtgcgggccgacttccagaccatctacaactgcacggcctggaacagcttcggctccgacactgagatcatccggctcaaggagcaaggttcggaaatgaagtcgggagccgggctggaagcagagtctgtgccgatggccgtcatcattggggtggccgtaggagctggtgtggccttcctcgtccttatggcaaccatcgtggcgttctgctgtgcccgttcccagagaagtacgggagggagatccgggatctcagggagggggacagagaaaaaggccaggcttaggctgccccggagagcaagtaagcaggagtgcaatgaacaggggtcctaacagtgctgtgagctcctggggcagggagtgggtctgatgcatcggtgtatgtgagcctgggcaacatggcgcctggcagagtgggcgctaggctgaggttgacctggactagactgaacttcatctgcagggcagccagcattttggattgaacacatagctctttcagtcaggaactgtacagaaagatagggggaaaagcggtttgtggtttgatccttgctctacaagagctgttagtctagagagaccccatctctacaacaaaataaaaataaagagctgctagtctcaccagaaaagcaggtcactcacacagctgtgggggagtgggtggggaagcaataaaggaattgctttgagaaaactt

SEQ ID NO: 15339 - DNA, 3397 bp, Homo sapiens
  source 1..3397: mol_type = unassigned DNA
tgcgctaaggaatgaaacccttccagctcgatctgctcttcgtctgcttcttcctcttcagtcaagagctgggcctccagaagagaggatgctgtctggtgctgggctacatggccaaggacaagtttcggagaatgaatgaaggccaagtctattccttcagccagcagccccaggaccaggtggtggtgtcgggacagccagtgacgctactttgcgccatccccgaatacgatggcttcgttctgtggatcaaggacggcttggctctgggtgtgggcagggacctctcaagttacccacagtacctggtggtagggaaccacctgtcaggggagcaccacctgaagatcctgagggcagagctgcaagacgatgcggtgtacgagtgccaggccatccaggccgccatccgctcccgccccgcacgcctcacagtcctggtgccgcctgatgaccccgtcatcctggggggccctgtgatcagcctgcgtgcgggggaccctctcaacctcacctgccacgcagacaatgccaagcctgcagcctccatcatctggttgcgaaagggagaggtcatcaatggggccacctactccaagaccctgcttcgggacggcaagcgggagagcatcgtcagcaccctcttcatctcccctggtgacgtggagaatggccagagcatcgtgtgtcgtgccaccaacaaagccatccccggaggaaaggagacgtcggtcaccattgacatccagcaccctccactggtcaacctctcggtggagccacagccagtgctggaggacaacgtcgtcactttccactgctctgcaaaggccaacccagctgtcacccagtacaggtgggccaagcggggccagatcatcaaggaggcatctggagaggtgtacaggaccacagtggactacacgtacttctcagagcccgtctcctgtgaggtgaccaacgccctgggcagcaccaacctcagccgcacggttgacgtctactttgggccccggatgaccacagaaccccaatccttgctcgtggatctgggctctgatgccatcttcagctgcgcctggaccggcaacccatccctgaccatcgtctggatgaagcggggctccggagtggtcctgagcaatgagaagaccctgaccctcaaatccgtgcgccaggaggacgcgggcaagtacgtgtgccgggctgtggtgccccgtgtgggagccggggagagagaggtgaccctgaccgtcaatggaccccccatcatctccagcacccagacccagcacgccctccacggcgagaagggccagatcaagtgcttcatccggagcacgccgccgccggaccgcatcgcctggtcctggaaggagaacgttctggagtcgggcacatcggggcgctatacggtggagaccatcagcaccgaggagggcgtcatctccaccctgaccatcagcaacatcgtgcgggccgacttccagaccatctacaactgcacggcctggaacagcttcggctccgacactgagatcatccggctcaaggagcaagagtctgtgccgatggccgtcatcattggggtggccgtaggagctggtgtggccttcctcgtccttatggcaaccatcgtggcgttctgctgtgcccgttcccagagaaatctcaaaggtgttgtgtcagccaaaaatgatatccgagtggaaattgtccacaaggaaccagcctctggtcgggagggtgaggagcactccaccatcaagcagctgatgatggaccggggtgaattccagcaagactcagtcctgaaacagctggaggtcctcaaagaagaggagaaagagtttcagaacctgaaggaccccaccaatggctactacagcgtcaacaccttcaaagagcaccactcaaccccgaccatctccctctccagctgccagcccgacctgcgtcctgcgggcaagcagcgtgtgcccacaggcatgtccttcaccaacatctacagcaccctgagcggccagggccgcctctacgactacgggcagcggtttgtgctgggcatgggcagctcgtccatcgagctttgtgagcgggagttccagagaggctccctcagcgacagcagctccttcctggacacgcagtgtgacagcagcgtcagcagcagcggcaagcaggatggctatgtgcagttcgacaaggccagcaaggcttctgcttcctcctcccaccactcccagtcctcgtcccagaactctgaccccagtcgacccctgcagcggcggatgcagactcacgtctaaggatcacacaccgcgggtggggacgggccagggaagaggtcagggcacgttctggttgtccagggacgaggggtactttgcagaggacaccagaattggccacttccaggacagcctcccagcgcctctgccactgccttccttcgaagctctgatcaagcacaaatctgggtccccaggtgctgtgtgccagaggtgggcgggtggggagacagacagaggctgcggctgagtgcgctgtgcttagtgctggacacccgtgtccccggccctttcctggaggcccctctaccacctgctctgcccacaggcacaagtggcagctataactctgctttcatgaaactgcggtccactctctggtctctctgtgggctctacccctcgctgaccagaagctctacctacccctgtgcctgtgctcccatacagccctggggagaaggggatgacgtcttcccagcactgagctgccccagaaaccccggctccccactgctgctcatagcccataccctggaggctgacaagccagaaatggccttggctaaaggagcctctctctcaccaggctggccgggagcccacccccaatttgtttggtgttttgtgtccatactcttgcagttctgtccttggacttgatgccgctgaactctgcggtgggaccggtccggtcagagcctggtgtactggggggagggagggaggagggagcctgtgctgacggagcacctcgccgggtgtgcccctcctgggctgtgtgaccccagcctccccacccacctcctgctttgtgtactcctcccctccccctcagcacaatcggagttcatataagaagtgcgggagcttctctggtcagggttctctgaacacttatggagagagtgcttcctgggaagtgtggcgtttgaaggggctggagggcaggtctttaagatggcgagactgcccttctcagctgataaacacaagaacggcgatcctgtcttcagtaaggctccacgagaagagaggaagtatatctacacctcaaccctcctagtcaccacctgaaataaatgttagggacactactccaa

SEQ ID NO: 15340 - DNA, 2081 bp, Homo sapiens
  source 1..2081: mol_type = unassigned DNA
ggctggctgagtactggggtccagaaagtgatcgctgccgtggtcgccatggggaagtcggattttcttactcccaaggctatcgccaacaggatcaagtccaaggggctgcagaagctacgctggtattgccagatgtgccagaagcagtgccgggacgagaatggctttaagtgtcattgtatgtccgaatctcatcagagacaactattgctggcttcagaaaatcctcagcagtttatggattatttttcagaggaattccgaaatgactttctagaacttctcaggagacgctttggcactaaaagggtccacaacaacattgtctacaacgaatacatcagccaccgagagcacatccacatgaatgccactcagtgggaaactctgactgattttactaagtggctgggcagagaaggcttgtgcaaagtggacgagacaccaaaaggctggtatattcagtacatagacagggacccagaaactatccgccggcaactggaactggagaaaaagaaaaagcaggaccttgatgatgaagaaaaaactgccaaatttattgaagagcaagtgagaagaggcctggaagggaaggaacaggaggtccctacttttacggaattaagcagagaaaatgatgaagagaaagtcacgtttaatttgagtaaaggagcatgtagctcatccggagcaacatcttccaagtcaagtactctgggaccgagtgcactgaagacgataggaagttcagcatcagtgaaacgaaaagaatcttcccagagctcaactcagtctaaagaaaagaagaaaaagaaatctgcactggatgaaatcatggagattgaagaggaaaagaaaagaactgcccgaacagactactggctacagcctgaaattattgtgaaaattataaccaagaaactgggagagaaatatcataagaaaaaggctattgttaaggaagtaattgacaaatatacagctgttgtgaagatgattgattctggagacaagctgaaacttgaccagactcatttagagacagtaattccagcaccaggaaaaagaattctagttttaaatggaggctacagaggaaatgaaggtaccctagaatccatcaatgagaagactttttcagctactatcgtcattgaaactggccctttaaaaggacgcagagttgaaggaattcaatatgaagacatttctaaacttgcctgagtttgaaaatttgttaacaatacattaaaatcttaaagcatcaaattggtgttcgccaaggcattatgagactctactgtgttagggtatattcttttgtataaaacaaacaggtttttgaaaatattactgtatagttgttcagctaaactttgagaagaatttaattatgtctcatgaggtatcaaactatgtaattttgtccttgttatttttgtttcctttgtaatttacttgatgagtttatatcttcattaaagaatgttattataaagtgttttatctatgacaatttagaatcatgtaattggaggaaatccttcatacactctatattttcagtagtagagtagtaaagttgaactctaagtgtgactaaattttaaatgtcaaactataaatatagaagcagctttattgtggtaataattcatataccatacagttcactcatttaaaatatacatacaattcagtggtttttagtatttttgcagaattgtgcagccatcaccactgtctgattttaaaacactttcataccccaaaatgaaaccctttaatagtcaatcgctatttttcccctctgccctagccctagacagccactaatgtactttctgtctctatggatttgccctttctggacatttcttataaatggaatcatataatatgtgatcttttatgactggcttcttacacttagcatcatgttttcaaggtttatccatgcagtagcatgtaggcgtgcttcatttgtttttatggctgcttaatattccactgtatggatgtaccgtattttgtttgtccattcatcagctgataaacatttagattgtttctac

SEQ ID NO: 15341 - DNA, 1618 bp, Homo sapiens
  source 1..1618: mol_type = unassigned DNA
agctgggatttgtcccgcccaccgccgccagcccggttccgtttccggctggctgagtactggggtccagaaagtgatcgctgccgtggtcgccatggggaagtcggattttcttactcccaaggctatcgccaacaggatcaagtccaaggggctgcagaagctacgctggtattgccagatgtgccagaagcagtgccgggacgagaatggctttaagtgtcattgtatgtccgaatctcatcagagacaactattgctggcttcagaaaatcctcagcagtttatggattatttttcagaggaattccgaaatgactttctagaacttctcaggagacgctttggcactaaaagggtccacaacaacattgtctacaacgaatacatcagccaccgagagcacatccacatgaatgccactcagtgggaaactctgactgattttactaagtggctgggcagagaaggcttgtgcaaagtggacgagacaccaaaaggctggtatattcagtacatagacagggacccagaaactatccgccggcaactggaactggagaaaaagaaaaagcaggaccttgatgatgaagaaaaaactgccaaatttattgaagagcaagtgagaagaggcctggaagggaaggaacaggaggtccctacttttacggaattaagcagagaaaatgatgaagagaaagtcacgtttaatttgagtaaaggagcatgtagctcatccggagcaacatcttccaagtcaagtactctgggaccgagtgcactgaagacgataggaagttcagcatcagtgaaacgaaaagaatcttcccagagctcaactcagtctaaagaaaagaagaaaaagaaatctgcactggatgaaatcatggagattgaagaggaaaagaaaagaactgcccgaacagactactggctacagcctgaaattattgtgaaaattataaccaagaaactgggagagaaatatcataagaaaaaggctattgttaaggaagtaattgacaaatatacagctgttgtgaagatgattgattctggagacaagctgaaacttgaccagactcatttagagacagtaattccagcaccaggaaaaagaattctagttttaaatggaggctacagaggaaatgaaggtaccctagaatccatcaatgagaagactttttcagctactatcgtcattgaaactgtgtgagctaccacgccttgcctgagttgatcttctacaagagttcaaacaaaaaacagaccataccaggatgatcacttcaaacatgaggatgggtataagctgacgtcagacacagggttgatgggagacctacagaaaatacatataaatcatcagacatgaagtccagcacatagtaggtattgaataaatggcagtgagtggtcatgtccagaaatgaagccaagaagttgagcctggactactaagaatctggtctgaagaatttcaaaaaggagaatggttctccctgataacaaatagtgatgagtaaaaccagacaaattacatatgcctcccccaagtatgtacgtttggaatcaacttggtggttttcttcagagaaaaaatgtttcatgtctg

SEQ ID NO: 15342 - DNA, 1700 bp, Homo sapiens
  source 1..1700: mol_type = unassigned DNA
tccgtttccggctggctgagtactggggtccagaaagtgatcgctgccgtggtcgccatggggaagtcggattttcttactcccaaggctatcgccaacaggatcaagtccaaggggctgcagaagctacgctggtattgccagatgtgccagaagcagtgccgggacgagggaattccgaaatgactttctagaacttctcaggagacgctttggcactaaaagggtccacaacaacattgtctacaacgaatacatcagccaccgagagcacatccacatgaatgccactcagtgggaaactctgactgattttactaagtggctgggcagagaaggcttgtgcaaagtggacgagacaccaaaaggctggtatattcagtacatagacagggacccagaaactatccgccggcaactggaactggagaaaaagaaaaagcaggaccttgatgatgaagaaaaaactgccaaatttattgaagagcaagtgagaagaggcctggaagggaaggaacaggaggtccctacttttacggaattaagcagagaaaatgatgaagagaaagtcacgtttaatttgagtaaaggagcatgtagctcatccggagcaacatcttccaagtcaagtactctgggaccgagtgcactgaagacgataggaagttcagcatcagtgaaacgaaaagaatcttcccagagctcaactcagtctaaagaaaagaagaaaaagaaatctgcactggatgaaatcatggagattgaagaggaaaagaaaagaactgcccgaacagactactggctacagcctgaaattattgtgaaaattataaccaagaaactgggagagaaatatcataagaaaaaggctattgttaaggaagtaattgacaaatatacagctgttgtgaagatgattgattctggagacaagctgaaacttgaccagactcatttagagacagtaattccagcaccaggaaaaagaattctagttttaaatggaggctacagaggaaatgaaggtaccctagaatccatcaatgagaagactttttcagctactatcgtcattgaaactgtaagtttgtttacacaaagacagaaatttcaaaatgctttaaaaatgtgccatagttttttttaattggattgttctttattttagaatttgagttttttgttagccttctatcctatttggaaatctgtaagcttattttctccagtgactctgccattgctaaagtattttattttctgattataaaagaaatgtgtactcatgcataaaaccccaaaaaacataatttaatataaataattataaaaattaatcatagtcccccagcccaacaataaaccccattaatattttggtctgttcctttccaatcttggtgttttatgaaagtgtgtgtaataggtacagttttatatccttttttcccctcatatcgaatataaaactcaatttggcatagtaaagttagtgggggaagtaaagtcattgtcaagagggagggaaccacagaggtcaaccactttttaaaatgtctccccttttttcataaaggatttaaggtagcagagatcaatacagtaatttaaagaactctgacttataaataaagttggttattgacttagaactgatatttcactcacaggtctgtgagtgaggtctgagatatcttcag

SEQ ID NO: 15343 - DNA, 2806 bp, Homo sapiens
  source 1..2806: mol_type = unassigned DNA
ctggacccctgccagggaaggggtcctcagacttgaggttgccagctcagatgtggggctgctgatactaggtgactggactgatgttctgttctagatgaaactccttgaggggaccatttgaaaaggcttgatgtgctgcccaaagcccccttcagagctgacttctccacccccagctgccgtgagccttggctgctgacagctcatagctgagtccctcccgtgaagtcaccttctgctgaagggtacatcctctcccaaggcgaagctggtccgttacatttgtaagcagaggcagtgcaagctgagcgtggctcccggtgagaggaccccagagctcaacagctacccccgcttcagcgactggctgtacactttcaacgtgaggccggaggtggtgcaggagatcccccgagacctcacgctggatgccctgctggagatgaatgaggccaaggtgaaggagacgctgcggcgctgtggggccagcggggatgagtgtggccgtctgcagtatgccctcacctgcctgcggaaggtgacaggcctgggaggggagcacaaggaggactccagttggagttcattggatgcgcggcgggaaagtggctcagggccttccacggacaccctctcagcagccagcctgccctggcccccagggagctcccagctgggcagagcaggcaacagcgcccagggcccacgctccatctccgtgtcagctctgcccgcctcagactcccccacccccagcttcagtgagggcctctcagacacctgtattcccctgcacgccagcggccggctgaccccccgtgccctgcacagcttcatcaccccgcccaccacaccccagctgcgacggcacaccaagctgaagccaccacggacgccccccccacccagccgcaaggtcttccagctgctgcccagcttccccacactcacccggagcaagtcccatgagtctcagctggggaaccgcattgatgacgtctcctcgatgaggtttgatctctcgcatggatccccacagatggtacggagggatatcgggctgtcggtgacgcacaggttctccaccaagtcctggctgtcgcaggtctgccacgtgtgccagaagagcatgatatttggagtgaagtgcaagcattgcaggttgaagtgtcacaacaaatgtaccaaagaagcccctgcctgtagaatatccttcctgccactaactcggcttcggaggacagaatctgtcccctcggacatcaacaacccggtggacagagcagccgaaccccattttggaaccctccccaaagcactgacaaagaaggagcaccctccggccatgaatcacctggactccagcagcaacccttcctccaccacctcctccacaccctcctcaccggcgcccttcccgacatcatccaacccatccagcgccaccacgccccccaacccctcacctggccagcgggacagcaggttcaacttcccagctgcctacttcattcatcatagacagcagtttatctttccagtgccatctgctggccattgctggaaatgcctccttattgcagaaagtttaaaggaaaacgctttcaacatttcagcctttgcacacgcagccccgctccctgaagctgccgacggtacccggctcgatgaccagccgaaagcagatgtgttggaagctcacgaagcggaggctgaggagccagaggctggcaagtcagaggcagaagacgatgaggacgaggtggacgacttgccgagctctcgccggccctggcggggccccatctctcgcaaggccagccagaccagcgtgtacctgcaggagtgggacatccccttcgagcaggtagagctgggcgagcccatcgggcagggccgctggggccgggtgcaccgcggccgctggcatggcgaggtggccattcgcctgctggagatggacggccacaaccaggaccacctgaagctcttcaagaaagaggtgatgaactaccggcagacgcggcatgagaacgtggtgctcttcatgggggcctgcatgaacccgccccacctggccattatcaccagcttctgcaaggggcggacgttgcactcgtttgtgagggaccccaagacgtctctggacatcaacaagacgaggcaaatcgctcaggagatcatcaagggcatgggatatcttcatgccaagggcatcgtacacaaagatctcaaatctaagaacgtcttctatgacaacggcaaggtggtcatcacagacttcgggctgtttgggatctcaggcgtggtccgagagggacggcgtgagaaccagctaaagctgtcccacgactggctgtgctatctggcccctgagattgtacgcgagatgacccccgggaaggacgaggatcagctgccattctccaaagctgctgatgtctatgcatttgggactgtttggtatgagctgcaagcaagagactggcccttgaagaaccaggctgcagaggcatccatctggcagattggaagcggggaaggaatgaagcgtgtcctgacttctgtcagcttggggaaggaagtcagtgagatcctgtcggcctgctgggctttcgacctgcaggagagacccagcttcagcctgctgatggacatgctggagaaacttcccaagctgaaccggcggctctcccaccctggacacttctggaagtcagctgacattaacagcagcaaagttgtaccccggtttgaaaggtttggcttgggcgtcctggagtccagtaatccaaagatgtag

SEQ ID NO: 15344 - DNA, 3071 bp, Homo sapiens
  source 1..3071: mol_type = unassigned DNA
atggatagagcagcgctgcgcgcggcggcgatgggagagaagaaggagggcggtggcgggggggatgcggcggccgcggagggaggcgcaggggccgcggccagccgggcgctgcagcagtgcgggcagctccagaagctcatcgacatctccatcggcagcctgcgcgggctgcgcaccaagtgcgctgtgtccaacgacctcacccagcaggagatacggaccctggaggcgaagctggtccgttacatttgtaagcagaggcagtgcaagctgagcgtggctcccggtgagaggaccccagagctcaacagctacccccgcttcagcgactggctgtacactttcaacgtgaggccggaggtggtgcaggagatcccccgagacctcacgctggatgccctgctggagatgaatgaggccaaggtgaaggagacgctgcggcgctgtggggccagcggggatgagtgtggccgtctgcagtatgccctcacctgcctgcggaaggtgacaggcctgggaggggagcacaaggaggactccagttggagttcattggatgcgcggcgggaaagtggctcagggccttccacggacaccctctcagcagccagcctgccctggcccccagggagctcccagctgggcagagcaggcaacagcgcccagggcccacgctccatctccgtgtcagctctgcccgcctcagactcccccacccccagcttcagtgagggcctctcagacacctgtattcccctgcacgccagcggccggctgaccccccgtgccctgcacagcttcatcaccccgcccaccacaccccagctgcgacggcacaccaagctgaagccaccacggacgccccccccacccagccgcaaggtcttccagctgctgcccagcttccccacactcacccggagcaagtcccatgagtctcagctggggaaccgcattgatgacgtctcctcgatgaggtttgatctctcgcatggatccccacagatggtacggagggatatcgggctgtcggtgacgcacaggttctccaccaagtcctggctgtcgcaggtctgccacgtgtgccagaagagcatgatatttggagtgaagtgcaagcattgcaggttgaagtgtcacaacaaatgtaccaaagaagcccctgcctgtagaatatccttcctgccactaactcggcttcggaggacagaatctgtcccctcggacatcaacaacccggtggacagagcagccgaaccccattttggaaccctccccaaagcactgacaaagaaggagcaccctccggccatgaatcacctggactccagcagcaacccttcctccaccacctcctccacaccctcctcaccggcgcccttcccgacatcatccaacccatccagcgccaccacgccccccaacccctcacctggccagcgggacagcaggttcaacttcccagctgcctacttcattcatcatagacagcagtttatctttccagtgccatctgctggccattgctggaaatgcctccttattgcagaaagtttaaaggaaaacgctttcaacatttcagcctttgcacacgcagccccgctccctgaagctgccgacggtacccggctcgatgaccagccgaaagcagatgtgttggaagctcacgaagcggaggctgaggagccagaggctggcaagtcagaggcagaagacgatgaggacgaggtggacgacttgccgagctctcgccggccctggcggggccccatctctcgcaaggccagccagaccagcgtgtacctgcaggagtgggacatccccttcgagcaggtagagctgggcgagcccatcgggcagggccgctggggccgggtgcaccgcggccgctggcatggcgaggtggccattcgcctgctggagatggacggccacaaccaggaccacctgaagctcttcaagaaagaggtgatgaactaccggcagacgcggcatgagaacgtggtgctcttcatgggggcctgcatgaacccgccccacctggccattatcaccagcttctgcaaggggcggacgttgcactcgtttgtgagggaccccaagacgtctctggacatcaacaagacgaggcaaatcgctcaggagatcatcaagggcatgggatatcttcatgccaagggcatcgtacacaaagatctcaaatctaagaacgtcttctatgacaacggcaaggtggtcatcacagacttcgggctgtttgggatctcaggcgtggtccgagagggacggcgtgagaaccagctaaagctgtcccacgactggctgtgctatctggcccctgagattgtacgcgagatgacccccgggaaggacgaggatcagctgccattctccaaagctgctgatgtctatgcatttgggactgtttggtatgagctgcaagcaagagactggcccttgaagaaccaggctgcagaggcatccatctggcagattggaagcggggaaggaatgaagcgtgtcctgacttctgtcagcttggggaaggaagtcagtgagatcctgtcggcctgctgggctttcgacctgcaggagagacccagcttcagcctgctgatggacatgctggagaaacttcccaagctgaaccggcggctctcccaccctggacacttctggaagtcagctgacattaacagcagcaaagttgtaccccggtttgaaaggtttggcttgggcgtcctggagtccagtaatccaaagatgtagccagccatatggtttttcgctgctgatctctttctttttaaaatgtgtttctgaaacatcccaacaaccaccacgacaaaaaaacactgcctgcccagcgctgcaaaccaggagcacacgtcctagattcagactgttggccataaaccccactcgggagatggagctgcacctgctatttcttaaaatgacaccaccaacaaccaaacctgtcatgacagacagcaaatgtttacacgtatatttctcctgagtgaacctgatgttttacaataggtaataataaaaacagtctgtgc

SEQ ID NO: 15345 - DNA, 2731 bp, Homo sapiens
  source 1..2731: mol_type = unassigned DNA
ctggacccctgccagggaaggggtcctcagacttgaggttgccagctcagatgtggggctgctgatactaggtgactggactgatgttctgttctagatgaaactccttgaggggaccatttgaaaaggcttgatgtgctgcccaaagcccccttcagagctgacttctccacccccagctgccgtgagccttggctgctgacagctcatagctgagtccctcccgtgaagtcaccttctgctgaagggtacatcctctcccaaggcgaagctggtccgttacatttgtaagcagaggcagtgcaagctgagcgtggctcccggtgagaggaccccagagctcaacagctacccccgcttcagcgactggctgtacactttcaacgtgaggccggaggtggtgcaggagatcccccgagacctcacgctggatgccctgctggagatgaatgaggccaaggtgaaggagacgctgcggcgctgtggggccagcggggatgagtgtggccgtctgcagtatgccctcacctgcctgcggaaggtgacaggcctgggaggggagcacaaggaggactccagttggagttcattggatgcgcggcgggaaagtggctcagggccttccacggacaccctctcagcagccagcctgccctggcccccagggagctcccagctgggcagagcaggcaacagcgcccagggcccacgctccatctccgtgtcagctctgcccgcctcagactcccccacccccagcttcagtgagggcctctcagacacctgtattcccctgcacgccagcggccggctgaccccccgtgccctgcacagcttcatcaccccgcccaccacaccccagctgcgacggcacaccaagctgaagccaccacggacgccccccccacccagccgcaaggtcttccagctgctgcccagcttccccacactcacccggagcaagtcccatgagtctcagctggggaaccgcattgatgacgtctcctcgatgaggtttgatctctcgcatggatccccacagatggtacggagggatatcgggctgtcggtgacgcacaggttctccaccaagtcctggctgtcgcaggtctgccacgtgtgccagaagagcatgatatttggagtgaagtgcaagcattgcaggttgaagtgtcacaacaaatgtaccaaagaagcccctgcctgtagaatatccttcctgccactaactcggcttcggaggacagaatctgtcccctcggacatcaacaacccggtggacagagcagccgaaccccattttggaaccctccccaaagcactgacaaagaaggagcaccctccggccatgaatcacctggactccagcagcaacccttcctccaccacctcctccacaccctcctcaccggcgcccttcccgacatcatccaacccatccagcgccaccacgccccccaacccctcacctggccagcgggacagcaggttcaacttcccagctgcctacttcattcatcatagacagcagtttatctttccagtgccatctgctggccattgctggaaatgcctccttattgcagaaagtttaaaggaaaacgctttcaacatttcagcctttgcacacgcagccccgctccctgaagctgccgacggtacccggctcgatgaccagccgaaagcagatgtgttggaagctcacgaagcggaggctgaggagccagaggctggcaagtcagaggcagaagacgatgaggacgaggtggacgacttgccgagctctcgccggccctggcggggccccatctctcgcaaggccagccagaccagcgtgtacctgcaggagtgggacatccccttcgagcaggtagagctgggcgagcccatcgggcagggccgctggggccgggtgcaccgcggccgctggcatggcgaggtggccattcgcctgctggagatggacggccacaaccaggaccacctgaagctcttcaagaaagaggtgatgaactaccggcagacgcggcatgagaacgtggtgctcttcatgggggcctgcatgaacccgccccacctggccattatcaccagcttctgcaaggggcggacgttgcactcgtttgtgagggaccccaagacgtctctggacatcaacaagacgaggcaaatcgctcaggagatcatcaagggcatgggatatcttcatgccaagggcatcgtacacaaagatctcaaatctaagaacgtcttctatgacaacggcaaggtggtcatcacagacttcgggctgtttgggatctcaggcgtggtccgagagggacggcgtgagaaccagctaaagctgtcccacgactggctgtgctatctggcccctgagattgtacgcgagatgacccccgggaaggacgaggatcagctgccattctccaaagctgctgatgtctatgcatttgggactgtttggtatgagctgcaagcaagagactggcccttgaagaaccaggctgcagaggcatccatctggcagattggaagcggggaaggaatgaagcgtgtcctgacttctgtcagcttggggaaggaagtcagtgagatcctgtcggcctgctgggctttcgacctgcaggagagacccagcttcagcctgctgatggacatgctggagaaacttcccaagctgaaccggcggctctcccaccctggacacttctggaagtcagctgagctg

SEQ ID NO: 15346 - DNA, 2527 bp, Homo sapiens
  source 1..2527: mol_type = unassigned DNA
agtggcaagcgctgcctgagcagttctagctgggagaggtgggtgctgcagagtctgggattccagggtgaaagccacaggttcccctgaataagctcttactgctggtggttcctgaactgaagatgcaggcggatctggagatcccccgagacctcacgctggatgccctgctggagatgaatgaggccaaggtgaaggagacgctgcggcgctgtggggccagcggggatgagtgtggccgtctgcagtatgccctcacctgcctgcggaaggtgacaggcctgggtacgtggggcctgccaccctctcccttgcctggcctggtgcccttggggctgtggccttcactatggtgggtgatggagcggggcaagcgtggcccagggtttctggggcagcctggaaaggccagggttggatgttcacagcctcctgagaagctctcccagggtcctcagggctctggatcctggtgggtctggccaggccgaatctgaggggtttcagccatggttagaaatcccaggcctgtctgctgggctgggctggcctggcatggtttcctctctgttgagggctctgtgtaccctctgccagcttcccacattccagcccccagccctctccccgtcttctcctgtccccattgctggctgggttctgtgctcagaaggcacatgctgatgtgggcctgagccaagggtgattagggaaactctatggctctttagctgggagtgtgtacgtggctgtcccaggcaaagtgtgtaatcctggccttgccacgaggtccttgggaattattcacaggctttctaaatcttgcgtcggaaacagcttcaaatgcctgacttaatggtcccactaccacatagataaggcattaaaataagcctcatgaatggaatcaggcctggtttttaattatctgaggcccctgtcttatctccgtctgcctgaggcttaaggaaggcaccaaggtttatattctgcctggttttttcttcccagagaggatcgggcttaatttcctctctgccctcattgtatcaagtcctctgaacacggcacagtgtagaaagttgcactcaattcagaaaatcttgacctgccaggtctcccggcagatgctgaaaataaacacaacagaagtgtggctggtgttcttgttctcacatattacaggagactgagctcagagagggaaagggcttgggtaagggcacacagcagttggtggctgagccagaatttgaaccttgggccctgatggcgattggtttgtccccatgcttgccacccaagctgagatctttggggtaatttgtcagcccttctttgcttcctccttatgcctggattttaaagaattgtggaagagtcagcttttaagtggtagtgacctatttgtgtcatgcaggctgctgtctacctgtcctagatgccaagagagggagatcactaatttatgcacctactgtgtgccaggcgtgtgacacacatattgtggccacatcgttgtaagaggtagtgttgagctcgctttgtagctgaggcctctctgaccactggaggcgttggatgagtcatctggggccccacacctggcatggagcagagctgggctttgaactcaggtttcttgttcagagggtgctttttccagcaggccttagaggaggcccctgaagaagaagcattttctgggtttcttctctctcatttagtctcagcttgtggtgcctctgcatccccagcagagtcctagccccatcacagtccaggacaccggcctttcgtctgcccagtgctggctgcacttcacgggcacctgctgggatccgctgggtaccagtgatcccattagattgtgcatcacagcatcttcattgcatccccatggggcttggtgagagcagtctagtcagagtacaggtgggctatggaatgaaaccacctgggccctgcctgggcccagcactctgctcggccacttagaacctgtgggaccttggtgagttacttcacctcactctgcctcagtttcctcatctgtaaaatggcagtgataacgacacctctctcagggttgttgtgaaaaggaaatgagttaacgtaaagtccttagatcagagcctggcatgtattagatgttcttttcagtgtgaggcctatgaggtgatagaaagtgttgaagtcatttcctttgcaatctctggtctaaagaaaggtgagtgaacagctgggcatggtggcccaggcctgtaatcccagcatttgggaggctgaggcaggctgattgcttgagttcaggagttcaagccccccctgggcaacatggcaaaaccctgtttctacaaaaaatacaaaaattagccaagagtggttgtgtgtgcctgtaatcccagctactcaggaagctgaggtgggagcatggcttgaacctgggagataggggttgcagtgagccaagatcataccactgcactccagccttggtaacagagccagatgctgtctcacc

SEQ ID NO: 15347 - DNA, 6340 bp, Homo sapiens
  source 1..6340: mol_type = unassigned DNA
gcacagcttcatcaccccgcccaccacaccccagctgcgacggcacaccaagctgaagccaccacggacgccccccccacccagccgcaaggtcttccagctgctgcccagcttccccacactcacccggagcaagtcccatgagtctcagctggggaaccgcattgatgacgtctcctcgatgaggtttgatctctcgcatggatccccacagatggtacggagggatatcgggctgtcggtgacgcacaggttctccaccaagtcctggctgtcgcaggtctgccacgtgtgccagaagagcatgatatttggagtgaagtgcaagcattgcaggttgaagtgtcacaacaaatgtaccaaagaagcccctgcctgtagaatatccttcctgccactaactcggcttcggaggacagaatctgtcccctcggacatcaacaacccggtggacagagcagccgaaccccattttggaaccctccccaaagcactgacaaagaaggagcaccctccggccatgaatcacctggactccagcagcaacccttcctccaccacctcctccacaccctcctcaccggcgcccttcccgacatcatccaacccatccagcgccaccacgccccccaacccctcacctggccagcgggacagcaggttcaacttcccagctgcctacttcattcatcatagacagcagtttatctttccagacatttcagcctttgcacacgcagccccgctccctgaagctgccgacggtacccggctcgatgaccagccgaaagcagatgtgttggaagctcacgaagcggaggctgaggagccagaggctggcaagtcagaggcagaagacgatgaggacgaggtggacgacttgccgagctctcgccggccctggcggggccccatctctcgcaaggccagccagaccagcgtgtacctgcaggagtgggacatccccttcgagcaggtagagctgggcgagcccatcgggcagggccgctggggccgggtgcaccgcggccgctggcatggcgaggtggccattcgcctgctggagatggacggccacaaccaggaccacctgaagctcttcaagaaagaggtgatgaactaccggcagacgcggcatgagaacgtggtgctcttcatgggggcctgcatgaacccgccccacctggccattatcaccagcttctgcaaggggcggacgttgcactcgtttgtgagggaccccaagacgtctctggacatcaacaagacgaggcaaatcgctcaggagatcatcaagggcatgggatatcttcatgccaagggcatcgtacacaaagatctcaaatctaagaacgtcttctatgacaacggcaaggtggtcatcacagacttcgggctgtttgggatctcaggcgtggtccgagagggacggcgtgagaaccagctaaagctgtcccacgactggctgtgctatctggcccctgagattgtacgcgagatgacccccgggaaggacgaggatcagctgccattctccaaagctgctgatgtctatgcatttgggactgtttggtatgagctgcaagcaagagactggcccttgaagaaccaggctgcagaggcatccatctggcagattggaagcggggaaggaatgaagcgtgtcctgacttctgtcagcttggggaaggaagtcagtgagatcctgtcggcctgctgggctttcgacctgcaggagagacccagcttcagcctgctgatggacatgctggagaaacttcccaagctgaaccggcggctctcccaccctggacacttctggaagtcagctgagttgtaggcctggctgccttgcatgcaccaggggctttcttcctcctaatcaacaactcagcaccgtgacttctgctaaaatgcaaaatgagatgcgggcactaacccaggggatgccacctctgctgctccagtcgtctctctcgaggctacttcttttgctttgttttaaaaactggccctctgccctctccacgtggcctgcatatgcccaagtaactgctctcagaggatcccactaactgagctccctccaaggcagtctgggcagcttctaactaccttcctggacatgactgattgctcccgtgttcttctgagggctggtcttgtttttgtttgggtggctctgtctcactgctaacaccttagtgagatgccttccaccctcctgagcacaccagcctcccactgggtgtgtgcctagtgcggggcgggcggaggttgggagggtgttggcttggcttttaacctgtggggattttgtccaacaaggagtggaatgatttcagagctgccctgaggctggcaccctggtcacaggaaccctctgcgctggctcctgtctcagtcccctctgtagagttagatcagaagacacagaaagttctgtggccatgaaagataccagcttggaagggttgtgtcttcagtggcaccctcagaaaaattgtcttaaagcaaagaggtacctggctccagacaatttttctgatgaaaacaaagtctctgccccgtccccaccctgccaccctggcaaagttacttcctttacagctgcccagtgtaccatagaccagaccccaggtcagcatttgtcaagagcatggctgctgagtcccctgtggcagtcaatgcactgtttaccaaatgcaggtttctgttctccctccccagcaagacctgctgaacccagatctctggaatggggccctaggaatttgcatttcaacctgcttcccaggtggccctgatgcaccccagtattagagtttattgctaaaaggaacatgccctgtcactcctggtatcctgggagtcatgtttctcttctctctcagttctacttggagcaagagctttcctgggctgcaaatgagaaaacaattcctaggaacccacagcagtactgagcatgctgggagcttgggacttggagatgaatgagccaccgttgctgctccaagtaggactacttggagtgtagctgaggccttggacgcagtatgaccaggggcagctctgccagggctgttggccaatcagtcattttcatttcttgttggaggccaggtcctctgctgaactcatttcctagctagtgttaccctaattctgatgaagatcaatggggctataattcttgtttttgttcctctttgcagcattaacagcagcaaagttgtaccccggtttgaaaggtttggcttgggcgtcctggagtccagtaatccaaagatgtagccagccatatggtttttcgctgctgatctctttctttttaaaatgtgtttctgaaacatcccaacaaccaccacgacaaaaaaacactgcctgcccagcgctgcaaaccaggagcacacgtcctagattcagactgttggccataaaccccactcgggagatggagctgcacctgctatttcttaaaatgacaccaccaacaaccaaacctgtcatgacagacagcaaatgtttacacgtatatttctcctgagtgaacctgatgttttacaataggtaataataaaaacagtctgtgcagatgcactggcactgacggccaggatggcggaaatggccatcccctctgaggaccttgtaggcggtgagggacccatgctgggccagaaggaagacaaacatggtaattgcagctgttcttggggtagggcggggagcccagaaggtctgatctggcctctgctttttggcccaagactccatcagggaaatctatctagggctctccccttgtcctttcaaagggatactgccccttcctcgtcttgcagaggaaaccctggctaggaactgagctagtttatggagtctggaattcctggagagcttgggttcaccttctcacccctgtaatccaggctgctcctgctggaaaagtagaaacagaatccaaaaaaggtctggactcacccggtggttcccagccagggtttctgctgcaaggtgaggaaacatccatggcttgtacagatgtgagtctttgatgaagcccccaggcaggcaccaaggtgatgggactcagggccttggcttttagatacatcccagtccctgactgacatctgaccatgagggctggatgggtgggaacaaggaggagtagatggcaaaagtacctgagcccacttcccagccacagggtgaccctggcactgtaaaaaccctttgtcagtcatgccagaaggttctagaactgcccacctcttccatttcagtcctgctgaaaccccttagcctatttccgactcctctgtccatgctctgagttcagctgggcagtgtgtgggctatcacccctttcatttagacctacctagctggcccccatctgcagagccttccttagcaccattaggccttctacttgtgtccatttgaagcaggaggggctggatttggaaaagtctttgaagtgagagcaccacgcttgtcttcgttagaaactcttaactgcagaaaaaagttccagatggcaagggagcccttaagtggagattaggttgcattagactccaaaaccagaaaggaaaaagggtgatgggagtggagacgtgattggattcaggcccagaacctgtgaccatgctctgagctcagacttggggagggaggggtgtggctcccaccccttccagttaagacctgcctagcagagccccagtctccagccccttccctagcaccagagtctggtcaaaatgccacagaaaatgagctgctctgccagcaagctgtggagctgcctcctctccaggcctggcatcccttggtcagcccctcctgggagggcacagccgtattacagtgccagtgtgcctggccatcagcatcttcacccttcccagtctgtgtggggaggctgtaaaccccgtggattcagctccgtgtggagtttctgtgctatggtgggactgctcattttgccccatcatccctttggcctcccacacacctgccccttcccagggatcacgtgtgtctccagcctttcacctttctattgcaatggtggcctttgtccaggcaagagcaggcctgatggatgtactggtgagccccacagttggatgtcagctcagccgtccaactgggaggaacagtaggctcagttcctccctgacccctgacaccaggccgcagtgggcatgcacaggcccacagaaagtcagtctgggttttgcttttctcgtgagcatcacagttaaagaagcgctcattgagcaactacagtgcacttggtcttctgcaagtgctgggcacctagagataggaacagtcatggtccctgctcttaaggaactgatgacctggtggggccctgttgtcttcaaggaacccagaagccactgggccccaaaggtggaactgaaggactgggggcagctggctctcagcctgccacctctgcactgcctgcctttaaagaaccccaccccaccccatgatggccccctctgttccccttgtatttcagtgactgtgaattgaggttaggaaggcacacctgcccttctgtgtgctctctccacacgaaggatgacagatactgtgaattcagccctcacggccaactgtgaaggggatggagaaggctgggagggctcggggagagctcttaggggctgcggaagtccccacgggggtctgagagtggagcccaagctttggccctccaggcatccccagtttccagcctcacctctgaagccctgctgcctttaaccaccagagccgcagccccctgggtttctgtctaactcgaagtcttgaatcctagctagtttggggttgtgagcagtgtgtagcaaagttgatctctccatgtcaccaaatcaaaacaccctctgtcatcctacggcatttcctcttgaggtcacagagaggaatggcaagccctggaaacctgtgttattctgtgttgatttggtgtggggggagggtggagacgtaaatgtgaagccagttggagtttgtgctatgcagcagtgttagccaggatctcatcagcgtgcaaacctagcatcttctgtggccacaagccacacacttgctttttttgaatgtgatgtaaaatttgtacagtaaagtttttatattttctatcaactacatttgtcttccagacatgctattaatttaaattaaaatggttagtattaacaaacatgctgtatcgggtttttttgccactggcaagaacatgccctctgtgctaagccaggcctgggtgtctggagtttgtgaataaagttataccaaggtg

SEQ ID NO: 15348 - DNA, 2631 bp, Homo sapiens
  source 1..2631: mol_type = unassigned DNA
atggatagagcagcgctgcgcgcggcggcgatgggagagaagaaggagggcggtggcgggggggatgcggcggccgcggagggaggcgcaggggccgcggccagccgggcgctgcagcagtgcgggcagctccagaagctcatcgacatctccatcggcagcctgcgcgggctgcgcaccaagtgcgctgtgtccaacgacctcacccagcaggagatacggaccctggaggcgaagctggtccgttacatttgtaagcagaggcagtgcaagctgagcgtggctcccggtgagaggaccccagagctcaacagctacccccgcttcagcgactggctgtacactttcaacgtgaggccggaggtggtgcaggagatcccccgagacctcacgctggatgccctgctggagatgaatgaggccaaggtgaaggagacgctgcggcgctgtggggccagcggggatgagtgtggccgtctgcagtatgccctcacctgcctgcggaaggtgacaggcctgggaggggagcacaaggaggactccagttggagttcattggatgcgcggcgggaaagtggctcagggccttccacggacaccctctcagcagccagcctgccctggcccccagggagctcccagctgggcagagcaggcaacagcgcccagggcccacgctccatctccgtgtcagctctgcccgcctcagactcccccacccccagcttcagtgagggcctctcagacacctgtattcccctgcacgccagcggccggctgaccccccgtgccctgcacagcttcatcaccccgcccaccacaccccagctgcgacggcacaccaagctgaagccaccacggacgccccccccacccagccgcaaggtcttccagctgctgcccagcttccccacactcacccggagcaagtcccatgagtctcagctggggaaccgcattgatgacgtctcctcgatgaggtttgatctctcgcatggatccccacagatggtacggagggatatcgggctgtcggtgacgcacaggttctccaccaagtcctggctgtcgcaggtctgccacgtgtgccagaagagcatgatatttggagtgaagtgcaagcattgcaggttgaagtgtcacaacaaatgtaccaaagaagcccctgcctgtagaatatccttcctgccactaactcggcttcggaggacagaatctgtcccctcggacatcaacaacccggtggacagagcagccgaaccccattttggaaccctccccaaagcactgacaaagaaggagcaccctccggccatgaatcacctggactccagcagcaacccttcctccaccacctcctccacaccctcctcaccggcgcccttcccgacatcatccaacccatccagcgccaccacgccccccaacccctcacctggccagcgggacagcaggttcaacttcccagctgcctacttcattcatcatagacagcagtttatctttccagacatttcagcctttgcacacgcagccccgctccctgaagctgccgacggtacccggctcgatgaccagccgaaagcagatgtgttggaagctcacgaagcggaggctgaggagccagaggctggcaagtcagaggcagaagacgatgaggacgaggtggacgacttgccgagctctcgccggccctggcggggccccatctctcgcaaggccagccagaccagcgtgtacctgcaggagtgggacatccccttcgagcaggtagagctgggcgagcccatcgggcagggccgctggggccgggtgcaccgcggccgctggcatggcgaggtggccattcgcctgctggagatggacggccacaaccaggaccacctgaagctcttcaagaaagaggtgatgaactaccggcagacgcggcatgagaacgtggtgctcttcatgggggcctgcatgaacccgccccacctggccattatcaccagcttctgcaaggggcggacgttgcactcgtttgtgagggaccccaagacgtctctggacatcaacaagacgaggcaaatcgctcaggagatcatcaagggcatgggatatcttcatgccaagggcatcgtacacaaagatctcaaatctaagaacgtcttctatgacaacggcaaggtggtcatcacagacttcgggctgtttgggatctcaggcgtggtccgagagggacggcgtgagaaccagctaaagctgtcccacgactggctgtgctatctggcccctgagattgtacgcgagatgacccccgggaaggacgaggatcagctgccattctccaaagctgctgatgtctatgcatttgggactgtttggtatgagctgcaagcaagagactggcccttgaagaaccaggctgcagaggcatccatctggcagattggaagcggggaaggaatgaagcgtgtcctgacttctgtcagcttggggaaggaagtcagtgagatcctgtcggcctgctgggctttcgacctgcaggagagacccagcttcagcctgctgatggacatgctggagaaacttcccaagctgaaccggcggctctcccaccctggacacttctggaagtcagctgagctg

SEQ ID NO: 15349 - DNA, 1938 bp, Homo sapiens
  source 1..1938: mol_type = unassigned DNA
atgtataacaaaaaagcaaaaatggaaccaaatgcaagtgagtctgcgattccagcgaggaggcagcggcagcccagagccaagaagaagagcaaacccttgaacctcaagatccacagcagcgtaggcagctgcgagaacatcccctctcagcagcgctccccgctgctgtccgagcgctccctccgctccttctttgtgggacacgcacctttcctgccttccacccctcctgttcacactgaggccaacttctctgcaaacacactgtcagtgccacgctggtccccgcagatccctcgcagagatctcggcaactccatcaagcacaggttttccaccaagtactggatgtctcagacgtgcacagtctgtgggaaagggatgctttttggcctcaagtgtaaaaactgcaagttaaagtgccacaacaaatgcaccaaagaagccccaccctgtcatcttctgatcatccaccgaggagatccagcaaggttagtccggacagagtccgttccgtgtgacatcaacaaccctctacggaagccacctcgctattcagacctgcacatcagtcagacgctccccaaaaccaacaaaatcaacaaggaccacatccctgtcccttaccagccagactccagcagcaacccctcctccacgacgtcctccacgccctcctcgccagcaccccccctccctcctagtgccacgccgccttctcccctacacccttccccacagtgcacacggcagcagaagaacttcaacctgccagcatcccactactacaaatacaagcagcagttcatcttcccagatgtggtgccggtgccggagacgccgacccgggcgccccaggtcatcctgcatccggtgacctcgaatccaatcttggaaggaaatccattacttcaaattgaagtggagccaacgtcggagaatgaagaggtccatgatgaggccgaagagtcagaggatgacttcgaggagatgaacctgtccctcctctcggcccggagcttcccacgcaaggccagccagaccagcatcttccttcaggagtgggacatcccctttgagcagctggagatcggcgagctcattggaaagggccgctttgggcaagtgtaccacggccgctggcatggcgaggtggccatccggctgattgacattgagagggacaacgaggaccagctcaaggccttcaagcgggaggtgatggcctacaggcagacacggcatgagaacgtggtgcttttcatgggtgcctgcatgagcccgcctcacctggccatcatcaccagcctctgtaagggacggacgctctattccgttgtgagggatgccaaaatcgttttggatgtcaacaaaaccaggcagattgctcaagaaattgtgaagggcatgggctacctccacgccaagggaatcctacacaaggacctcaagtcaaagaacgtcttctatgacaacggcaaagtggtcatcacggactttggactcttcagcatttctggggtgctgcaggctggcaggcgggaggacaaactgcgcatccagaatggctggctatgccacctggcaccagagatcatccgccagctgtcccccgacacagaggaggataagctccccttctccaagcactctgacgtctttgcccttggcacaatctggtatgaactccacgccagggaatggcctttcaagacccaaccagcagaggcaataatctggcaaatgggcacaggcatgaaacccaacctcagccagattggcatgggaaaagaaatctcggacattcttctcttctgctgggcctttgaacaagaagagagacctaccttcaccaagctcatggacatgctggagaaactgccaaagcgaaaccgtcgcctgtctcaccctggacatttctggaagtctgcagag

SEQ ID NO: 15350 - DNA, 3815 bp, Homo sapiens
  source 1..3815: mol_type = unassigned DNA
aggcaagatgtcggtgtggagcgaggcaggagcgattgcagcaaccgtcacccccggagcccggcggcggcagcagcagcagcagcagcagcgcggggaggagacagcagccagccgcagtagccgccgcagccgcgggagcaatgcagacagcaccttgagaacgcgctaaagcactccaaaccgtggaccatgccgtgtccctgcaactgggaggggggaaaaccagattttttttgacataaaagcaagccagccaaaaatatataattttgtccttcaaggagccggtgtgtaaagagtgagcgctattttccttctcctcctcctcctctccctcctcctcctctccctcctcctctctctcctccttctcctcttctttttcctcctcctcctcctccctaagtgtacagacagcatcacatcacctggtttgcttctgagaaacagcatctctccttttcagggaccagagactcagagagagaggagacattctaatggagtccgcttgatatcccaaaataaaataataaattttggctcttgtcccctcctcccactcccaccccctcaaccctgtgtgagatgttggatttcttcttcatgagacattgttgagaagtcgcagtggttggagaggcggagggtagactacctctactcccccccctcttttttctctctgggaggaggaggaggggaagggggttgcagagcaagcgatggatgaggaaaacatgacgaaaagcgaggagcagcagcctctgagtttgcaaaaagccttacagcagtgcgaactggtccaaaacatgatagacttgagcatctccaacctggaagggcttaggaccaaatgtgctacctccaacgacctcacacaaaaagaaatccggaccctggagagcaagctggtgaagtacttcagccggcagctgtcctgcaaaaagaaggtagccttgcaggagcgcaacgcggagctggacggcttcccccagctacggcactggttccgaatcgtcgatgtgcgcaaggaggtcctggaggaaatctcccccggccagctgagcctggaggacctcttggagatgacggatgaacaggtgtgcgagactgtggagaaatacggagccaaccgggaggagtgtgcccgcctcaacgcctccctctcctgcctcaggaatgtccacatgtcaggaggcaacctttccaaacaagactggaccatccagtggcccacgacagagacggggaaggagaacaatcccgtgtgccccccggagcccaccccgtggatccgcacccatctctcccagagccccagggtcccgtccaagtgcgtccagcactattgtcacaccagccccactcccggggcccctgtgtacacccacgtggacaggcttaccgtggacgcctacccgggcttgtgcccgcccccgccactggagtcgggccaccgttccctgcccccatcgccccggcagcggcacgcggtccgcaccccgccgcgcacccccaacatcgtcaccaccgtgaccccgccgggcacgccgcccatgaggaagaagaacaagctgaagcccccggggaccccaccgccctcctcccgaaaactgatacacttgatcccgggattcaccgcgctgcatcggagcaaatcccacgagttccagctggggcaccgcgtggacgaggcccacacgcccaaagccaagaagaagagcaaacccttgaacctcaagatccacagcagcgtaggcagctgcgagaacatcccctctcagcagcgctccccgctgctgtccgagcgctccctccgctccttctttgtgggacacgcacctttcctgccttccacccctcctgttcacactgaggccaacttctctgcaaacacactgtcagtgccacgctggtccccgcagatccctcgcagagatctcggcaactccatcaagcacaggttttccaccaagtactggatgtctcagacgtgcacagtctgtgggaaagggatgctttttggcctcaagtgtaaaaactgcaagttaaagtgccacaacaaatgcaccaaagaagccccaccctgtcatcttctgatcatccaccgaggagatccagcaaggttagtccggacagagtccgttccgtgtgacatcaacaaccctctacggaagccacctcgctattcagacctgcacatcagtcagacgctccccaaaaccaacaaaatcaacaaggaccacatccctgtcccttaccagccagactccagcagcaacccctcctccacgacgtcctccacgccctcctcgccagcaccccccctccctcctagtgccacgccgccttctcccctacacccttccccacagtgcacacggcagcagaagaacttcaacctgccagcatcccactactacaaatacaagcagcagttcatcttcccagatgtggtgccggtgccggagacgccgacccgggcgccccaggtcatcctgcatccggtgacctcgaatccaatcttggaaggaaatccattacttcaaattgaagtggagccaacgtcggagaatgaagaggtccatgatgaggccgaagagtcagaggatgacttcgaggagatgaacctgtccctcctctcggcccggagcttcccacgcaaggccagccagaccagcatcttccttcaggagtgggacatcccctttgagcagctggagatcggcgagctcattggaaagggccgctttgggcaagtgtaccacggccgctggcatggcgaggtggccatccggctgattgacattgagagggacaacgaggaccagctcaaggccttcaagcgggaggtgatggcctacaggcagacacggcatgagaacgtggtgcttttcatgggtgcctgcatgagcccgcctcacctggccatcatcaccagcctctgtaagggacggacgctctattccgttgtgagggatgccaaaatcgttttggatgtcaacaaaaccaggcagattgctcaagaaattgtgaagggcatgggctacctccacgccaagggaatcctacacaaggacctcaagtcaaagaacgtcttctatgacaacggcaaagtggtcatcacggactttggactcttcagcatttctggggtgctgcaggctggcaggcgggaggacaaactgcgcatccagaatggctggctatgccacctggcaccagagatcatccgccagctgtcccccgacacagaggaggataagctccccttctccaagcactctgacgtctttgcccttggcacaatctggtatgaactccacgccagggaatggcctttcaagacccaaccagcagaggcaataatctggcaaatgggcacaggcatgaaacccaacctcagccagattggcatgggaaaagaaatctcggacattcttctcttctgctgggcctttgaacaagaagagagacctaccttcaccaagctcatggacatgctggagaaactgccaaagcgaaaccgtcgcctgtctcaccctggacatttctggaagtctgcagagctgtgacctttggacatcgggacggcgcccagctgcctgggctcccgtcacctctccctccctactctgtcctctgccagctcaggaggccagagactcagcatcagagggtaccaaccccgaccgacctgggagcactggacaactgctcggcggcctccctgcacctcagacttgagcccttttcctcgggcagggttggggacccccgagctaggactgaaccggaccagccagggt

SEQ ID NO: 15351 - DNA, 17008 bp, Homo sapiens
  source 1..17008: mol_type = unassigned DNA
gcagcagcctctgagtttgcaaaaagccttacagcagtgcgaactggtccaaaacatgatagacttgagcatctccaacctggaagggcttaggaccaaatgtgctacctccaacgacctcacacaaaaagaaatccggaccctggagagcaagctggtgaagtacttcagccggcagctgtcctgcaaaaagaaggtagccttgcaggagcgcaacgcggagctggacggcttcccccagctacggcactggttccgaatcgtcgatgtgcgcaaggaggtcctggaggaaatctcccccggccagctgagcctggaggacctcttggagatgacggatgaacaggtgtgcgagactgtggagaaatacggagccaaccgggaggagtgtgcccgcctcaacgcctccctctcctgcctcaggaatgtccacatgtcaggaggcaacctttccaaacaagactggaccatccagtggcccacgacagagacggggaaggagaacaatcccgtgtgccccccggagcccaccccgtggatccgcacccatctctcccagagccccagggtcccgtccaagtgcgtccagcactattgtcacaccagccccactcccggggcccctgtgtacacccacgtggacaggcttaccgtggacgcctacccgggcttgtgcccgcccccgccactggagtcgggccaccgttccctgcccccatcgccccggcagcggcacgcggtccgcaccccgccgcgcacccccaacatcgtcaccaccgtgaccccgccgggcacgccgcccatgaggaagaagaacaagctgaagcccccggggaccccaccgccctcctcccgaaaactgatacacttgatcccgggattcaccgcgctgcatcggagcaaatcccacgagttccagctggggcaccgcgtggacgaggcccacacgcccaaagccaagaagaagagcaaacccttgaacctcaagatccacagcagcgtaggcagctgcgagaacatcccctctcagcagcgctccccgctgctgtccgagcgctccctccgctccttctttgtgggacacgcacctttcctgccttccacccctcctgttcacactgaggccaacttctctgcaaacacactgtcagtgccacgctggtccccgcagatccctcgcagagatctcggcaactccatcaagcacaggttttccaccaagtactggatgtctcagacgtgcacagtctgtgggaaagggatgctttttggcctcaagtgtaaaaactgcaagttaaagtgccacaacaaatgcaccaaagaagccccaccctgtcatcttctgatcatccaccgaggagatccagcaaggttagtccggacagagtccgttccgtgtgacatcaacaaccctctacggaagccacctcgctattcagacctgcacatcagtcagacgctccccaaaaccaacaaaatcaacaaggaccacatccctgtcccttaccagccagactccagcagcaacccctcctccacgacgtcctccacgccctcctcgccagcaccccccctccctcctagtgccacgccgccttctcccctacacccttccccacagtgcacacggcagcagaagaacttcaacctgccagcatcccactactacaaatacaagcagcagttcatcttcccagatgtggtgccggtgccggagacgccgacccgggcgccccaggtcatcctgcatccggtgacctcgaatccaatcttggaaggaaatccattacttcaaattgaagtggagccaacgtcggagaatgaagaggtccatgatgaggccgaagagtcagaggatgacttcgaggagatgaacctgtccctcctctcggcccggagcttcccacgcaaggccagccagaccagcatcttccttcaggagtgggacatcccctttgagcagctggagatcggcgagctcattggaaagggccgctttgggcaagtgtaccacggccgctggcatggcgaggtggccatccggctgattgacattgagagggacaacgaggaccagctcaaggccttcaagcgggaggtgatggcctacaggcagacacggcatgagaacgtggtgcttttcatgggtgcctgcatgagcccgcctcacctggccatcatcaccagcctctgtaagggacggacgctctattccgttgtgagggatgccaaaatcgttttggatgtcaacaaaaccaggcagattgctcaagaaattgtgaagggcatgggctacctccacgccaagggaatcctacacaaggacctcaagtcaaagaacgtcttctatgacaacggcaaagtggtcatcacggactttggactcttcagcatttctggggtgctgcaggctggcaggcgggaggacaaactgcgcatccagaatggctggctatgccacctggcaccagagatcatccgccagctgtcccccgacacagaggaggataagctccccttctccaagcactctgacgtctttgcccttggcacaatctggtatgaactccacgccagggaatggcctttcaagacccaaccagcagaggcaataatctggcaaatgggcacaggcatgaaacccaacctcagccagattggcatgggaaaagaaatctcggacattcttctcttctgctgggcctttgaacaagaagagagacctaccttcaccaagctcatggacatgctggagaaactgccaaagcgaaaccgtcgcctgtctcaccctggacatttctggaagtctgcagagctgtgacctttggacatcgggacggcgcccagctgcctgggctcccgtcacctctccctccctactctgtcctctgccagctcaggaggccagagactcagcatcagagggtaccaaccccgaccgacctgggagcactggacaactgctcggcggcctccctgcacctcagacttgagcccttttcctcgggcagggttggggacccccgagctaggactgaaccggaccagccagggtgatgcgttattgatcagtgcggcccaggggacagcactaatgagagcactgcaggctgcacgtggtgcctttgggctatgggactaggacaggagaccccacgtgggggggctcacagacggggctatgtgtgtgtgtgtctgtgtgtttgacgttgttcactcttgtttccccttgacaagcaagagccagactgtcccaatgacggggcactcctcagttctgtctgtatgtggtaggttccagctgtaccatctgggaagctaagaggagggtacagagccgagtggcagcttagtcaaggctactgagccaagatcgagcagggaaggtcgggagtggctaagctcgttcctttggaaatatctgttttcagacaccccaacccgagcctgtcatggcgtgtggcacctttgcatagagctctgaagtacagtaggaaagttagaacgtcttttgagttctgggtctctctgggggacctattcccccatttctgctgttttctcctgttctctgagagtagcatcccttttcacctcactgcccgcacctccttgccatttggaaagccaagatgacttctgaggggctccttagagctcaccgtcattcagggcaccccctgaagtctggtccctgagaatcagggctctgggcagggagttctaggacattccttttcttccctcttctctgctactcacaccagtgaagcttattcccccaccaaggtggatgcgggttcttggggtacgtccatgttgggttatgtggctgtacctatgataacacgtttgcaaaagatttccctgcctgtcacccttgaggagtcctgttgggggagcacaaagggaggatgtttgttacacttctgcgttctttgctctagcctggtgcggggtcctcaagtagcttccccatcggaagcctgtgtccctcacctgtgtgtgttccctcagtgccccaccttccctccctcctcttgatcccaacctgggccggcgactcttcctgaccatgttggggaagcccctggtgttctgtatctgtaggaaggatgccgagagcaggctgggcatgcagatgggagaggagaacctctgggtcatttgcccatgttttcaaagccctgaccccctgcatgtgacctgatacaaaagggaaatctgtccccaagcagagcaatagcaggattatctgggcagtgaacaggaagcccagggcggccacagcccctctgtgtttcctgggtactacctgggccttagttttcttgtagctactatctatccaggcatctccctcctagagggccagagagaggaactggaacttcaaaaaccctacctgatcttactttcaaaatccaaatagacctatgaggatctcttccccaccttgggtgactcccagactggttcatgctctgggggccaaacctgcttccaaaccgggaagaatggtgagatcagtcatgcttcccaggagcctggctacaggaaacccctgtgtttcccaaagggccctcctgaattgcctttccaacactcccagcttactgggactagaggactaaagaccccggcttgggctgctcctaagcagacactgctcttctggggacatctatggctcttggcttgacgacgtgtgtgtgtcttggaggcattttatatatgtttgcctgagccccagccactctggggttgctggggatggctcttgtcaatggacacctccccatcccaacacaacactctgtgtcccagccctgggcctggacttgcacctgtcttggctctgcccagcagcctactgagtgcctgaaacccaaccactcacttctcttccatcacaccaggacttcttgggtccacaggctccagtccttgtcatgttcccttgtgccaagagacaggatatgaggaagggaagaggcagccagggtctactaccctgcagctgaaatgtccacaagaactggcaccttctcactcttgcctctcttgtttccagaattaactaaaatgtccaaccacagcctttggcaaggcctagcatgatctccaacagctgatttttccattcattcatgagcaccagtttgggattaaggacagggcctgagtgatccaggggaaaacccagccctttgtggaacagggtgccttgggtccatccctgaatctgagtcacttgctcttgacttctcgatctttccccacttcactactctgtccccacctgcattggtctctgctgcagccaggccaggatcctggccttcagtgccttcctgacgcccctaccctgtcccctctacaccgccctgacttgttgagaaaccagctttaatttgcacacatttaaatccaggaagaaccaaaccgctgctttccctgctggcttccatctttattcgctgatgaggttttgggaggaggttatattcatcttacgcagggaggaaaaaaaaagaggaaagaggctgtatatttttacatcataattaccagcctcacctgcaactcattctatacaatgacacgaccaagatttgtgtgtttgcccttgtcccatcacagctgcacacaggtgccctgtacacataagtcactgactcagcagcgagttgttccagtcagtcttgcttttagcaaaccgtcatatacatgggcttcccgaggggaccagtccacagggtgaagattcaccaggaagccttggctttgcagagagaaacatctcagctttctttaaagggcatgtggatttgcacataaatttcacccaactcttccaggatacagattattcataaaaccaaggagcttccttcttggccccctgtgggaggacgtgccccttgtgtccccatccccagagccaagctggaaacccaaagtcattgcttagatccattttgtcctggtattccttttactgatcaaagagaaaattttcatcttgccatggacccccccatcctcaccccatccacttgtctccacagctaccttggattgtcagtcaatagaagcccttgactgatattgaccactagacttttgtatccagggaacctagttcttccctttttctcacctcccatgccatatacacacatcatgcccctccccacaaacacacgaaaccagccttatctcaccttccaccattcccatccccacctacagctgatcatcaaaggtacacggaggaagtagtagacacggagctcaggccaatcattatcttgagaaatctaaacccagggctgtcaggctatgccccataggccatacccagcctgccaaatggtttttacatgttttaattgaggaaaaatcaaaagaataatatttcatgacatgaaaattctataacattcaaatttcatgtcaataaacaaaatgttattggagcacagtcacctctccatttacacaaccacggctgctcctatgcaactgtgacagagccagctatttgcaacagagacgatgtggcccacacagtcaaaaacttttacaatctggccctttcctaactttgctagcctttgatagagaggattggatatggctgtcaggggaggaacaggagcctttgatagagagggttggatatggctctcaggggaggaacaggaagttggagggggagagaacttgtttcagcggaagaaggccagcttgccccaagatgcagcgggctgcctccggaagtagagaactccctgtccttggatagggtggagcagatgttgactgcttggcctgtgtgatatggaggcaattcaggccctgaaggctggaccaactccctggactttaaaactcttcgtttgctaaggggggccataataacaaaatgtcacacactgagtggcttaaacaacacgaatttattcctcacaattcttgaggctggaagtcccaagatcaaggtgtcagcagggttggtttctggtgaggcctctttctttggcttgcagacagctgccctctgatcgtgacctcacgtggcctttcctctgtgactgcacatccccagtatctcctcctcttctgataaagacaacaatcttattagattagggttccaacgctctgtgattttattcccatccccggctttctttccccacactggttctcaatcttgagtcccgaaatatgccctccctatcctcatcctgtgcctaccttcacttcacccatccatcccctgcaggctggtcttgttccactgtgccaccatatccccaagcccccctcacctccgtgaggctcctaggactgctgcagcaaaccaccacccactggggcctacaacaacagatgtatcatctctcacccatctggatgccagaagtccaaaatcaaagtgttagcagggccatgttccccctgaaatctgtaagggaatccttcctggcggcttctgaattcctggtgctttcctggtcatcattggcattccttggcttgcagctgtgtcagtccaatccctgccctcatcatctctctgtgtgtccctatcttcatatggccatcttcttataaggacacgagtcacattggattaagggcccaccctatttcagtatgacctcatcttaactaattatatctgcaaagaccctctctccaaatgaagtctcattctgaggtactaggaatgaggacttcaacatgtctttttttttttttttttttttttgttggggacaccacaacttataacaccctctaagacattttctcttgtgccttgactggtcctccactgtagaacccaggtgcccttgaagatagattccccagaattcctggtctacaaggtcaggctgttgctgtcatgcttaccaagcttgccccaatcaacacgtcccatcactgaattccaacagctctggatctcagttctgtggctgtatgggaacagcctgtgtgtaagtggcttgtctgtagcggactgtcacttgacccctgaatgtgcctcatgaccctatccaaagcagttggtgacacagcatctgattttatctatactcttgttcattgacaaaggagtggattttgatgagctacattttgctgtttccttttttggctttgcctgtgatgtggggaagttcctaggcagactcatgtggccactctccctggctcccagcctcacctcctcccgtaccacctcaccctcacctgcacacacctgcaagggaatcactttgaactccaaggggagtgacaggcagcaaatgtcagtctgggtcctggaatgtggagccgcagtgaacctctgtcctctctggtcagtgcctgactatgatattaacccaaatcccagactcccttctcgaggccctgcaatccatacccattctgttaccagtttagttttgaaaccagtagtggggcaggaggttgatggaaaatctgcggtcccagtgacctcctggacttgtcttagtagtgcctggcacatagtaagtgctcaagaaatgtttacagaatgcagacagagaggtttgctgggtaagagtaagaccctggcacagggagttagaagggcaccattggcagggctggatggtattgggattcccctttgccagaccatgttgtgggtgccatatcaaccccaatgagtttgtttgttaggtttgttgttgtggtttagagttagagtcttgctctgtcacccaggctggagtacagcgtgatcatagctcactgcagcctcgaactcctggccacaagcaatcctcccaccttagcctctcaagttgctggtactacaggtgcacaccatcatgcctggctaattttttatttgttgtacagacagggtcttgctatgttgcccgcgctggtcttgaactcctggtctcaagcaatccccctgcttcagcctcccaaagcactgggattacagggctaagccattgtgctgagccagtttgccaggtttaatatctgtgacgtatgaagcgacccattgagtcaggtggcccaggatgtctaggaggcagagtaacaatccaccctgaacagccctcattcacagagcacttactacgtgccaggctggaattcctatgatggtttggggagatcagtagtcttattctcgttccaatggggcaactgtggtacagggacagaaaccagcctccaaattgcagacccagcattttaaaaacgagtctttgggctcatccattcccaggaacccacctccaggtcaaggggttcatgtccagctgctcatggggatgttacaatcccagcctctgagacttattggcaacttggaaccaggaaagagagagaggaaaagcaggaagttgtggaagggagggtgcaggggctggcagggaccatactgggagtttgcacggaagcttgaacttatgttctcaaactgacaggctgccagcagcagcccggatttccaggaaatgtacatctgggttggcagagtccctcctgggtccctccagtatccctgctccaggcttcctatcccctccgtctctcctgctggatgttgcactgtggtcccgtgttcctgagaggcgtacatcagtgagtgctcttccctctcaggggtgggaaagggcccttccttcccactcattgggatcatgcagctcccatttcctaacaccaagaatatgaaggattcatctcatggggttgagaatggctgtcctccttccactgaggactgagctggaggagatggactctgtctagaatgtgcctgatctaaataagaccttgtttcccaagcatgtcccatagacctttcattccatggaaaactcgccggatttgcattattgaaagggtcctgggacaagcatgcattggaaatgcttaggtaaaatgaaactaatttcttgattgcaggacttatcagaacttttaagacactattgtgtggttgaatctctaaatgcctgataggaggctgttcttcccaagctttcccaggcttgtttctgaatctccaacaaggtcaacctctgtgaatgagacttgataccttacctggtactgaaggaggcaatgtcaatgtactggcccacagaaaagagctgaccactagcattcatagacactgctaggagatgagaaaggtagcttagagcccgattccatccatgtggacagtggttccatgaacaagaacaccacatctggctgatggtgtcttccaatggaggggtcaaatctgctgtgtgttggtggcttctccaacataccatggcttggaggccaatgtgaaaagtatataagatgtaacaccctcagaagggttaagttttcacctgagttttcatcttcaaccaagtcattgggatggtgatctagaaggacctctaagatctagaaggataaagatctggtccaaggagtacaaatatgtaatggatctaccaccagtgtcccctgctgtactcttggcagacatcactaatccatcacagcatgccttcccactgatcacagatgtagcttcagggcattcgagttaccacttaagatggatatgagtgaccctcccttatctcactcttctcctttcacagaagcaggatctgaggcccagagagggaagctataataaactcccctaagtcaggtcccttctaagaggcagaggtaggtttagaactcaggcctcagaaacttccagaagccaagccatttgggctgtagttggtggacagtctatcagcgctctgcagatgtttcttctcagttagggaacttggaaaatgcagaaagaaagattctgtctctaagactctgtgtatgatcctactcggtaatctgcctgcttggagaaaaatcatttatcttctgggacggcttcaccacaaggcctgaatgctatgcccagtctagtaacagctgggctggaagtcacggcatatgggggccttaaggaataacagtgtgcgtggtggtgtgcaggagagctgcaagggcttttctttcttgaggaggtttgtaaaatttctgctgttcagtctgggcttctgggaagtcagggggtgctgcatataaagggcaggaaaaggagcctgactccaattgctctttggtttcttccctgaatggaaggctcaaaatcaagtttccacccagataagatcttgaggtcctagtggaccaccagctctactcctgagctcttgaaatacctctaatcaccagctcggtggctgagagtaccttcttgtccactgcctcttcttttccttctcgtcttcacttatcccccatccaacttctgcccgataatatctcccctgtattgtaaactgaggagaaagttgcacaattgtagagatgaaaaatagctgccatgtatttagcttaaattagctcagaagaaaggctccctccctccattgagcgggcagcacttgtttatgccaacatgctatttgcatcgcgccttcttaaatttgaaagtctaatgattaaaaacaaatcttagtttttcttttccaccacttaaaaaaaaaaaaccagcttggctagttcttctagtttaaaaataccctgacctccagcactacagtgagaattttggaaaggctggtaccaggatatcaggaggaaataaatacaggccaacaataaccagaggccttttctgagtggtgggcgacaggatgaacaaggtagaagagaggtctttgtgtcctcacacagatgctggcattctgggtttgtctggaattcagtgaacctctgtcctctctgacagagatttcttcaccaaccattcattcagtgggtgatttgttgagcatctactatgtgttagaccctgggcattcagtgatgagtgatacaatgtctcacctgttctgaagcctaaagcccaatggggaagagagacaagaagcaagtcaaccacaaatatataaatttgcaactcatgtagatctatggaaagaaaactcacgggggaccagaaacatgggagagggtatactgtgggagagctgctgacaaaggtctttctgaggaggtgacatttaagtcaagatctaaaggaagagaaggataaagagatgttcattctaagccagggtttctcaacctcagtactgttgagctatttggggccagataattctttgaggtggcgactgtcctgggcattggaggatgttaagcagcttcctcaactctccccacaagataccagtagcacctggtactggtgacatccaaaaacatccccagacacaccctgactttgctgtctggaatcaatcctcataaagccccaagccttggagcacagaggctggaagcccatatggtggcatgtcaggcatggtgtcacctgagcttctctgacccccacttctgatatggcatccagtttggagtctctgttctccatgagctcccatagctgtcccatattccacaaggcattgcttctgggccacggtcctctagttccagcatagccctatttttgggtatgttggtggatttcaaaagcctccagttgacatccaaagtgtgacatccaaaaccatctccagacattgccagatgtcccctgagttgtctccaggccacgcgactaggattcaaatccagcatcctgccatctgcaaccttccatgggagaaaggaaatcagaggagaacaggaaaacacaaggaggggactccttaagtgaacattgcagggaaataggtttttaaagcactagttagcatcaccagtggtttgaaggctgtctaggtaaggagaatgtggacttgcctttcaccgtctgcacggacaggggctgaaatctccagtcattctctccatccttccacagcccttctaagaagcagatcctcttgctgagctgaaatcttgagacttgcatccggcaatcttggtgttgctttctgaggctactcagggaaagcccttctgtattccccaggaaggaaagtctcccagatagtgaagggccttttctaccttccttgcaattcccagttcactgtgaagaagagagtcaggccgggttagaatggctgtctctggtagcaatgaagcaacaacatagacagtctggacaagatgtggcagttctgtccagtcccgtgtgactgatttgggcatggagacaggcagtgggtgaggatggcctctgtaggtccagctgttttacccctagaatcaaatccctggagcttccggcagtcccaggattgggaagggtaacagagaggacgagtcgggcactgcaaaagaccagatcttggaaaattgctttgggaattgggacaccttccaagaagacagttgagttggctggggctctgccctagatggggtcaacctctccccaacacagccctgcccaggttggggcattggcagcttaagtgcgtcctggacaacaaatgtaatgtattggtcctgtaagattctagccattttcctctgcttatttttctacatgtgttacaagtaataatgtttagatgggtacatatgaacttgtgtaagttcaagtaactgctatgtagctacagcatgggcatcaaggtactctaaggtacttgccctgccacaccgaggccccctgccccggccccctttccctcctagccagccttctagggagcactgcacaccctgccccttcaaagctatctggacagtcctggctcgactggagcattaagggaggggctgtccttggtcaggcttctgcccaactgtgtgatgcataaatctttgcctggctccttcttccttcttttcggaagtctatctcctcctgagggcctctgcggtcctaacctatcaaggaatatcatagattgtactccccaccccatcaaaacacaccctgactttgcgtctggaatcaatcctcataaagccccaaggcttggagcacagaggccagaagcccatatggtggcatgtcaggcatgctgtcacatgagcttctctgactccacttccaagatggcatccaatttggagtctctgttctccatgagctcccatagctgtcccatattccacaaggcactgcttctgggccccggtcctctagtttcctcatagccctatttttgggtacattggtggatttcaaatgcctacagttgagcagccgaaggattctaagaaaattttgcttgtatttcaaaggctcatgtccccagccccattcactacaccctcagcagagcccagcgtggagcaaccttgtcccttcattccccaaatcttcattttatatagtcatttagtaaatatttgttaagtgcctcctgtgattctggaaaaaatggagaaaagtgggtgctgccttcagggtactaggagtccgatgaagagagggaggagttccagtagggtcccgaggccccacaggagctcccaacccagagaaagaccctccaggaaggattctcagaggaggagacttctgaaccctgtcttgaaatttgagtagaatggtagggaacggtgtgtcagacagaaggaacagcctatgtgtggactcagaggcaagatcatgatttattgagggtaactgcaagtggctaaaatcctgccccctggcacttgcctgcctttccctgctttccccaaagcctgattttgggaccctggagtctccatctccaaacagagggtgccctggctcagatgtggagaccttgacttctttccccagcatgctctggttcctactgttagccttggtgtcctgtgggggaagatgtctgaggagagttttgtgcttgctggagtcagaccagtactcaggccacctcaggcctgctctgcatccctctctggctctacagacctctctctctctctctctctctctctctctctctctctgtctgtctgtctctgtgtctgtctctgtctctgcctgcctccacacagtgaaggatgtgtctctatttcttagtgccctgcattgggtcctgaagtccatgggcatcttggctatagatgggttggccatgagcccttctctctaatgcatttttcattcctgttcctcttttgcttcactttccctctatcgactcttgcgacctgtgtctctgatgtctctggggcccccagttctgtcttgccataccaaaaaaccttcttcagcaaaaaacctctttctgggacagttcatatcactctatgaataggcccctgaagtgttgaggtcaaggacatgtgtgaacgtggaaatgtatttatggaaagaccctacactgagggtctctaactaaacatttcaggtatgatgggcaaaatgctggtttgttacagaaatgactgaagaagacctaggggccatagtgggccacaggccaagcctgcaatacagcctgaagtgtgggaaagaatgtatcagtcctgttgatggagtggtgtgtttgctgtctctataaatatgtcagggtttgaaagacagaaaacaaagcatctttgctgaccgccagactcccagggtatatgtggctactgcaaattagcgaggcttgtttatctgcttcaacttgactcaatttgcatttcttgagccactgtctattgtggataatgatttcatcaacactttctcagcatcagcagcccctccagagtattccttgaattttcttagctttgtgcaacccacgagcacttaatatatcactaacccttgagtttattggagggagtgaatgaaataatgaatgtcaataacgttacgcaatacctggcacacagtaggtgcttcatcaatgtggcttttcttctcaatcacccaaatgaacctcccccagaatcccacctctagggggacattcctgaaaaataagggactagaatagcgaggtggtgggtgttacccatttatttagatatttgtgtcctggtgaacatggggagggatgcccaagtgtcataaggacaccccctccccccgtctacaaggcagaggtctcttaggatgtgagagagtctctggcaagaccagcccccaccccaccaaggccctcatagaaacagaacattcttcctccctatcccaaagcagaagttgactggggcagataaggcaagtcacattacatctgtgcccttgaccatacctggaccaggcagagaagatcccagacttaggtggtcaacgtttccaccccaagcctctcatttctcgctctctttgagacttgatcttgtaccaggatccactcgacagacttaacgcatgattaatttgattgattactcttgaagttactgaccttaggaaaattcctcaattgtaaaaaggctttctctatatgtaaattatgctgttatctttttctatacacaaagtatatagacctataaatattatacatatatattatatatataaagactaattcttgtacagaccaacgcggaccgatggtccatattcttttctccatgtttgtttgtgtcgactgttgcagagtgagttgatgtaagaaggtggtttcatgttttcttttggggggccacttctttcttttcctttccgtttctatctctgtctgtctccgtctctgtctctctctttctcacttgttgccaatgtcttgttgctgagaaggaacactctattcagatgccatccaggaaagaaaggccagatggatggagggtccactgtgtatatttgtacagaatcatttataaagttttctacacttctaaaaaaagtatttctaacttgggctgttggacagtttgtgtgcctctgagccagcaagcctgttgtttcttgtgtttagtgcaatgtttagtgagaaaccaatgtctgaattatttatgccaataaaaaatttgagaattactgcattgcactactgccaagacaggtctgaattctattgtt

SEQ ID NO: 15352 - DNA, 1382 bp, Homo sapiens
  source 1..1382: mol_type = unassigned DNA
agagccaagaagaagagcaaacccttgaacctcaagatccacagcagcgtaggcagctgcgagaacatcccctctcagcagcgctccccgctgctgtccgagcgctccctccgctccttctttgtgggacacgcacctttcctgccttccacccctcctgttcacactgaggccaacttctctgcaaacacactgtcagtgccacgctggtccccgcagatccctcgcagagatctcggcaactccatcaagcacaggttttccaccaagtactggatgtctcagacgtgcacagtctgtgggaaagggatgctttttggcctcaagtgtaaaaactgcaagttaaagtgccacaacaaatgcaccaaagaagccccaccctgtcatcttctgatcatccaccgaggagatccagcaaggttagtccggacagagtccgttccgtgtgacatcaacaaccctctacggaagccacctcgctattcagacctgcacatcagtcagacgctccccaaaaccaacaaaatcaacaaggaccacatccctgtcccttaccagccagactccagcagcaacccctcctccacgacgtcctccacgccctcctcgccagcaccccccctccctcctagtgccacgccgccttctcccctacacccttccccacagtgcacacggcagcagaagaacttcaacctgccagcatcccactactacaaatacaagcagcagttcatcttcccagatgtggtgccggtgccggagacgccgacccgggcgccccaggtcatcctgcatccggtgacctcgaatccaatcttggaaggaaatccattacttcaaattgaagtggagccaacgtcggagaatgaagaggtccatgatgaggccgaagagtcagaggatgacttcgaggagatgaacctgtccctcctctcggcccggagcttcccacgcaaggccagccagaccagcatcttccttcaggagtgggacatcccctttgagcagctggagatcggcgagctcattggaaagggccgctttgggcaagtgtaccacggccgctggcatggcgaggtggccatccggctgattgacattgagagggacaacgaggaccagctcaaggccttcaagcgggaggtgatggcctacaggcagacacggcatgagaacgtggtgcttttcatgggtgcctgcatgagcccgcctcacctggccatcatcaccaggccagtttgattgtcctaaatataacgtacaggagttggggggcctgagcacatgaagattccgtccccatcatcgagtggaagcggcttccttttatgttcaaaaagctgaatcgctttccctttataaagcacagctgaaaaggt

SEQ ID NO: 15353 - DNA, 4134 bp, Homo sapiens
  source 1..4134: mol_type = unassigned DNA
tcttcccggtctcctttcccggccgcacagggtagattttcgttccgtcacccaggctggagtgcagtggtgtgaccttggcttgctgcaaccctttgcctcctgggttcaagtgattctcattgcctcagcctcctaagtagctgggattacaggttttataggatcacattgacaaaagtaccatggagttttatgagtcagcatattttattgttcttattccttcaatagttattacagtaattttcctcttcttctggcttttcatgaaagaaacattatatgatgaagttcttgcaaaacagaaaagagaacaaaagcttattcctaccaaaacagataaaaagaaagcagaaaagaaaaagaataaaaagaaagaaatccagaatggaaacctccatgaatccgactctgagagtgtacctcgagactttaaattatcagatgctttggcagtagaagatgatcaagttgcacctgttccattgaatgtcgttgaaacttcaagtagtgttagggaaagaaaaaagaaggaaaagaaacaaaagcctgtgcttgaagagcaggtcatcaaagaaagtgacgcatcaaagattcctggcaaaaaagtagaacctgtcccagttactaaacagcccacccctccctctgaagcagctgcctcgaagaagaaaccagggcagaagaagtctaaaaatggaagcgatgaccaggataaaaaggtggaaactctcatggtaccatcaaaaaggcaagaagcattgcccctccaccaagagactaaacaagaaagtggatcagggaagaagaaagcttcatcaaagaaacaaaagacagaaaatgtcttcgtagatgaaccccttattcatgcaactacttatattcctttgatggataatgctgactcaagtcctgtggtagataagagagaggttattgatttgcttaaacctgaccaagtagaagggatccagaaatctgggactaaaaaactgaagaccgaaactgacaaagaaaatgctgaagtgaagtttaaagattttcttctgtccttgaagactatgatgttttctgaagatgaggctctttgtgttgtagacttgctaaaggagaagtctggtgtaatacaagatgctttaaagaagtcaagtaagggagaattgactacgcttatacatcagcttcaagaaaaggacaagttactcgctgctgtgaaggaagatgctgctgctacaaaggatcggtgtaagcagttaacccaggaaatgatgacagagaaagaaagaagcaatgtggttataacaaggatgaaagatcgaattggaacattagaaaaggaacataatgtatttcaaaacaaaatacatgtcagttatcaagagactcaacagatgcagatgaagtttcagcaagttcgtgagcagatggaggcagagatagctcacttgaagcaggaaaatggtatactgagagatgcagtcagcaacactacaaatcaactggaaagcaagcagtctgcagaactaaataaactacgccaggattatgctaggttggtgaatgagctgactgagaaaacaggaaagctacagcaagaggaagtccaaaagaagaatgctgagcaagcagctactcagttgaaggttcaactacaagaagctgagagaaggtgggaagaagttcagagctacatcaggaagagaacagcggaacatgaggcagcacagcaagatttacagagtaaatttgtggccaaagaaaatgaagtacagagtctgcatagtaagcttacagataccttggtatcaaaacaacagttggagcaaagactaatgcagttaatggaatcagagcagaaaagggtgaacaaagaagagtctctacaaatgcaggttcaggatattttggagcagaatgaggctttgaaagctcaaattcagcagttccattcccagatagcagcccagacctccgcttcagttctagcagaagaattacataaagtgattgcagaaaaggataagcagataaaacagactgaagattctttagcaagtgaacgtgatcgtttaacaagtaaagaagaggaacttaaggatatacagaatatgaatttcttattaaaagctgaagtgcagaaattacaggccctggcaaatgagcaggctgctgctgcacatgaattggagaagatgcaacaaagtgtttatgttaaagatgataaaataagattgctggaagagcaactacaacatgaaatttcaaacaaaatggaagaatttaagattctaaatgaccaaaacaaagcattaaaatcagaagttcagaagctacagactcttgtttctgaacagcctaataaggatgttgtggaacaaatggaaaaatgcattcaagaaaaagatgagaagttaaagactgtggaagaattacttgaaactggacttattcaggtggcaactaaagaagaggagctgaatgcaataagaacagaaaattcatctctgacaaaagaagttcaagacttaaaagctaagcaaaatgatcaggtttcttttgcctctctagttgaagaacttaagaaagtgatccatgagaaagatggaaagatcaagtctgtagaagagcttctggaggcagaacttctcaaagttgctaacaaggagaaaactgttcagttatctatcacttccaaagttcaggagcttcagaacttattaaaaggaaaagaggaacagatgaataccatgaaggctgttttggaagagaaagagaaagacctagccaatacagggaagtggttacaggatcttcaagaagaaaatgaatctttaaaagcacatgttcaggaagtagcacaacataacttgaaagaggcctcttctgcatcacagtttgaagaacttgagattgtgttgaaagaaaaggaaaatgaattgaagaggttagaagccatgctaaaagagagggagagtgatctttctagcaaaacacagctgttacaggatgtacaagatgaaaacaaattgtttaagtcccaaattgagcagcttaaacaacaaaactaccaacaggcatcttcttttccccctcatgaagaattattaaaagtaatttcagaaagagagaaagaaataagtggtctctggaatgagttagattctttgaaggatgcagttgaacaccagaggaagaaaaacaatgaccttcgggagaaaaactgggaagcaatggaagcattggcatcaactgaaaaaatgctgcaggacaaagtgaacaagacttccaaggaaaggcagcaacaggtggaagctgttgagttggaggctaaagaagttctcaaaaaattatttccaaaggtgtctgtcccttctaatttgagttatggtgaatggttgcatggatttgaaaaaaaggcaaaagaatgtatggctggaacttcagggtcagaggaggttaaggttctagagcacaagttgaaagaagctgatgaaatgcacacattgttacagctagagtgtgaaaaatacaaatccgtccttgcagaaacagaaggaattttacagaagctacagagaagtgttgagcaagaagaaaataaatggaaagttaaggtcgatgaatcacacaagactattaaacagatgcagtcatcatttacatcttcagaacaagagctagagcgattaagaagcgaaaataaggatattgaaaatctgagaagagaacgagaacatttggaaatggaactagaaaaggcagagatggaacgatctacctatgttacagaagtcagagagttgaaggcacagttaaatgaaacactcacaaaacttagaactgaacaaaatgaaagacagaaggtagctggtgatttgcataaggctcaacagtcactggagcttatccagtcaaaaatagtaaaagctgctggagacactactgttattgaaaatagtgatgtttccccagaaacggagtcttctgagaaggagacaatgtctgtaagtctaaatcagactgtaacacagttacagcagttgcttcaggcggtaaaccaacagctcacaaaggagaaagagcactaccaggtgttagagtgatcatcctctggcctaccttgacacatgc

SEQ ID NO: 15354 - DNA, 4252 bp, Homo sapiens
  source 1..4252: mol_type = unassigned DNA
gaagccgcccgtttcctgccgagcggcgcgacggcacctgagcgactgcggcggcggcggcggcggcggcggcgcctcggagcgggcggcccgggctgtagtgccggcgccgccgcgtcttcccggtctcctttcccggccgcacagggttttataggatcacattgacaaaagtaccatggagttttatgagtcagcatattttattgttcttattccttcaatagttattacagtaattttcctcttcttctggcttttcatgaaagaaacattatatgatgaagttcttgcaaaacagaaaagagaacaaaagcttattcctaccaaaacagataaaaagaaagcagaaaagaaaaagaataaaaagaaagaaatccagaatggaaacctccatgaatccgactctgagagtgtacctcgagactttaaattatcagatgctttggcagtagaagatgatcaagttgcacctgttccattgaatgtcgttgaaacttcaagtagtgttagggaaagaaaaaagaaggaaaagaaacaaaagcctgtgcttgaagagcaggtcatcaaagaaagtgacgcatcaaagattcctggcaaaaaagtagaacctgtcccagttactaaacagcccacccctccctctgaagcagctgcctcgaagaagaaaccagggcagaagaagtctaaaaatggaagcgatgaccaggataaaaaggtggaaactctcatggtaccatcaaaaaggcaagaagcattgcccctccaccaagagactaaacaagaaagtggatcagggaagaagaaagcttcatcaaagaaacaaaagacagaaaatgtcttcgtagatgaaccccttattcatgcaactacttatattcctttgatggataatgctgactcaagtcctgtggtagataagagagaggttattgatttgcttaaacctgaccaagtagaagggatccagaaatctgggactaaaaaactgaagaccgaaactgacaaagaaaatgctgaagtgaagtttaaagattttcttctgtccttgaagactatgatgttttctgaagatgaggctctttgtgttgtagacttgctaaaggagaagtctggtgtaatacaagatgctttaaagaagtcaagtaagggagaattgactacgcttatacatcagcttcaagaaaaggacaagttactcgctgctgtgaaggaagatgctgctgctacaaaggatcggtgtaagcagttaacccaggaaatgatgacagagaaagaaagaagcaatgtggttataacaaggatgaaagatcgaattggaacattagaaaaggaacataatgtatttcaaaacaaaatacatgtcagttatcaagagactcaacagatgcagatgaagtttcagcaagttcgtgagcagatggaggcagagatagctcacttgaagcaggaaaatggtatactgagagatgcagtcagcaacactacaaatcaactggaaagcaagcagtctgcagaactaaataaactacgccaggattatgctaggttggtgaatgagctgactgagaaaacaggaaagctacagcaagaggaagtccaaaagaagaatgctgagcaagcagctactcagttgaaggttcaactacaagaagctgagagaaggtgggaagaagttcagagctacatcaggaagagaacagcggaacatgaggcagcacagcaagatttacagagtaaatttgtggccaaagaaaatgaagtacagagtctgcatagtaagcttacagataccttggtatcaaaacaacagttggagcaaagactaatgcagttaatggaatcagagcagaaaagggtgaacaaagaagagtctctacaaatgcaggttcaggatattttggagcagaatgaggctttgaaagctcaaattcagcagttccattcccagatagcagcccagacctccgcttcagttctagcagaagaattacataaagtgattgcagaaaaggataagcagataaaacagactgaagattctttagcaagtgaacgtgatcgtttaacaagtaaagaagaggaacttaaggatatacagaatatgaatttcttattaaaagctgaagtgcagaaattacaggccctggcaaatgagcaggctgctgctgcacatgaattggagaagatgcaacaaagtgtttatgttaaagatgataaaataagattgctggaagagcaactacaacatgaaatttcaaacaaaatggaagaatttaagattctaaatgaccaaaacaaagcattaaaatcagaagttcagaagctacagactcttgtttctgaacagcctaataaggatgttgtggaacaaatggaaaaatgcattcaagaaaaagatgagaagttaaagactgtggaagaattacttgaaactggacttattcaggtggcaactaaagaagaggagctgaatgcaataagaacagaaaattcatctctgacaaaagaagttcaagacttaaaagctaagcaaaatgatcaggtttcttttgcctctctagttgaagaacttaagaaagtgatccatgagaaagatggaaagatcaagtctgtagaagagcttctggaggcagaacttctcaaagttgctaacaaggagaaaactgttcaggatttgaaacaggaaataaaggctctaaaagaagaaataggaaatgtccagcttgaaaaggctcaacagttatctatcacttccaaagttcaggagcttcagaacttattaaaaggaaaagaggaacagatgaataccatgaaggctgttttggaagagaaagagaaagacctagccaatacagggaagtggttacaggatcttcaagaagaaaatgaatctttaaaagcacatgttcaggaagtagcacaacataacttgaaagaggcctcttctgcatcacagtttgaagaacttgagattgtgttgaaagaaaaggaaaatgaattgaagaggttagaagccatgctaaaagagagggagagtgatctttctagcaaaacacagctgttacaggatgtacaagatgaaaacaaattgtttaagtcccaaattgagcagcttaaacaacaaaactaccaacaggcatcttcttttccccctcatgaagaattattaaaagtaatttcagaaagagagaaagaaataagtggtctctggaatgagttagattctttgaaggatgcagttgaacaccagaggaagaaaaacaatgaccttcgggagaaaaactgggaagcaatggaagcattggcatcaactgaaaaaatgctgcaggacaaagtgaacaagacttccaaggaaaggcagcaacaggtggaagctgttgagttggaggctaaagaagttctcaaaaaattatttccaaaggtgtctgtcccttctaatttgagttatggtgaatggttgcatggatttgaaaaaaaggcaaaagaatgtatggctggaacttcagggtcagaggaggttaaggttctagagcacaagttgaaagaagctgatgaaatgcacacattgttacagctagagtgtgaaaaatacaaatccgtccttgcagaaacagaaggaattttacagaagctacagagaagtgttgagcaagaagaaaataaatggaaagttaaggtcgatgaatcacacaagactattaaacagatgcagtcatcatttacatcttcagaacaagagctagagcgattaagaagcgaaaataaggatattgaaaatctgagaagagaacgagaacatttggaaatggaactagaaaaggcagagatggaacgatctacctatgttacagaagtcagagagctgaaagatctgttgactgaattgcagaaaaaacttgatgattcatattctgaagcagtaagacagaatgaagagctaaatttgttgaaggcacagttaaatgaaacactcacaaaacttagaactgaacaaaatgaaagacagaaggtagctggtgatttgcataaggctcaacagtcactggagcttatccagtcaaaaatagtaaaagctgctggagacactactgttattgaaaatagtgatgtttccccagaaacggagtcttctgagaaggagacaatgtctgtaagtctaaatcagactgtaacacagttacagcagttgcttcaggcggtaaaccaacagctcacaaaggagaaagagcactaccaggtgttagagtga

SEQ ID NO: 15355 - DNA, 4516 bp, Homo sapiens
  source 1..4516: mol_type = unassigned DNA
gtggtgtgaccttggcttgctgcaaccctttgcctcctgggttcaagtgattctcattgcctcagcctcctaagtagctgggattacaggttttataggatcacattgacaaaagtaccatggagttttatgagtcagcatattttattgttcttattccttcaatagttattacagtaattttcctcttcttctggcttttcatgaaagaaacattatatgatgaagttcttgcaaaacagaaaagagaacaaaagcttattcctaccaaaacagataaaaagaaagcagaaaagaaaaagaataaaaagaaagaaatccagaatggaaacctccatgaatccgactctgagagtgtacctcgagactttaaattatcagatgctttggcagtagaagatgatcaagttgcacctgttccattgaatgtcgttgaaacttcaagtagtgttagggaaagaaaaaagaaggaaaagaaacaaaagcctgtgcttgaagagcaggtcatcaaagaaagtgacgcatcaaagattcctggcaaaaaagtagaacctgtcccagttactaaacagcccacccctccctctgaagcagctgcctcgaagaagaaaccagggcagaagaagtctaaaaatggaagcgatgaccaggataaaaaggtggaaactctcatggtaccatcaaaaaggcaagaagcattgcccctccaccaagagactaaacaagaaagtggatcagggaagaagaaagcttcatcaaagaaacaaaagacagaaaatgtcttcgtagatgaaccccttattcatgcaactacttatattcctttgatggataatgctgactcaagtcctgtggtagataagagagaggttattgatttgcttaaacctgaccaagtagaagggatccagaaatctgggactaaaaaactgaagaccgaaactgacaaagaaaatgctgaagtgaagtttaaagattttcttctgtccttgaagactatgatgttttctgaagatgaggctctttgtgttgtagacttgctaaaggagaagtctggtgtaatacaagatgctttaaagaagtcaagtaagggagaattgactacgcttatacatcagcttcaagaaaaggacaagttactcgctgctgtgaaggaagatgctgctgctacaaaggatcggtgtaagcagttaacccaggaaatgatgacagagaaagaaagaagcaatgtggttataacaaggatgaaagatcgaattggaacattagaaaaggaacataatgtatttcaaaacaaaatacatgtcagttatcaagagactcaacagatgcagatgaagtttcagcaagttcgtgagcagatggaggcagagatagctcacttgaagcaggaaaatggtatactgagagatgcagtcagcaacactacaaatcaactggaaagcaagcagtctgcagaactaaataaactacgccaggattatgctaggttggtgaatgagctgactgagaaaacaggaaagctacagcaagaggaagtccaaaagaagaatgctgagcaagcagctactcagttgaaggttcaactacaagaagctgagagaaggtgggaagaagttcagagctacatcaggaagagaacagcggaacatgaggcagcacagcaagatttacagagtaaatttgtggccaaagaaaatgaagtacagagtctgcatagtaagcttacagataccttggtatcaaaacaacagttggagcaaagactaatgcagttaatggaatcagagcagaaaagggtgaacaaagaagagtctctacaaatgcaggttcaggatattttggagcagaatgaggctttgaaagctcaaattcagcagttccattcccagatagcagcccagacctccgcttcagttctagcagaagaattacataaagtgattgcagaaaaggataagcagataaaacagactgaagattctttagcaagtgaacgtgatcgtttaacaagtaaagaagaggaacttaaggatatacagaatatgaatttcttattaaaagctgaagtgcagaaattacaggccctggcaaatgagcaggctgctgctgcacatgaattggagaagatgcaacaaagtgtttatgttaaagatgataaaataagattgctggaagagcaactacaacatgaaatttcaaacaaaatggaagaatttaagattctaaatgaccaaaacaaagcattaaaatcagaagttcagaagctacagactcttgtttctgaacagcctaataaggatgttgtggaacaaatggaaaaatgcattcaagaaaaagatgagaagttaaagactgtggaagaattacttgaaactggacttattcaggtggcaactaaagaagaggagctgaatgcaataagaacagaaaattcatctctgacaaaagaagttcaagacttaaaagctaagcaaaatgatcaggtttcttttgcctctctagttgaagaacttaagaaagtgatccatgagaaagatggaaagatcaagtctgtagaagagcttctggaggcagaacttctcaaagttgctaacaaggagaaaactgttcagttatctatcacttccaaagttcaggagcttcagaacttattaaaaggaaaagaggaacagatgaataccatgaaggctgttttggaagagaaagagaaagacctagccaatacagggaagtggttacaggatcttcaagaagaaaatgaatctttaaaagcacatgttcaggaagtagcacaacataacttgaaagaggcctcttctgcatcacagtttgaagaacttgagattgtgttgaaagaaaaggaaaatgaattgaagaggttagaagccatgctaaaagagagggagagtgatctttctagcaaaacacagctgttacaggatgtacaagatgaaaacaaattgtttaagtcccaaattgagcagcttaaacaacaaaactaccaacaggcatcttcttttccccctcatgaagaattattaaaagtaatttcagaaagagagaaagaaataagtggtctctggaatgagttagattctttgaaggatgcagttgaacaccagaggaagaaaaacaatgaccttcgggagaaaaactgggaagcaatggaagcattggcatcaactgaaaaaatgctgcaggacaaagtgaacaagacttccaaggaaaggcagcaacaggtggaagctgttgagttggaggctaaagaagttctcaaaaaattatttccaaaggtgtctgtcccttctaatttgagttatggtgaatggttgcatggatttgaaaaaaaggcaaaagaatgtatggctggaacttcagggtcagaggaggttaaggttctagagcacaagttgaaagaagctgatgaaatgcacacattgttacagctagagtgtgaaaaatacaaatccgtccttgcagaaacagaaggaattttacagaagctacagagaagtgttgagcaagaagaaaataaatggaaagttaaggtcgatgaatcacacaagactattaaacagatgcagtcatcatttacatcttcagaacaagagctagagcgattaagaagcgaaaataaggatattgaaaatctgagaagagaacgagaacatttggaaatggaactagaaaaggcagagatggaacgatctacctatgttacagaagtcagagagttgaaggcacagttaaatgaaacactcacaaaacttagaactgaacaaaatgaaagacagaaggtagctggtgatttgcataaggctcaacagtcactggagcttatccagtcaaaaatagtaaaagctgctggagacactactgttattgaaaatagtgatgtttccccagaaacggagtcttctgagaaggagacaatgtctgtaagtctaaatcagactgtaacacagttacagcagttgcttcaggcggtaaaccaacagctcacaaaggagaaagagcactaccaggtgttagagtgaagtaattgggaaactgttcatttgaggataaaaaaggcattgtattatattttgccaaattaaagccttatttatgttttcaccctttctactttgtcagaaacactgaacagagttttgtcttttctaatccttgttagactactgatttaaagaaggaaaaaaaaaagccaactctgtagacaccttcagagtttagttttataataaaaactgtttgaataattagacctttacattcctgaagataaacatgtaatcttttatcttattttgctcaataaaattgttcagaagatcaaagtggtaaagacaatgtaaaatttaacattttaatactgatgttgtacactgttttacttaacattttgggaagtaactgcctctgacttcaactcaagaaaacacttttttgttgctaatgtaatcggtttttgtaatggcgtcagcaaataaaaggatgcttattattcaaa

SEQ ID NO: 15356 - DNA, 4618 bp, Homo sapiens
  source 1..4618: mol_type = unassigned DNA
cgccgcgtcttcccggtctcctttcccggccgcacagggttttataggatcacattgacaaaagtaccatggagttttatgagtcagcatattttattgttcttattccttcaatagttattacagtaattttcctcttcttctggcttttcatgaaagaaacattatatgatgaagttcttgcaaaacagaaaagagaacaaaagcttattcctaccaaaacagataaaaagaaagcagaaaagaaaaagaataaaaagaaagaaatccagaatggaaacctccatgaatccgactctgagagtgtacctcgagactttaaattatcagatgctttggcagtagaagatgatcaagttgcacctgttccattgaatgtcgttgaaacttcaagtagtgttagggaaagaaaaaagaaggaaaagaaacaaaagcctgtgcttgaagagcaggtcatcaaagaaagtgacgcatcaaagattcctggcaaaaaagtagaacctgtcccagttactaaacagcccacccctccctctgaagcagctgcctcgaagaagaaaccagggcagaagaagtctaaaaatggaagcgatgaccaggataaaaaggtggaaactctcatggtaccatcaaaaaggcaagaagcattgcccctccaccaagagactaaacaagaaagtggatcagggaagaagaaagcttcatcaaagaaacaaaagacagaaaatgtcttcgtagatgaaccccttattcatgcaactacttatattcctttgatggataatgctgactcaagtcctgtggtagataagagagaggttattgatttgcttaaacctgaccaagtagaagggatccagaaatctgggactaaaaaactgaagaccgaaactgacaaagaaaatgctgaagtgaagtttaaagattttcttctgtccttgaagactatgatgttttctgaagatgaggctctttgtgttgtagacttgctaaaggagaagtctggtgtaatacaagatgctttaaagaagtcaagtaagggagaattgactacgcttatacatcagcttcaagaaaaggacaagttactcgctgctgtgaaggaagatgctgctgctacaaaggatcggtgtaagcagttaacccaggaaatgatgacagagaaagaaagaagcaatgtggttataacaaggatgaaagatcgaattggaacattagaaaaggaacataatgtatttcaaaacaaaatacatgtcagttatcaagagactcaacagatgcagatgaagtttcagcaagttcgtgagcagatggaggcagagatagctcacttgaagcaggaaaatggtatactgagagatgcagtcagcaacactacaaatcaactggaaagcaagcagtctgcagaactaaataaactacgccaggattatgctaggttggtgaatgagctgactgagaaaacaggaaagctacagcaagaggaagtccaaaagaagaatgctgagcaagcagctactcagttgaaggttcaactacaagaagctgagagaaggtgggaagaagttcagagctacatcaggaagagaacagcggaacatgaggcagcacagcaagatttacagagtaaatttgtggccaaagaaaatgaagtacagagtctgcatagtaagcttacagataccttggtatcaaaacaacagttggagcaaagactaatgcagttaatggaatcagagcagaaaagggtgaacaaagaagagtctctacaaatgcaggttcaggatattttggagcagaatgaggctttgaaagctcaaattcagcagttccattcccagatagcagcccagacctccgcttcagttctagcagaagaattacataaagtgattgcagaaaaggataagcagataaaacagactgaagattctttagcaagtgaacgtgatcgtttaacaagtaaagaagaggaacttaaggatatacagaatatgaatttcttattaaaagctgaagtgcagaaattacaggccctggcaaatgagcaggctgctgctgcacatgaattggagaagatgcaacaaagtgtttatgttaaagatgataaaataagattgctggaagagcaactacaacatgaaatttcaaacaaaatggaagaatttaagattctaaatgaccaaaacaaagcattaaaatcagaagttcagaagctacagactcttgtttctgaacagcctaataaggatgttgtggaacaaatggaaaaatgcattcaagaaaaagatgagaagttaaagactgtggaagaattacttgaaactggacttattcaggtggcaactaaagaagaggagctgaatgcaataagaacagaaaattcatctctgacaaaagaagttcaagacttaaaagctaagcaaaatgatcaggtttcttttgcctctctagttgaagaacttaagaaagtgatccatgagaaagatggaaagatcaagtctgtagaagagcttctggaggcagaacttctcaaagttgctaacaaggagaaaactgttcaggatttgaaacaggaaataaaggctctaaaagaagaaataggaaatgtccagcttgaaaaggctcaacagttatctatcacttccaaagttcaggagcttcagaacttattaaaaggaaaagaggaacagatgaataccatgaaggctgttttggaagagaaagagaaagacctagccaatacagggaagtggttacaggatcttcaagaagaaaatgaatctttaaaagcacatgttcaggaagtagcacaacataacttgaaagaggcctcttctgcatcacagtttgaagaacttgagattgtgttgaaagaaaaggaaaatgaattgaagaggttagaagccatgctaaaagagagggagagtgatctttctagcaaaacacagctgttacaggatgtacaagatgaaaacaaattgtttaagtcccaaattgagcagcttaaacaacaaaactaccaacaggcatcttcttttccccctcatgaagaattattaaaagtaatttcagaaagagagaaagaaataagtggtctctggaatgagttagattctttgaaggatgcagttgaacaccagaggaagaaaaacaatgaccttcgggagaaaaactgggaagcaatggaagcattggcatcaactgaaaaaatgctgcaggacaaagtgaacaagacttccaaggaaaggcagcaacaggtggaagctgttgagttggaggctaaagaagttctcaaaaaattatttccaaaggtgtctgtcccttctaatttgagttatggtgaatggttgcatggatttgaaaaaaaggcaaaagaatgtatggctggaacttcagggtcagaggaggttaaggttctagagcacaagttgaaagaagctgatgaaatgcacacattgttacagctagagtgtgaaaaatacaaatccgtccttgcagaaacagaaggaattttacagaagctacagagaagtgttgagcaagaagaaaataaatggaaagttaaggtcgatgaatcacacaagactattaaacagatgcagtcatcatttacatcttcagaacaagagctagagcgattaagaagcgaaaataaggatattgaaaatctgagaagagaacgagaacatttggaaatggaactagaaaaggcagagatggaacgatctacctatgttacagaagtcagagagctgaaagatctgttgactgaattgcagaaaaaacttgatgattcatattctgaagcagtaagacagaatgaagagctaaatttgttgaaggcacagttaaatgaaacactcacaaaacttagaactgaacaaaatgaaagacagaaggtagctggtgatttgcataaggctcaacagtcactggagcttatccagtcaaaaatagtaaaagctgctggagacactactgttattgaaaatagtgatgtttccccagaaacggagtcttctgagaaggagacaatgtctgtaagtctaaatcagactgtaacacagttacagcagttgcttcaggcggtaaaccaacagctcacaaaggagaaagagcactaccaggtgttagagtgaagtaattgggaaactgttcatttgaggataaaaaaggcattgtattatattttgccaaattaaagccttatttatgttttcaccctttctactttgtcagaaacactgaacagagttttgtcttttctaatccttgttagactactgatttaaagaaggaaaaaaaaaagccaactctgtagacaccttcagagtttagttttataataaaaactgtttgaataattagacctttacattcctgaagataaacatgtaatcttttatcttattttgctcaataaaattgttcagaagatcaaagtggtaaagacaatgtaaaatttaacattttaatactgatgttgtacactgttttacttaacattttgggaagtaactgcctctgacttcaactcaagaaaacacttttttgttgctaatgtaatcggtttttgtaatggcgtcagcaaataaaaggatgcttattattcaaa

SEQ ID NO: 15357 - DNA, 4579 bp, Homo sapiens
  source 1..4579: mol_type = unassigned DNA
gaagccgcccgtttcctgccgagcggcgcgacggcacctgagcgactgcggcggcggcggcggcggcggcggcgcctcggagcgggcggcccgggctgtagtgccggcgccgccgcgtcttcccggtctcctttcccggccgcacagggttttataggatcacattgacaaaagtaccatggagttttatgagtcagcatattttattgttcttattccttcaatagttattacagtaattttcctcttcttctggcttttcatgaaagaaacattatatgatgaagttcttgcaaaacagaaaagagaacaaaagcttattcctaccaaaacagataaaaagaaagcagaaaagaaaaagaataaaaagaaagaaatccagaatggaaacctccatgaatccgactctgagagtgtacctcgagactttaaattatcagatgctttggcagtagaagatgatcaagttgcacctgttccattgaatgtcgttgaaacttcaagtagtgttagggaaagaaaaaagaaggaaaagaaacaaaagcctgtgcttgaagagcaggtcatcaaagaaagtgacgcatcaaagattcctggcaaaaaagtagaacctgtcccagttactaaacagcccacccctccctctgaagcagctgcctcgaagaagaaaccagggcagaagaagtctaaaaatggaagcgatgaccaggataaaaaggtggaaactctcatggtaccatcaaaaaggcaagaagcattgcccctccaccaagagactaaacaagaaagtggatcagggaagaagaaagcttcatcaaagaaacaaaagacagaaaatgtcttcgtagatgaaccccttattcatgcaactacttatattcctttgatggataatgctgactcaagtcctgtggtagataagagagaggttattgatttgcttaaacctgaccaagtagaagggatccagaaatctgggactaaaaaactgaagaccgaaactgacaaagaaaatgctgaagtgaagtttaaagattttcttctgtccttgaagactatgatgttttctgaagatgaggctctttgtgttgtagacttgctaaaggagaagtctggtgtaatacaagatgctttaaagaagtcaagtaagggagaattgactacgcttatacatcagcttcaagaaaaggacaagttactcgctgctgtgaaggaagatgctgctgctacaaaggatcggtgtaagcagttaacccaggaaatgatgacagagaaagaaagaagcaatgtggttataacaaggatgaaagatcgaattggaacattagaaaaggaacataatgtatttcaaaacaaaatacatgtcagttatcaagagactcaacagatgcagatgaagtttcagcaagttcgtgagcagatggaggcagagatagctcacttgaagcaggaaaatggtatactgagagatgcagtcagcaacactacaaatcaactggaaagcaagcagtctgcagaactaaataaactacgccaggattatgctaggttggtgaatgagctgactgagaaaacaggaaagctacagcaagaggaagtccaaaagaagaatgctgagcaagcagctactcagttgaaggttcaactacaagaagctgagagaaggtgggaagaagttcagagctacatcaggaagagaacagcggaacatgaggcagcacagcaagatttacagagtaaatttgtggccaaagaaaatgaagtacagagtctgcatagtaagcttacagataccttggtatcaaaacaacagttggagcaaagactaatgcagttaatggaatcagagcagaaaagggtgaacaaagaagagtctctacaaatgcaggttcaggatattttggagcagaatgaggctttgaaagctcaaattcagcagttccattcccagatagcagcccagacctccgcttcagttctagcagaagaattacataaagtgattgcagaaaaggataagcagataaaacagactgaagattctttagcaagtgaacgtgatcgtttaacaagtaaagaagaggaacttaaggatatacagaatatgaatttcttattaaaagctgaagtgcagaaattacaggccctggcaaatgagcaggctgctgctgcacatgaattggagaagatgcaacaaagtgtttatgttaaagatgataaaataagattgctggaagagcaactacaacatgaaatttcaaacaaaatggaagaatttaagattctaaatgaccaaaacaaagcattaaaatcagaagttcagaagctacagactcttgtttctgaacagcctaataaggatgttgtggaacaaatggaaaaatgcattcaagaaaaagatgagaagttaaagactgtggaagaattacttgaaactggacttattcaggtggcaactaaagaagaggagctgaatgcaataagaacagaaaattcatctctgacaaaagaagttcaagacttaaaagctaagcaaaatgatcaggtttcttttgcctctctagttgaagaacttaagaaagtgatccatgagaaagatggaaagatcaagtctgtagaagagcttctggaggcagaacttctcaaagttgctaacaaggagaaaactgttcagttatctatcacttccaaagttcaggagcttcagaacttattaaaaggaaaagaggaacagatgaataccatgaaggctgttttggaagagaaagagaaagacctagccaatacagggaagtggttacaggatcttcaagaagaaaatgaatctttaaaagcacatgttcaggaagtagcacaacataacttgaaagaggcctcttctgcatcacagtttgaagaacttgagattgtgttgaaagaaaaggaaaatgaattgaagaggttagaagccatgctaaaagagagggagagtgatctttctagcaaaacacagctgttacaggatgtacaagatgaaaacaaattgtttaagtcccaaattgagcagcttaaacaacaaaactaccaacaggcatcttcttttccccctcatgaagaattattaaaagtaatttcagaaagagagaaagaaataagtggtctctggaatgagttagattctttgaaggatgcagttgaacaccagaggaagaaaaacaatgaccttcgggagaaaaactgggaagcaatggaagcattggcatcaactgaaaaaatgctgcaggacaaagtgaacaagacttccaaggaaaggcagcaacaggtggaagctgttgagttggaggctaaagaagttctcaaaaaattatttccaaaggtgtctgtcccttctaatttgagttatggtgaatggttgcatggatttgaaaaaaaggcaaaagaatgtatggctggaacttcagggtcagaggaggttaaggttctagagcacaagttgaaagaagctgatgaaatgcacacattgttacagctagagtgtgaaaaatacaaatccgtccttgcagaaacagaaggaattttacagaagctacagagaagtgttgagcaagaagaaaataaatggaaagttaaggtcgatgaatcacacaagactattaaacagatgcagtcatcatttacatcttcagaacaagagctagagcgattaagaagcgaaaataaggatattgaaaatctgagaagagaacgagaacatttggaaatggaactagaaaaggcagagatggaacgatctacctatgttacagaagtcagagagttgaaggcacagttaaatgaaacactcacaaaacttagaactgaacaaaatgaaagacagaaggtagctggtgatttgcataaggctcaacagtcactggagcttatccagtcaaaaatagtaaaagctgctggagacactactgttattgaaaatagtgatgtttccccagaaacggagtcttctgagaaggagacaatgtctgtaagtctaaatcagactgtaacacagttacagcagttgcttcaggcggtaaaccaacagctcacaaaggagaaagagcactaccaggtgttagagtgaagtaattgggaaactgttcatttgaggataaaaaaggcattgtattatattttgccaaattaaagccttatttatgttttcaccctttctactttgtcagaaacactgaacagagttttgtcttttctaatccttgttagactactgatttaaagaaggaaaaaaaaaagccaactctgtagacaccttcagagtttagttttataataaaaactgtttgaataattagacctttacattcctgaagataaacatgtaatcttttatcttattttgctcaataaaattgttcagaagatcaaagtggtaaagacaatgtaaaatttaacattttaatactgatgttgtacactgttttacttaacattttgggaagtaactgcctctgacttcaactcaagaaaacacttttttgttgctaatgtaatcggtttttgtaatggcgtcagcaaataaaaggatgcttattattcaaacttg

SEQ ID NO: 15358 - DNA, 4682 bp, Homo sapiens
  source 1..4682: mol_type = unassigned DNA
ggttctttttttttttttgtccccaccttcttccctatttaggttttataggatcacattgacaaaagtaccatggagttttatgagtcagcatattttattgttcttattccttcaatagttattacagtaattttcctcttcttctggcttttcatgaaagaaacattatatgatgaagttcttgcaaaacagaaaagagaacaaaagcttattcctaccaaaacagataaaaagaaagcagaaaagaaaaagaataaaaagaaagaaatccagaatggaaacctccatgaatccgactctgagagtgtacctcgagactttaaattatcagatgctttggcagtagaagatgatcaagttgcacctgttccattgaatgtcgttgaaacttcaagtagtgttagggaaagaaaaaagaaggaaaagaaacaaaagcctgtgcttgaagagcaggtcatcaaagaaagtgacgcatcaaagattcctggcaaaaaagtagaacctgtcccagttactaaacagcccacccctccctctgaagcagctgcctcgaagaagaaaccagggcagaagaagtctaaaaatggaagcgatgaccaggataaaaaggtggaaactctcatggtaccatcaaaaaggcaagaagcattgcccctccaccaagagactaaacaagaaagtggatcagggaagaagaaagcttcatcaaagaaacaaaagacagaaaatgtcttcgtagatgaaccccttattcatgcaactacttatattcctttgatggataatgctgactcaagtcctgtggtagataagagagaggttattgatttgcttaaacctgaccaagtagaagggatccagaaatctgggactaaaaaactgaagaccgaaactgacaaagaaaatgctgaagtgaagtttaaagattttcttctgtccttgaagactatgatgttttctgaagatgaggctctttgtgttgtagacttgctaaaggagaagtctggtgtaatacaagatgctttaaagaagtcaagtaagggagaattgactacgcttatacatcagcttcaagaaaaggacaagttactcgctgctgtgaaggaagatgctgctgctacaaaggatcggtgtaagcagttaacccaggaaatgatgacagagaaagaaagaagcaatgtggttataacaaggatgaaagatcgaattggaacattagaaaaggaacataatgtatttcaaaacaaaatacatgtcagttatcaagagactcaacagatgcagatgaagtttcagcaagttcgtgagcagatggaggcagagatagctcacttgaagcaggaaaatggtatactgagagatgcagtcagcaacactacaaatcaactggaaagcaagcagtctgcagaactaaataaactacgccaggattatgctaggttggtgaatgagctgactgagaaaacaggaaagctacagcaagaggaagtccaaaagaagaatgctgagcaagcagctactcagttgaaggttcaactacaagaagctgagagaaggtgggaagaagttcagagctacatcaggaagagaacagcggaacatgaggcagcacagcaagatttacagagtaaatttgtggccaaagaaaatgaagtacagagtctgcatagtaagcttacagataccttggtatcaaaacaacagttggagcaaagactaatgcagttaatggaatcagagcagaaaagggtgaacaaagaagagtctctacaaatgcaggttcaggatattttggagcagaatgaggctttgaaagctcaaattcagcagttccattcccagatagcagcccagacctccgcttcagttctagcagaagaattacataaagtgattgcagaaaaggataagcagataaaacagactgaagattctttagcaagtgaacgtgatcgtttaacaagtaaagaagaggaacttaaggatatacagaatatgaatttcttattaaaagctgaagtgcagaaattacaggccctggcaaatgagcaggctgctgctgcacatgaattggagaagatgcaacaaagtgtttatgttaaagatgataaaataagattgctggaagagcaactacaacatgaaatttcaaacaaaatggaagaatttaagattctaaatgaccaaaacaaagcattaaaatcagaagttcagaagctacagactcttgtttctgaacagcctaataaggatgttgtggaacaaatggaaaaatgcattcaagaaaaagatgagaagttaaagactgtggaagaattacttgaaactggacttattcaggtggcaactaaagaagaggagctgaatgcaataagaacagaaaattcatctctgacaaaagaagttcaagacttaaaagctaagcaaaatgatcaggtttcttttgcctctctagttgaagaacttaagaaagtgatccatgagaaagatggaaagatcaagtctgtagaagagcttctggaggcagaacttctcaaagttgctaacaaggagaaaactgttcaggatttgaaacaggaaataaaggctctaaaagaagaaataggaaatgtccagcttgaaaaggctcaacagttatctatcacttccaaagttcaggagcttcagaacttattaaaaggaaaagaggaacagatgaataccatgaaggctgttttggaagagaaagagaaagacctagccaatacagggaagtggttacaggatcttcaagaagaaaatgaatctttaaaagcacatgttcaggaagtagcacaacataacttgaaagaggcctcttctgcatcacagtttgaagaacttgagattgtgttgaaagaaaaggaaaatgaattgaagaggttagaagccatgctaaaagagagggagagtgatctttctagcaaaacacagctgttacaggatgtacaagatgaaaacaaattgtttaagtcccaaattgagcagcttaaacaacaaaactaccaacaggcatcttcttttccccctcatgaagaattattaaaagtaatttcagaaagagagaaagaaataagtggtctctggaatgagttagattctttgaaggatgcagttgaacaccagaggaagaaaaacaatgaccttcgggagaaaaactgggaagcaatggaagcattggcatcaactgaaaaaatgctgcaggacaaagtgaacaagacttccaaggaaaggcagcaacaggtggaagctgttgagttggaggctaaagaagttctcaaaaaattatttccaaaggtgtctgtcccttctaatttgagttatggtgaatggttgcatggatttgaaaaaaaggcaaaagaatgtatggctggaacttcagggtcagaggaggttaaggttctagagcacaagttgaaagaagctgatgaaatgcacacattgttacagctagagtgtgaaaaatacaaatccgtccttgcagaaacagaaggaattttacagaagctacagagaagtgttgagcaagaagaaaataaatggaaagttaaggtcgatgaatcacacaagactattaaacagatgcagtcatcatttacatcttcagaacaagagctagagcgattaagaagcgaaaataaggatattgaaaatctgagaagagaacgagaacatttggaaatggaactagaaaaggcagagatggaacgatctacctatgttacagaagtcagagagctgaaagatctgttgactgaattgcagaaaaaacttgatgattcatattctgaagcagtaagacagaatgaagagctaaatttgttgaaggcacagttaaatgaaacactcacaaaacttagaactgaacaaaatgaaagacagaaggtagctggtgatttgcataaggctcaacagtcactggagcttatccagtcaaaaatagtaaaagctgctggagacactactgttattgaaaatagtgatgtttccccagaaacggagtcttctgagaaggagacaatgtctgtaagtctaaatcagactgtaacacagttacagcagttgcttcaggcggtaaaccaacagctcacaaaggagaaagagcactaccaggtgttagagtgatcatcctctggcctaccttgacacatgctctccttcaaaatgctaattcagagtgaagtaattgggaaactgttcatttgaggataaaaaaggcattgtattatattttgccaaattaaagccttatttatgttttcaccctttctactttgtcagaaacactgaacagagttttgtcttttctaatccttgttagactactgatttaaagaaggaaaaaaaaaagccaactctgtagacaccttcagagtttagttttataataaaaactgtttgaataattagacctttacattcctgaagataaacatgtaatcttttatcttattttgctcaataaaattgttcagaagatcaaagtggtaaagacaatgtaaaatttaacattttaatactgatgttgtacactgttttacttaacattttgggaagtaactgcctctgacttcaactcaagaaaacacttttttgttgctaatgtaatcggtttttgtaatggcgtcagcaaataaaaggatgcttattattcaaacttg

SEQ ID NO: 15359 - DNA, 4449 bp, Homo sapiens
  source 1..4449: mol_type = unassigned DNA
gccgccgcgtcttcccggtctcctttcccggccgcacagggttttataggatcacattgacaaaagtaccatggagttttatgagtcagcatattttattgttcttattccttcaatagttattacagtaattttcctcttcttctggcttttcatgaaagaaacattatatgatgaagttcttgcaaaacagaaaagagaacaaaagcttattcctaccaaaacagataaaaagaaagcagaaaagaaaaagaataaaaagaaagaaatccagaatggaaacctccatgaatccgactctgagagtgtacctcgagactttaaattatcagatgctttggcagtagaagatgatcaagttgcacctgttccattgaatgtcgttgaaacttcaagtagtgttagggaaagaaaaaagaaggaaaagaaacaaaagcctgtgcttgaagagcaggtcatcaaagaaagtgacgcatcaaagattcctggcaaaaaagtagaacctgtcccagttactaaacagcccacccctccctctgaagcagctgcctcgaagaagaaaccagggcagaagaagtctaaaaatggaagcgatgaccaggataaaaaggtggaaactctcatggtaccatcaaaaaggcaagaagcattgcccctccaccaagagactaaacaagaaagtggatcagggaagaagaaagcttcatcaaagaaacaaaagacagaaaatgtcttcgtagatgaaccccttattcatgcaactacttatattcctttgatggataatgctgactcaagtcctgtggtagataagagagaggttattgatttgcttaaacctgaccaagtagaagggatccagaaatctgggactaaaaaactgaagaccgaaactgacaaagaaaatgctgaagtgaagtttaaagattttcttctgtccttgaagactatgatgttttctgaagatgaggctctttgtgttgtagacttgctaaaggagaagtctggtgtaatacaagatgctttaaagaagtcaagtaagggagaattgactacgcttatacatcagcttcaagaaaaggacaagttactcgctgctgtgaaggaagatgctgctgctacaaaggatcggtgtaagcagttaacccaggaaatgatgacagagaaagaaagaagcaatgtggttataacaaggatgaaagatcgaattggaacattagaaaaggaacataatgtatttcaaaacaaaatacatgtcagttatcaagagactcaacagatgcagatgaagtttcagcaagttcgtgagcagatggaggcagagatagctcacttgaagcaggaaaatggtatactgagagatgcagtcagcaacactacaaatcaactggaaagcaagcagtctgcagaactaaataaactacgccaggattatgctaggttggtgaatgagctgactgagaaaacaggaaagctacagcaagaggaagtccaaaagaagaatgctgagcaagcagctactcagttgaaggttcaactacaagaagctgagagaaggtgggaagaagttcagagctacatcaggaagagaacagcggaacatgaggcagcacagcaagatttacagagtaaatttgtggccaaagaaaatgaagtacagagtctgcatagtaagcttacagataccttggtatcaaaacaacagttggagcaaagactaatgcagttaatggaatcagagcagaaaagggtgaacaaagaagagtctctacaaatgcaggttcaggatattttggagcagaatgaggctttgaaagctcaaattcagcagttccattcccagatagcagcccagacctccgcttcagttctagcagaagaattacataaagtgattgcagaaaaggataagcagataaaacagactgaagattctttagcaagtgaacgtgatcgtttaacaagtaaagaagaggaacttaaggatatacagaatatgaatttcttattaaaagctgaagtgcagaaattacaggccctggcaaatgagcaggctgctgctgcacatgaattggagaagatgcaacaaagtgtttatgttaaagatgataaaataagattgctggaagagcaactacaacatgaaatttcaaacaaaatggaagaatttaagattctaaatgaccaaaacaaagcattaaaatcagaagttcagaagctacagactcttgtttctgaacagcctaataaggatgttgtggaacaaatggaaaaatgcattcaagaaaaagatgagaagttaaagactgtggaagaattacttgaaactggacttattcaggtggcaactaaagaagaggagctgaatgcaataagaacagaaaattcatctctgacaaaagaagttcaagacttaaaagctaagcaaaatgatcaggtttcttttgcctctctagttgaagaacttaagaaagtgatccatgagaaagatggaaagatcaagtctgtagaagagcttctggaggcagaacttctcaaagttgctaacaaggagaaaactgttcaggatttgaaacaggaaataaaggctctaaaagaagaaataggaaatgtccagcttgaaaaggctcaacagttatctatcacttccaaagttcaggagcttcagaacttattaaaaggaaaagaggaacagatgaataccatgaaggctgttttggaagagaaagagaaagacctagccaatacagggaagtggttacaggatcttcaagaagaaaatgaatctttaaaagcacatgttcaggaagtagcacaacataacttgaaagaggcctcttctgcatcacagtttgaagaacttgagattgtgttgaaagaaaaggaaaatgaattgaagaggttagaagccatgctaaaagagagggagagtgatctttctagcaaaacacagctgttacaggatgtacaagatgaaaacaaattgtttaagtcccaaattgagcagcttaaacaacaaaactaccaacaggcatcttcttttccccctcatgaagaattattaaaagtaatttcagaaagagagaaagaaataagtggtctctggaatgagttagattctttgaaggatgcagttgaacaccagaggaagaaaaacaatgaaaggcagcaacaggtggaagctgttgagttggaggctaaagaagttctcaaaaaattatttccaaaggtgtctgtcccttctaatttgagttatggtgaatggttgcatggatttgaaaaaaaggcaaaagaatgtatggctggaacttcagggtcagaggaggttaaggttctagagcacaagttgaaagaagctgatgaaatgcacacattgttacagctagagtgtgaaaaatacaaatccgtccttgcagaaacagaaggaattttacagaagctacagagaagtgttgagcaagaagaaaataaatggaaagttaaggtcgatgaatcacacaagactattaaacagatgcagtcatcatttacatcttcagaacaagagctagagcgattaagaagcgaaaataaggatattgaaaatctgagaagagaacgagaacatttggaaatggaactagaaaaggcagagatggaacgatctacctatgttacagaagtcagagagttgaaggcacagttaaatgaaacactcacaaaacttagaactgaacaaaatgaaagacagaaggtagctggtgatttgcataaggctcaacagtcactggagcttatccagtcaaaaatagtaaaagctgctggagacactactgttattgaaaatagtgatgtttccccagaaacggagtcttctgagaaggagacaatgtctgtaagtctaaatcagactgtaacacagttacagcagttgcttcaggcggtaaaccaacagctcacaaaggagaaagagcactaccaggtgttagagtgaagtaattgggaaactgttcatttgaggataaaaaaggcattgtattatattttgccaaattaaagccttatttatgttttcaccctttctactttgtcagaaacactgaacagagttttgtcttttctaatccttgttagactactgatttaaagaaggaaaaaaaaaagccaactctgtagacaccttcagagtttagttttataataaaaactgtttgaataattagacctttacattcctgaagataaacatgtaatcttttatcttattttgctcaataaaattgttcagaagatcaaagtggtaaagacaatgtaaaatttaacattttaatactgatgttgtacactgttttacttaacattttgggaagtaactgcctctgacttcaactcaagaaaacacttttttgttgctaatgtaatcggtttttgtaatggcgtcagcaaataaaaggatgcttattattcaaa

SEQ ID NO: 15360 - DNA, 4793 bp, Homo sapiens
  source 1..4793: mol_type = unassigned DNA
cgtcttcccggtctcctttcccggccgcacagggtagattttcgttccgtcacccaggctggagtgcagtggtgtgaccttggcttgctgcaaccctttgcctcctgggttcaagtgattctcattgcctcagcctcctaagtagctgggattacaggttttataggatcacattgacaaaagtaccatggagttttatgagtcagcatattttattgttcttattccttcaatagttattacagtaattttcctcttcttctggcttttcatgaaagaaacattatatgatgaagttcttgcaaaacagaaaagagaacaaaagcttattcctaccaaaacagataaaaagaaagcagaaaagaaaaagaataaaaagaaagaaatccagaatggaaacctccatgaatccgactctgagagtgtacctcgagactttaaattatcagatgctttggcagtagaagatgatcaagttgcacctgttccattgaatgtcgttgaaacttcaagtagtgttagggaaagaaaaaagaaggaaaagaaacaaaagcctgtgcttgaagagcaggtcatcaaagaaagtgacgcatcaaagattcctggcaaaaaagtagaacctgtcccagttactaaacagcccacccctccctctgaagcagctgcctcgaagaagaaaccagggcagaagaagtctaaaaatggaagcgatgaccaggataaaaaggtggaaactctcatggtaccatcaaaaaggcaagaagcattgcccctccaccaagagactaaacaagaaagtggatcagggaagaagaaagcttcatcaaagaaacaaaagacagaaaatgtcttcgtagatgaaccccttattcatgcaactacttatattcctttgatggataatgctgactcaagtcctgtggtagataagagagaggttattgatttgcttaaacctgaccaagtagaagggatccagaaatctgggactaaaaaactgaagaccgaaactgacaaagaaaatgctgaagtgaagtttaaagattttcttctgtccttgaagactatgatgttttctgaagatgaggctctttgtgttgtagacttgctaaaggagaagtctggtgtaatacaagatgctttaaagaagtcaagtaagggagaattgactacgcttatacatcagcttcaagaaaaggacaagttactcgctgctgtgaaggaagatgctgctgctacaaaggatcggtgtaagcagttaacccaggaaatgatgacagagaaagaaagaagcaatgtggttataacaaggatgaaagatcgaattggaacattagaaaaggaacataatgtatttcaaaacaaaatacatgtcagttatcaagagactcaacagatgcagatgaagtttcagcaagttcgtgagcagatggaggcagagatagctcacttgaagcaggaaaatggtatactgagagatgcagtcagcaacactacaaatcaactggaaagcaagcagtctgcagaactaaataaactacgccaggattatgctaggttggtgaatgagctgactgagaaaacaggaaagctacagcaagaggaagtccaaaagaagaatgctgagcaagcagctactcagttgaaggttcaactacaagaagctgagagaaggtgggaagaagttcagagctacatcaggaagagaacagcggaacatgaggcagcacagcaagatttacagagtaaatttgtggccaaagaaaatgaagtacagagtctgcatagtaagcttacagataccttggtatcaaaacaacagttggagcaaagactaatgcagttaatggaatcagagcagaaaagggtgaacaaagaagagtctctacaaatgcaggttcaggatattttggagcagaatgaggctttgaaagctcaaattcagcagttccattcccagatagcagcccagacctccgcttcagttctagcagaagaattacataaagtgattgcagaaaaggataagcagataaaacagactgaagattctttagcaagtgaacgtgatcgtttaacaagtaaagaagaggaacttaaggatatacagaatatgaatttcttattaaaagctgaagtgcagaaattacaggccctggcaaatgagcaggctgctgctgcacatgaattggagaagatgcaacaaagtgtttatgttaaagatgataaaataagattgctggaagagcaactacaacatgaaatttcaaacaaaatggaagaatttaagattctaaatgaccaaaacaaagcattaaaatcagaagttcagaagctacagactcttgtttctgaacagcctaataaggatgttgtggaacaaatggaaaaatgcattcaagaaaaagatgagaagttaaagactgtggaagaattacttgaaactggacttattcaggtggcaactaaagaagaggagctgaatgcaataagaacagaaaattcatctctgacaaaagaagttcaagacttaaaagctaagcaaaatgatcaggtttcttttgcctctctagttgaagaacttaagaaagtgatccatgagaaagatggaaagatcaagtctgtagaagagcttctggaggcagaacttctcaaagttgctaacaaggagaaaactgttcaggatttgaaacaggaaataaaggctctaaaagaagaaataggaaatgtccagcttgaaaaggctcaacagttatctatcacttccaaagttcaggagcttcagaacttattaaaaggaaaagaggaacagatgaataccatgaaggctgttttggaagagaaagagaaagacctagccaatacagggaagtggttacaggatcttcaagaagaaaatgaatctttaaaagcacatgttcaggaagtagcacaacataacttgaaagaggcctcttctgcatcacagtttgaagaacttgagattgtgttgaaagaaaaggaaaatgaattgaagaggttagaagccatgctaaaagagagggagagtgatctttctagcaaaacacagctgttacaggatgtacaagatgaaaacaaattgtttaagtcccaaattgagcagcttaaacaacaaaactaccaacaggcatcttcttttccccctcatgaagaattattaaaagtaatttcagaaagagagaaagaaataagtggtctctggaatgagttagattctttgaaggatgcagttgaacaccagaggaagaaaaacaatgaccttcgggagaaaaactgggaagcaatggaagcattggcatcaactgaaaaaatgctgcaggacaaagtgaacaagacttccaaggaaaggcagcaacaggtggaagctgttgagttggaggctaaagaagttctcaaaaaattatttccaaaggtgtctgtcccttctaatttgagttatggtgaatggttgcatggatttgaaaaaaaggcaaaagaatgtatggctggaacttcagggtcagaggaggttaaggttctagagcacaagttgaaagaagctgatgaaatgcacacattgttacagctagagtgtgaaaaatacaaatccgtccttgcagaaacagaaggaattttacagaagctacagagaagtgttgagcaagaagaaaataaatggaaagttaaggtcgatgaatcacacaagactattaaacagatgcagtcatcatttacatcttcagaacaagagctagagcgattaagaagcgaaaataaggatattgaaaatctgagaagagaacgagaacatttggaaatggaactagaaaaggcagagatggaacgatctacctatgttacagaagtcagagagctgaaagatctgttgactgaattgcagaaaaaacttgatgattcatattctgaagcagtaagacagaatgaagagctaaatttgttgaaggcacagttaaatgaaacactcacaaaacttagaactgaacaaaatgaaagacagaaggtagctggtgatttgcataaggctcaacagtcactggagcttatccagtcaaaaatagtaaaagctgctggagacactactgttattgaaaatagtgatgtttccccagaaacggagtcttctgagaaggagacaatgtctgtaagtctaaatcagactgtaacacagttacagcagttgcttcaggcggtaaaccaacagctcacaaaggagaaagagcactaccaggtgttagagtgatcatcctctggcctaccttgacacatgctctccttcaaaatgctaattcagagtgaagtaattgggaaactgttcatttgaggataaaaaaggcattgtattatattttgccaaattaaagccttatttatgttttcaccctttctactttgtcagaaacactgaacagagttttgtcttttctaatccttgttagactactgatttaaagaaggaaaaaaaaaagccaactctgtagacaccttcagagtttagttttataataaaaactgtttgaataattagacctttacattcctgaagataaacatgtaatcttttatcttattttgctcaataaaattgttcagaagatcaaagtggtaaagacaatgtaaaatttaacattttaatactgatgttgtacactgttttacttaacattttgggaagtaactgcctctgacttcaactcaagaaaacacttttttgttgctaatgtaatcggtttttgtaatggcgtcagcaaataaaaggatgcttattattcaaa

SEQ ID NO: 15361 - DNA, 595 bp, Homo sapiens
  source 1..595: mol_type = unassigned DNA
gcggcggcggcggcggcggcggcggcgcctcggagcgggcggcccgggctgtagtgccggcgccgccgcgtcttcccggtctcctttcccggccgcacagggtagattttcgttccgtcacccaggctggagtgcagtggtgtgaccttggcttgctgcaaccctttgcctcctgggttcaagtgattctcattgcctcagcctcctaagtagctgggattacagttcttttaagatagggcaggaatgaaaactctcaatatagagcaggattttaaacctggggcccgtgcatattcttcagggaatccagaaacctggagattatatgtaaaacttagttttataggatcacattgacaaaagtaccatggagttttatgagtcagcatattttattgttcttattccttcaatagttattacagtaattttcctcttcttctggcttttcatgaaagaaacattatatgatgaagttcttgcaaaacagaaaagagaacaaaagcttattcctaccaaaacagataaaaagaaagcagaaaagaaaaagaataaaaagaaagaaatccagaatggaaacctccatgaatcc

SEQ ID NO: 15362 - DNA, 291 bp, Homo sapiens
  source 1..291: mol_type = unassigned DNA
agggactctgcctctaaggatgatgtctgccttggcctgccatgcctggaattccaattcatctttactggttctaaaggttttataggatcacattgacaaaagtaccatggagttttatgagtcagcatattttattgttcttattccttcaatagttattacagtaattttcctcttcttctggcttttcatgaaagaaacattatatgatgaagttcttgcaaaacagaaaagagaacaaaagcttattcctaccaaaacagataaaaagaaagcagaaaagaaaaa

SEQ ID NO: 15363 - DNA, 4858 bp, Homo sapiens
  source 1..4858: mol_type = unassigned DNA
agactccggcccctgtcggccgccaagcccctccgcccctcacagcgcccaggtccgcggccgggccttgattttttggcggggaccgtcatggcgtcgcagccaaattcgtctgcgaagaagaaagaggagaaggggaagaacatccaggtggtggtgagatgcagaccatttaatttggcagagcggaaagctagcgcccattcaatagtagaatgtgatcctgtacgaaaagaagttagtgtacgaactggaggattggctgacaagagctcaaggaaaacatacacttttgatatggtgtttggagcatctactaaacagattgatgtttaccgaagtgttgtttgtccaattctggatgaagttattatgggctataattgcactatctttgcgtatggccaaactggcactggaaaaacttttacaatggaaggtgaaaggtcacctaatgaagagtatacctgggaagaggatcccttggctggtataattccacgtacccttcatcaaatttttgagaaacttactgataatggtactgaattttcagtcaaagtgtctctgttggagatctataatgaagagctttttgatcttcttaatccatcatctgatgtttctgagagactacagatgtttgatgatccccgtaacaagagaggagtgataattaaaggtttagaagaaattacagtacacaacaaggatgaagtctatcaaattttagaaaagggggcagcaaaaaggacaactgcagctactctgatgaatgcatactctagtcgttcccactcagttttctctgttacaatacatatgaaagaaactacgattgatggagaagagcttgttaaaatcggaaagttgaacttggttgatcttgcaggaagtgaaaacattggccgttctggagctgttgataagagagctcgggaagctggaaatataaatcaatccctgttgactttgggaagggtcattactgcccttgtagaaagaacacctcatgttccttatcgagaatctaaactaactagaatcctccaggattctcttggagggcgtacaagaacatctataattgcaacaatttctcctgcatctctcaatcttgaggaaactctgagtacattggaatatgctcatagagcaaagaacatattgaataagcctgaagtgaatcagaaactcaccaaaaaagctcttattaaggagtatacggaggagatagaacgtttaaaacgagatcttgctgcagcccgtgagaaaaatggagtgtatatttctgaagaaaattttagagtcatgagtggaaaattaactgttcaagaagagcagattgtagaattgattgaaaaaattggtgctgttgaggaggagctgaatagggttacagagttgtttatggataataaaaatgaacttgaccagtgtaaatctgacctgcaaaataaaacacaagaacttgaaaccactcaaaaacatttgcaagaaactaaattacaacttgttaaagaagaatatatcacatcagctttggaaagtactgaggagaaacttcatgatgctgccagcaagctgcttaacacagttgaagaaactacaaaagatgtatctggtctccattccaaactggatcgtaagaaggcagttgaccaacacaatgcagaagctcaggatatttttggcaaaaacctgaatagtctgtttaataatatggaagaattaattaaggatggcagctcaaagcaaaaggccatgctagaagtacataagaccttatttggtaatctgctgtcttccagtgtctctgcattagataccattactacagtagcacttggatctctcacatctattccagaaaatgtgtctactcatgtttctcagatttttaatatgatactaaaagaacaatcattagcagcagaaagtaaaactgtactacaggaattgattaatgtactcaagactgatcttctaagttcactggaaatgattttatccccaactgtggtgtctatactgaaaatcaatagtcaactaaagcatattttcaagacttcattgacagtggccgataagatagaagatcaaaaaaaggaactagatggctttctcagtatactgtgtaacaatctacatgaactacaagaaaataccatttgttccttggttgagtcacaaaagcaatgtggaaacctaactgaagacctgaagacaataaagcagacccattcccaggaactttgcaagttaatgaatctttggacagagagattctgtgctttggaggaaaagtgtgaaaatatacagaaaccacttagtagtgtccaggaaaatatacagcagaaatctaaggatatagtcaacaaaatgacttttcacagtcaaaaattttgtgctgattctgatggcttctcacaggaactcagaaattttaaccaagaaggtacaaaattggttgaagaatctgtgaaacactctgataaactcaatggcaacctggaaaaaatatctcaagagactgaacagagatgtgaatctctgaacacaagaacagtttatttttctgaacagtgggtatcttccttaaatgaaagggaacaggaacttcacaacttattggaggttgtaagccaatgttgtgaggcttcaagttcagacatcactgagaaatcagatggacgtaaggcagctcatgagaaacagcataacatttttcttgatcagatgactattgatgaagataaattgatagcacaaaatctagaacttaatgaaaccataaaaattggtttgactaagcttaattgctttctggaacaggatctgaaactggatatcccaacaggtacgacaccacagaggaaaagttatttatacccatcaacactggtaagaactgaaccacgtgaacatctccttgatcagctgaaaaggaaacagcctgagctgttaatgatgctaaactgttcagaaaacaacaaagaagagacaattccggatgtggatgtagaagaggcagttctggggcagtatactgaagaacctctaagtcaagagccatctgtagatgctggtgtggattgttcatcaattggcggggttccatttttccagcataaaaaatcacatggaaaagacaaagaaaacagaggcattaacacactggagaggtctaaagtggaagaaactacagagcacttggttacaaagagcagattacctctgcgagcccagatcaacctttaattcacttgggggttggcaattttatttttaaagaaaacttaaaaataaaacctgaaaccccagaacttgagccttgtgtatagattttaaaagaatatatatatcagccgggcgcggtggctcatgcctgtaatcccagcactttgggaggctgaggcgggtggattgcttgagcccaggagtttgagaccagcctggccaacgtggcaaaacctcgtctctgttaaaaattagccgggcgtggtggcacactcctgtaatcccagctactggggaggctgaggcacgagaatcacttgaacccaggaagcggggttgcagtgagccaaaggtacaccactacactccagcctgggcaacagagcaagactcggtctcaaaaacaaaatttaaaaaagatataaggcagtactgtaaattcagttgaattttgatatctacccatttttctgtcatccctatagttcactttgtattaaattgggtttcatttgggatttgcaatgtaaatacgtatttctagttttcatataaagtagttcttttataacaaatgaaaagtatttttcttgtatattattaagtaatgaatatataagaactgtactcttctcagcttgagcttacataggtaaatatcaccaacatctgtccttagaaaggaccatctcatgttttttttcttgctatgacttgtgtattttcttgcatcctccctagacttccctatttcgctttctcctcggctcactttctccctttttatttttcaccaaaccatttgtagagctacaaaaggtatcctttcttattttcagtagtcagaattttatctagaaatcttttaacacctttttagtggttatttctaaaatcactgtcaacaataaatctaaccctagttgtatccctcctttcagtatttttcacttgttgccccaaatgtgaaagcatttcattcctttaagaggcctaactcattcaccctgacagagttcacaaaaagcccacttaagagtatacattgctattatgggagaccacccagacatctgactaatggctctgtgcccacactccaagacctgtgccttttagagaagctcacaatgatttaaggactgtttgaaacttccaattatgtctataatttatattcttttgtttacatgatgaaactttttgttgttgcttgtttgtatataatacaatgtgtacatgtatctttttctcgattcaaatcttaacccttaggactctggtatttttgatctggcaaccatatttctggaagttgagatgtttcagcttgaagaaccaaaacagaaggaatatgtacaaagaataaattttctgctcacgatgagtttagtgtgtaaagtttagagacatctgactttgatagctaaattaaaccaaaccctattgaagaattgaatatatgctacttcaagaaactaaattgatctcgtagaattatcttaataaaataatggctataatttctctgcaaaatcagatgtcagcataagcgatggataatacctaataaactgccctcagtaaatccatggttaataaatgtggtttctacatt

SEQ ID NO: 15364 - DNA, 5941 bp, Homo sapiens
  source 1..5941: mol_type = unassigned DNA
gcggccgcgctcgaggggcgcgcggctgcagcggcggcggcgccgcgcgtgaggggccgcctaaggccgagcgggcgcggcgagcggccgggcgagcgcagccaacatgtcggataccaaggtaaaagttgccgtccgggtccggcccatgaaccgacgagaactggaactgaacaccaagtgcgtggtggagatggaagggaatcaaacggtcctgcaccctcctccttctaacaccaaacagggagaaaggaaacctcccaaggtatttgcctttgattattgcttttggtccatggatgaatctaacactacaaaatacgctggtcaagaagtggttttcaagtgccttggggaaggaattcttgaaaaagcctttcaggggtataatgcgtgtatttttgcatatggacagacaggttcgggaaaatccttttccatgatgggccatgctgagcagctgggccttattccaaggctctgctgtgctttatttaaaaggatctctttggagcaaaatgagtcacagacctttaaagttgaagtgtcctatatggaaatttataatgagaaagttcgggatcttttagaccccaaagggagtagacagtctcttaaagttcgagaacataaagttttgggaccatatgtagatggtttatctcaactagctgtcactagttttgaggatattgagtcattgatgtctgagggaaataagtctcgaacggtagctgctaccaacatgaacgaagaaagcagccgctcccatgctgtgttcaacatcataatcacacagacactttatgacctgcagtctgggaattccggggagaaagtcagtaaggtcagcttggtagacctggcgggtagcgaaagagtatctaaaacaggagctgcaggagagcgactgaaagaaggcagcaacattaacaaatcgcttacaaccttggggttggttatatcatcactggctgaccaggcagctggcaagggtaaaagcaaatttgtgccttatcgagattcagtcctcacttggctgcttaaggacaacttggggggcaacagccaaacctctatgatagccacaatcagcccagccgcagacaactatgaagagaccctctccacattaagatatgcagaccgagccaaaaggattgtgaaccatgctgttgtgaatgaggaccccaacgcaaaagtgatccgagaactgcgggaggaagtcgagaaactgagagagcagctctctcaggcagaggccatgaaggcccctgaactgaaggagaagctcgaagagtctgaaaagctgataaaagaactaacagtgacttgggaagagaagctgagaaaaacagaagagatagcacaggaaagacaacgacaacttgaaagcatggggatttccctggagatgtccggtatcaaggtgggggatgacaaatgctacttagtcaatctgaatgcagaccctgctcttaacgaacttctggtttattatttaaaggatcacaccagggtgggtgcagatacctctcaagatatccagctttttggcataggaattcagcctcagcactgtgagattgacattgcatctgatggagacgtcactctcactccaaaagaaaatgcaaggtcctgtgtgaacggcacccttgtgtgcagtaccacccagctgtggcatggtgaccgaatcctatggggaaataatcacttttttagaataaacttacctaagaggaaacgtcgagattggttgaaagactttgaaaaagaaacgggcccgccagagcatgacctggatgcagccagtgaggcttcctctgaaccagactataactatgaatttgcacagatggaagttatcatgaaaaccctgaatagtaatgacccagttcaaaatgtggttcaggtcctggagaaacaatacctagaagaaaagagaagtgccctagaggagcagcggctcatgtatgagcgggaactggagcaactccgccagcagctctcccccgacaggcagccacagagtagcggccctgaccgcctggcctacagcagccagacagcgcagcagaaggtgacccagtgggcagaagagagggatgaactcttccgacaaagcctggcaaaactgcgagagcagctggttaaagctaataccttggtgagggaagcaaacttcctggctgaggaaatgagcaaactcaccgattaccaagtgactcttcagatccctgctgcaaacctcagtgccaataggaagagaggtgcaatagtgagtgaaccagctatccaagtgaggaggaaaggaaagagcacccaagtgtggaccattgagaagctggagaataaattaattgacatgagagacctttaccaagaatggaaggaaaaagttcctgaggcaaagagactctacggaaaacgaggtgaccctttctatgaagcccaagaaaatcacaacctcatcggggtggcgaatgtattcttggaatgcctcttctgtgatgtgaaacttcagtatgcagtccctatcatcagccagcagggggaggttgcagggcgtctccacgtggaagtgatgcgtgttacaggagctgttccagagcgtgtggtggaggatgactcttcggagaattccagtgaaagtgggagccttgaagtcgtagacagcagcggggaaatcattcaccgagtcaaaaagctgacatgtcgggtaaaaattaaagaagcaacggggctgcccttaaacctctcaaattttgtcttctgtcaatacacattctgggaccagtgtgagtctacggtggctgccccggtggtggaccccgaggtgccttcaccacagtccaaggatgcccagtacacagtgaccttctcccactgtaaggactatgtggtgaatgtaacagaagaatttctggagttcatttcagatggagcactggccattgaagtatggggccaccggtgtgctggaaatggcagctccatctgggaggtcgattctcttcatgctaagacaagaacactgcatgacaggtggaatgaagtaacgcgaagaatagaaatgtggatctccatattagaattgaatgagttaggagagtatgctgcagtggaacttcatcaggcaaaagatgtcaacacaggaggcatctttcaacttagacagggtcattcccgtagagtacaagtcacggtgaaacctgtgcagcattcagggacactgccacttatggttgaagccatcctgtcagtatccatcggctgtgtaactgccaggtccaccaaactccaaagagggctggacagttaccagagagatgatgaggatggtgatgatatggatagttatcaggaagaagacttaaactgcgtaagggagaggtggtcagatgcactcattaaacgacgagaatacctggatgaacagataaaaaaagtcagcaataaaacagagaaaacagaggacgatgtggagcgggaagcccagcttgtggagcagtgggtagggctgactgaggaaaggaatgctgtgctggtgccagccccaggcagtgggattcctggggcacctgccgactggatcccacctcctggaatggaaacccacataccagttctcttcctcgatttgaatgcggatgacctcagtgccaatgagcagcttgttggcccccatgcatccggcgtgaactccatcctgcccaaggagcatggcagccagtttttctacctgcccatcataaagcacagtgatgatgaggtttcagccacagcctcttgggattcctcggtgcatgattctgttcacttgaatagggtcacaccacagaatgaaaggatttacctaattgtgaaaaccacagttcaactcagccaccctgctgctatggagttagtattacgaaaacgaattgcagccaatatttacaacaaacagagtttcacgcagagtttgaagaggagaatatccctgaaaaatatattttattcctgtggtgtaacctatgaaatagtatccaatataccaaaggcaactgaggagatagaggaccgggaaacgctggctctcctggcagcaaggagtgaaaacgaaggcacatcagatggggagacgtacattgagaagtacactcgaggcgtgctgcaggtggaaaacattctgagtcttgaacggctccggcaggccgtcacagtcaaagaagcactttccaccaaagcccggcacattcggaggagcctcagtacaccaaatgttcataatgtctcttccagccgaccggacctttctggctttgatgaagatgacaagggttggccagagaaccagttggacatgtctgactatagctccagttaccaagatgtagcatgttatggaactttacccagggattctcctcgaaggaataaagaaggttgtacatcagagactcctcatgccttaaccgtcagcccttttaaagcattctctcctcagccaccaaagtttttcaagcccctaatgcctgtaaaagaggagcataagaaaaggatagccctggaagcaaggcctcttctaagccaggagagcatgcctccacctcaggcacataaccctggctgcattgtaccctcaggaagcaatggcagcagcatgccagtagaacacaatagcaaacgtgagaagaagattgactctgaggaggaagaaaatgagctggaagctattaacaggaagctaataagttcacagccttatgtacctgtggagtttgctgacttcagtgtttacaatgccagcttggagaacagggaatggttttcctctaaagtagatctgtcaaactcacgggtcttggagaaagaagtgtcccgtagccctaccaccagcagtattaccagtggctacttttcccacagtgcctccaatgccaccctgtctgacatggtggtcccttctagtgacagctcagaccagctggccattcagacgaaggatgcagactccaccgagcactccacaccatcgcttgtgcatgatttcaggccgtcctcaaacaaagagttgacagaagtcgaaaaaggcttggtaaaggacaagataattgtggtgccactcaaggaaaacagtgccttagccaaagggagcccatcatcccagagcatccctgagaaaaactccaaatcactgtgcaggactggctcatgttcagaactagatgcctgccccagcaaaattagccagccagccaggggattctgccccagggaggtgacggtagaacacaccaccaacatccttgaagaccattctttcacagaatttatgggagtgtcagagggaaaagattttgatggtttgacagattcttctgctggagagctttccagtaggaggagtctaccaaataaaacaggcggcaagactgtctccgatgggctccaccaccccagccagctgcattccaagttagagaatgaccaggtaataattccagaggcagccttttgggttctgtgctgtcaatgagtatgtctaactgtatgtcaaccccagaggcccttcaccgcaacaacttggtaggaaagattcatccagttgtttgtgacagcaaagatgagcccacagagaagcaggctcacttcctgcacagctgtctctgtcggagagcaagtctgttttgggaactagaacgcaattgtgaaattataagaccagtggatttttttacctggcacatgggttggtgttgaatgaagtgttcagatggataaggatcaatctcatattcattccctgggatgtttagttaccagttttcccaaagtgttctggtagcatctaccatatttcatcaaatctgtgattcctttgattattatatgaaccattattttatgtatcattaagaaaaaatactgccaattaaactctgtcatatcaaca

SEQ ID NO: 15365 - DNA, 6924 bp, Homo sapiens
  source 1..6924: mol_type = unassigned DNA
atgtcggataccaaggtaaaagttgccgtccgggtccggcccatgaaccgacgagaactggaactgaacaccaagtgcgtggtggagatggaagggaatcaaacggtcctgcaccctcctccttctaacaccaaacagggagaaaggaaacctcccaaggtatttgcctttgattattgcttttggtccatggatgaatctaacactacaaaatacgctggtcaagaagtggttttcaagtgccttggggaaggaattcttgaaaaagcctttcaggggtataatgcgtgtatttttgcatatggacagacaggttcgggaaaatccttttccatgatgggccatgctgagcagctgggccttattccaaggctctgctgtgctttatttaaaaggatctctttggagcaaaatgagtcacagacctttaaagttgaagtgtcctatatggaaatttataatgagaaagttcgggatcttttagaccccaaagggagtagacagtctcttaaagttcgagaacataaagttttgggaccatatgtagatggtttatctcaactagctgtcactagttttgaggatattgagtcattgatgtctgagggaaataagtctcgaacggtagctgctaccaacatgaacgaagaaagcagccgctcccatgctgtgttcaacatcataatcacacagacactttatgacctgcagtctgggaattccggggagaaagtcagtaaggtcagcttggtagacctggcgggtagcgaaagagtatctaaaacaggagctgcaggagagcgactgaaagaaggcagcaacattaacaaatcgcttacaaccttggggttggttatatcatcactggctgaccaggcagctggcaagggtaaaagcaaatttgtgccttatcgagattcagtcctcacttggctgcttaaggacaacttggggggcaacagccaaacctctatgatagccacaatcagcccagccgcagacaactatgaagagaccctctccacattaagatatgcagaccgagccaaaaggattgtgaaccatgctgttgtgaatgaggaccccaacgcaaaagtgatccgagaactgcgggaggaagtcgagaaactgagagagcagctctctcaggcagaggccatgaaggcccctgaactgaaggagaagctcgaagagtctgaaaagctgataaaagaactaacagtgacttgggaagagaagctgagaaaaacagaagagatagcacaggaaagacaacgacaacttgaaagcatggggatttccctggagatgtccggtatcaaggtgggggatgacaaatgctacttagtcaatctgaatgcagaccctgctcttaacgaacttctggtttattatttaaaggatcacaccagggtgggtgcagatacctctcaagatatccagctttttggcataggaattcagcctcagcactgtgagattgacattgcatctgatggagacgtcactctcactccaaaagaaaatgcaaggtcctgtgtgaacggcacccttgtgtgcagtaccacccagctgtggcatggtgaccgaatcctatggggaaataatcacttttttagaataaacttacctaagaggaaacgtcgagattggttgaaagactttgaaaaagaaacgggcccgccagagcatgacctggatgcagccagtgaggcttcctctgaaccagactataactatgaatttgcacagatggaagttatcatgaaaaccctgaatagtaatgacccagttcaaaatgtggttcaggtcctggagaaacaatacctagaagaaaagagaagtgccctagaggagcagcggctcatgtatgagcgggaactggagcaactccgccagcagctctcccccgacaggcagccacagagtagcggccctgaccgcctggcctacagcagccagacagcgcagcagaaggtgacccagtgggcagaagagagggatgaactcttccgacaaagcctggcaaaactgcgagagcagctggttaaagctaataccttggtgagggaagcaaacttcctggctgaggaaatgagcaaactcaccgattaccaagtgactcttcagatccctgctgcaaacctcagtgccaataggaagagaggtgcaatagtgagtgaaccagctatccaagtgaggaggaaaggaaagagcacccaagtgtggaccattgagaagctggagaataaattaattgacatgagagacctttaccaagaatggaaggaaaaagttcctgaggcaaagagactctacggaaaacgaggtgaccctttctatgaagcccaagaaaatcacaacctcatcggggtggcgaatgtattcttggaatgcctcttctgtgatgtgaaacttcagtatgcagtccctatcatcagccagcagggggaggttgcagggcgtctccacgtggaagtgatgcgtgttacaggagctgttccagagcgtgtggtggaggatgactcttcggagaattccagtgaaagtgggagccttgaagtcgtagacagcagcggggaaatcattcaccgagtcaaaaagctgacatgtcgggtaaaaattaaagaagcaacggggctgcccttaaacctctcaaattttgtcttctgtcaatacacattctgggaccagtgtgagtctacggtggctgccccggtggtggaccccgaggtgccttcaccacagtccaaggatgcccagtacacagtgaccttctcccactgtaaggactatgtggtgaatgtaacagaagaatttctggagttcatttcagatggagcactggccattgaagtatggggccaccggtgtgctggaaatggcagctccatctgggaggtcgattctcttcatgctaagacaagaacactgcatgacaggtggaatgaagtaacgcgaagaatagaaatgtggatctccatattagaattgaatgagttaggagagtatgctgcagtggaacttcatcaggcaaaagatgtcaacacaggaggcatctttcaacttagacagggtcattcccgtagagtacaagtcacggtgaaacctgtgcagcattcagggacactgccacttatggttgaagccatcctgtcagtatccatcggctgtgtaactgccaggtccaccaaactccaaagagggctggacagttaccaggaagaagacttaaactgcgtaagggagaggtggtcagatgcactcattaaacgacgagaatacctggatgaacagataaaaaaagtcagcaataaaacagagaaaacagaggacgatgtggagcgggaagcccagcttgtggagcagtgggtagggctgactgaggaaaggaatgctgtgctggtgccagccccaggcagtgggattcctggggcacctgccgactggatcccacctcctggaatggaaacccacataccagttctcttcctcgatttgaatgcggatgacctcagtgccaatgagcagcttgttggcccccatgcatccggcgtgaactccatcctgcccaaggagcatggcagccagtttttctacctgcccatcataaagcacagtgatgatgaggtttcagccacagcctcttgggattcctcggtgcatgattctgttcacttgaatagggtcacaccacagaatgaaaggatttacctaattgtgaaaaccacagttcaactcagccaccctgctgctatggagttagtattacgaaaacgaattgcagccaatatttacaacaaacagagtttcacgcagagtttgaagaggagaatatccctgaaaaatatattttattcctgtggtgtaacctatgaaatagtatccaatataccaaaggcaactgaggagatagaggaccgggaaacgctggctctcctggcagcaaggagtgaaaacgaaggcacatcagatggggagacgtacattgagaagtacactcgaggcgtgctgcaggtggaaaacattctgagtcttgaacggctccggcaggccgtcacagtcaaagaagcactttccaccaaagcccggcacattcggaggagcctcagtacaccaaatgttcataatgtctcttccagccgaccggacctttctggctttgatgaagatgacaagggttggccagagaaccagttggacatgtctgactatagctccagttaccaagatgtagcatgttatggaactttacccagggattctcctcgaaggaataaagaaggttgtacatcagagactcctcatgccttaaccgtcagcccttttaaagcattctctcctcagccaccaaagtttttcaagcccctaatgcctgtaaaagaggagcataagaaaaggatagccctggaagcaaggcctcttctaagccaggaggactctgaggaggaagaaaatgagctggaagctattaacaggaagctaataagttcacagccttatgtacctgtggagtttgctgacttcagtgtttacaatgccagcttggagaacagggaatggttttcctctaaagtagatctgtcaaactcacgggtcttggagaaagaagtgtcccgtagccctaccaccagcagtattaccagtggctacttttcccacagtgcctccaatgccaccctgtctgacatggtggtcccttctagtgacagctcagaccagctggccattcagacgaaggatgcagactccaccgagcactccacaccatcgcttgtgcatgatttcaggccgtcctcaaacaaagagttgacagaagtcgaaaaaggcttggtaaaggacaagataattgtggtgccactcaaggaaaacagtgccttagccaaagggagcccatcatcccagagcatccctgagaaaaactccaaatcactgtgcaggactggctcatgttcagaactagatgcctgccccagcaaaattagccagccagccaggggattctgccccagggaggtgacggtagaacacaccaccaacatccttgaagaccattctttcacagaatttatgggagtgtcagagggaaaagattttgatggtttgacagattcttctgctggagagctttccagtaggaggagtctaccaaataaaacaggcggcaagactgtctccgatgggctccaccaccccagccagctgcattccaagttagagaatgaccagggaggcacaacctcacggtgagagcagcaagcacccctcctcaggccacagcttggcgtctttgttcgcctggtcaccttgggcaagcaccagccccatctctaaaacatgctgccgcctggctggacctcagaccagaagctggagaatccacaccgtgcacttcctgggccacctcctttcccctccccagtgggagaagcggcactttgtcacttgggtgaatcaacagcctctgctttttccagaaagcaagagaactgaaaatcctggattaactaagtgacagtatttttttttgcacttactacacacctccactgtatagaaacctctacagattccaacagactttattcttgtacaattttaatcagttcttactgtagaatctggagtcaatgctctaatctgttttttataaataatatatattatgtatatgaaatgtgtatctatagtatgtctggagacagacaaggctgcacactaaaatgcagataaaggtgatttgtagaaaatcataaggtactggacttcgttacaaagcaacttgggcgatctcttatacatgagcagatgaaaaatattttattgcctaagaatgagcttgcaaatccctctttgcagaaaaggttatagaatgctgttctttataaccaaagaacttacataagacaacatttttgctgtccactcttttgtgtgaacatgtatgtttgactgcaagtttggtgccataattcccttggctaccaagccacgtgctgccattctctgtcctttgtttcataagcacactgagaaatctcacagctatattctttggtcttccacctgcccctccacctgctgacttgacattgtattataactgttgacaatgactggggtcctgactccacagttgcctggaccgtggctcagcccagctgggcaggtggaatgaagagagccgtattactgtaagaaaacacaaggacagccaggagtagtggtggggtgggtggggtgggaggtgttgatttttgtgtgtttctgtgtgtgtggttttgttttggattggtaggtttcactgtggcgtggttttgctgttgttattttgcttgattctggaaaatgctgaggagatggactgagctatgaagttcaatggttcaccctttaccatgtttgcaggagatgatcgaatacagatgaccctgctgtcgtgtcttcatttgtaaaattctcctacaaatggagacattgaaggattatgtgtatggaaatttttacaaaattcctttctgtacctattctgtagatgcctgtataatcggtctggatgtacagctataaatgtgttgtgagagcaagagagagagaatgggtagagcctgctgtaccttttttcttttaaattcttcgagttggtaaatgagtaagatattggaaaccttaatgaaaagctgctgttcatgatttgtgtgtatagtgagctgactgtagtattttactattgtctgttaaaaaaagaaaaactgtaatttatatcccctttgaactttattgtgtttaattggtacacatttctgtgtgtgtgtgtgtgtatgtgttttagaatacaaactgtgtaattcagattttaaaacactaatcatttgtctttaataaccctgcctttagtttcaaatctaacttaccatatttcta

SEQ ID NO: 15366 - DNA, 5831 bp, Homo sapiens
  source 1..5831: mol_type = unassigned DNA
cggccgcgctcgaggggcgcgcggctgcagcggcggcggcgccgcgcgtgaggggccgcctaaggccgagcgggcgcggcgagcggccgggcgagcgcagccaacatgtcggataccaaggtaaaagttgccgtccgggtccggcccatgaaccgacgagaactggaactgaacaccaagtgcgtggtggagatggaagggaatcaaacggtcctgcaccctcctccttctaacaccaaacagggagaaaggaggccaagtcaggtatttgcctttgattattgcttttggtccatggatgaatctaacactacaaaatacgctggtcaagaagtggttttcaagtgccttggggaaggaattcttgaaaaagcctttcaggggtataatgcgtgtatttttgcatatggacagacaggttcgggaaaatccttttccatgatgggccatgctgagcagctgggccttattccaaggctctgctgtgctttatttaaaaggatctctttggagcaaaatgagtcacagacctttaaagttgaagtgtcctatatggaaatttataatgagaaagttcgggatcttttagaccccaaagggagtagacagtctcttaaagttcgagaacataaagttttgggaccatatgtagatggtttatctcaactagctgtcactagttttgaggatattgagtcattgatgtctgagggaaataagtctcgaacggtagctgctaccaacatgaacgaagaaagcagccgctcccatgctgtgttcaacatcataatcacacagacactttatgacctgcagtctgggaattccggggagaaagtcagtaaggtcagcttggtagacctggcgggtagcgaaagagtatctaaaacaggagctgcaggagagcgactgaaagaaggcagcaacattaacaaatcgcttacaaccttggggttggttatatcatcactggctgaccaggcagctggcaagggtaaaagcaaatttgtgccttatcgagattcagtcctcacttggctgcttaaggacaacttggggggcaacagccaaacctctatgatagccacaatcagcccagccgcagacaactatgaagagaccctctccacattaagatatgcagaccgagccaaaaggattgtgaaccatgctgttgtgaatgaggaccccaacgcaaaagtgatccgagaactgcgggaggaagtcgagaaactgagagagcagctctctcaggcagaggccatgaaggcccctgaactgaaggagaagctcgaagagtctgaaaagctgataaaagaactaacagtgacttgggaagagaagctgagaaaaacagaagagatagcacaggaaagacaacgacaacttgaaagcatggggatttccctggagatgtccggtatcaaggtgggggatgacaaatgctacttagtcaatctgaatgcagaccctgctcttaacgaacttctggtttattatttaaaggatcacaccagggtgggtgcagatacctctcaagatatccagctttttggcataggaattcagcctcagcactgtgagattgacattgcatctgatggagacgtcactctcactccaaaagaaaatgcaaggtcctgtgtgaacggcacccttgtgtgcagtaccacccagctgtggcatggtgaccgaatcctatggggaaataatcacttttttagaataaacttacctaagaggaaacgtcgagattggttgaaagactttgaaaaagaaacgggcccgccagagcatgacctggatgcagccagtgaggcttcctctgaaccagactataactatgaatttgcacagatggaagttatcatgaaaaccctgaatagtaatgacccagttcaaaatgtggttcaggtcctggagaaacaatacctagaagaaaagagaagtgccctagaggagcagcggctcatgtatgagcgggaactggagcaactccgccagcagctctcccccgacaggcagccacagagtagcggccctgaccgcctggcctacagcagccagacagcgcagcagaaggtgacccagtgggcagaagagagggatgaactcttccgacaaagcctggcaaaactgcgagagcagctggttaaagctaataccttggtgagggaagcaaacttcctggctgaggaaatgagcaaactcaccgattaccaagtgactcttcagatccctgctgcaaacctcagtgccaataggaagagaggtgcaatagtgagtgaaccagctatccaagtgaggaggaaaggaaagagcacccaagtgtggaccattgagaagctggagaataaattaattgacatgagagacctttaccaagaatggaaggaaaaagttcctgaggcaaagagactctacggaaaacgaggtgaccctttctatgaagcccaagaaaatcacaacctcatcggggtggcgaatgtattcttggaatgcctcttctgtgatgtgaaacttcagtatgcagtccctatcatcagccagcagggggaggttgcagggcgtctccacgtggaagtgatgcgtgttacaggagctgttccagagcgtgtggtggaggatgactcttcggagaattccagtgaaagtgggagccttgaagtcgtagacagcagcggggaaatcattcaccgagtcaaaaagctgacatgtcgggtaaaaattaaagaagcaacggggctgcccttaaacctctcaaattttgtcttctgtcaatacacattctgggaccagtgtgagtctacggtggctgccccggtggtggaccccgaggtgccttcaccacagtccaaggatgcccagtacacagtgaccttctcccactgtaaggactatgtggtgaatgtaacagaagaatttctggagttcatttcagatggagcactggccattgaagtatggggccaccggtgtgctggaaatggcagctccatctgggaggtcgattctcttcatgctaagacaagaacactgcatgacaggtggaatgaagtaacgcgaagaatagaaatgtggatctccatattagaattgaatgagttaggagagtatgctgcagtggaacttcatcaggcaaaagatgtcaacacaggaggcatctttcaacttagacagggtcattcccgtagagtacaagtcacggtgaaacctgtgcagcattcagggacactgccacttatggttgaagccatcctgtcagtatccatcggctgtgtaactgccaggtccaccaaactccaaagagggctggacagttaccagagagatgatgaggatggtgatgatatggatagttatcaggaagaagacttaaactgcgtaagggagaggtggtcagatgcactcattaaacgacgagaatacctggatgaacagataaaaaaagtcagcaataaaacagagaaaacagaggacgatgtggagcgggaagcccagcttgtggagcagtgggtagggctgactgaggaaaggaatgctgtgctggtgccagccccaggcagtgggattcctggggcacctgccgactggatcccacctcctggaatggaaacccacataccagttctcttcctcgatttgaatgcggatgacctcagtgccaatgagcagcttgttggcccccatgcatccggcgtgaactccatcctgcccaaggagcatggcagccagtttttctacctgcccatcataaagcacagtgatgatgaggtttcagccacagcctcttgggattcctcggtgcatgattctgttcacttgaatagggtcacaccacagaatgaaaggatttacctaattgtgaaaaccacagttcaactcagccaccctgctgctatggagttagtattacgaaaacgaattgcagccaatatttacaacaaacagagtttcacgcagagtttgaagaggagaatatccctgaaaaatatattttattcctgtggtgtaacctatgaaatagtatccaatataccaaaggcaactgaggagatagaggaccgggaaacgctggctctcctggcagcaaggagtgaaaacgaaggcacatcagatggggagacgtacattgagaagtacactcgaggcgtgctgcaggtggaaaacattctgagtcttgaacggctccggcaggccgtcacagtcaaagaagcactttccaccaaagcccggcacattcggaggagcctcagtacaccaaatgttcataatgtctcttccagccgaccggacctttctggctttgatgaagatgacaagggttggccagagaaccagttggacatgtctgactatagctccagttaccaagatgtagcatgttatggaactttacccagggattctcctcgaaggaataaagaaggttgtacatcagagactcctcatgccttaaccgtcagcccttttaaagcattctctcctcagccaccaaagtttttcaagcccctaatgcctgtaaaagaggagcataagaaaaggatagccctggaagcaaggcctcttctaagccaggaggactctgaggaggaagaaaatgagctggaagctattaacaggaagctaataagttcacagccttatgtacctgtggagtttgctgacttcagtgtttacaatgccagcttggagaacagggaatggttttcctctaaagtagatctgtcaaactcacgggtcttggagaaagaagtgtcccgtagccctaccaccagcagtattaccagtggctacttttcccacagtgcctccaatgccaccctgtctgacatggtggtcccttctagtgacagctcagaccagctggccattcagacgaaggatgcagactccaccgagcactccacaccatcgcttgtgcatgatttcaggccgtcctcaaacaaagagttgacagaagtcgaaaaaggcttggtaaaggacaagataattgtggtgccactcaaggaaaacagtgccttagccaaagggagcccatcatcccagagcatccctgagaaaaactccaaatcactgtgcaggactggctcatgttcagaactagatgcctgccccagcaaaattagccagccagccaggggattctgccccagggaggtgacggtagaacacaccaccaacatccttgaagaccattctttcacagaatttatgggagtgtcagagggaaaagattttgatggtttgacagattcttctgctggagagctttccagtaggaggagtctaccaaataaaacaggcggcaagactgtctccgatgggctccaccaccccagccagctgcattccaagttagagaatgaccaggtaataattccagaggcagccttttgggttctgtgctgtcaatgagtatgtctaactgtatgtcaaccccagaggcccttcaccgcaacaacttggtaggaaagattcatccagttgtttgtgacagcaaagatgagcccacagagaagcaggctcacttcctgcacagctgtctctgtcggagagcaagtctgttttgggaactagaacgcaattgtgaaattataagaccagtggatttttttacctggcacatgggttggtgttgaatgaagtgttcagatggataaggatcaatctcatattcattccctgggatgtttagttaccagttttcccaaagtgttctggtagcatctaccatatttcatcaaatctgtgattcctttgattattatatgaaccattattttatgtatcattaagaaaaaatactgccaattaaactctgtcatatc

SEQ ID NO: 15367 - DNA, 5747 bp, Homo sapiens
  source 1..5747: mol_type = unassigned DNA
ccgggcgagcgcagccaacatgtcggataccaaggtaaaagttgccgtccgggtccggcccatgaaccgacgagaactggaactgaacaccaagtgcgtggtggagatggaagggaatcaaacggtcctgcaccctcctccttctaacaccaaacagggagaaaggaaacctcccaaggtatttgcctttgattattgcttttggtccatggatgaatctaacactacaaaatacgctggtcaagaagtggttttcaagtgccttggggaaggaattcttgaaaaagcctttcaggggtataatgcgtgtatttttgcatatggacagacaggttcgggaaaatccttttccatgatgggccatgctgagcagctgggccttattccaaggctctgctgtgctttatttaaaaggatctctttggagcaaaatgagtcacagacctttaaagttgaagtgtcctatatggaaatttataatgagaaagttcgggatcttttagaccccaaagggagtagacagtctcttaaagttcgagaacataaagttttgggaccatatgtagatggtttatctcaactagctgtcactagttttgaggatattgagtcattgatgtctgagggaaataagtctcgaacggtagctgctaccaacatgaacgaagaaagcagccgctcccatgctgtgttcaacatcataatcacacagacactttatgacctgcagtctgggaattccggggagaaagtcagtaaggtcagcttggtagacctggcgggtagcgaaagagtatctaaaacaggagctgcaggagagcgactgaaagaaggcagcaacattaacaaatcgcttacaaccttggggttggttatatcatcactggctgaccaggcagctggcaagggtaaaagcaaatttgtgccttatcgagattcagtcctcacttggctgcttaaggacaacttggggggcaacagccaaacctctatgatagccacaatcagcccagccgcagacaactatgaagagaccctctccacattaagatatgcagaccgagccaaaaggattgtgaaccatgctgttgtgaatgaggaccccaacgcaaaagtgatccgagaactgcgggaggaagtcgagaaactgagagagcagctctctcaggcagaggccatgaaggcccctgaactgaaggagaagctcgaagagtctgaaaagctgataaaagaactaacagtgacttgggaagagaagctgagaaaaacagaagagatagcacaggaaagacaacgacaacttgaaagcatggggatttccctggagatgtccggtatcaaggtgggggatgacaaatgctacttagtcaatctgaatgcagaccctgctcttaacgaacttctggtttattatttaaaggatcacaccagggtgggtgcagatacctctcaagatatccagctttttggcataggaattcagcctcagcactgtgagattgacattgcatctgatggagacgtcactctcactccaaaagaaaatgcaaggtcctgtgtgaacggcacccttgtgtgcagtaccacccagctgtggcatggtgaccgaatcctatggggaaataatcacttttttagaataaacttacctaagaggaaacgtcgagattggttgaaagactttgaaaaagaaacgggcccgccagagcatgacctggatgcagccagtgaggcttcctctgaaccagactataactatgaatttgcacagatggaagttatcatgaaaaccctgaatagtaatgacccagttcaaaatgtggttcaggtcctggagaaacaatacctagaagaaaagagaagtgccctagaggagcagcggctcatgtatgagcgggaactggagcaactccgccagcagctctcccccgacaggcagccacagagtagcggccctgaccgcctggcctacagcagccagacagcgcagcagaaggtgacccagtgggcagaagagagggatgaactcttccgacaaagcctggcaaaactgcgagagcagctggttaaagctaataccttggtgagggaagcaaacttcctggctgaggaaatgagcaaactcaccgattaccaagtgactcttcagatccctgctgcaaacctcagtgccaataggaagagaggtgcaatagtgagtgaaccagctatccaagtgaggaggaaaggaaagagcacccaagtgtggaccattgagaagctggagaataaattaattgacatgagagacctttaccaagaatggaaggaaaaagttcctgaggcaaagagactctacggaaaacgaggtgaccctttctatgaagcccaagaaaatcacaacctcatcggggtggcgaatgtattcttggaatgcctcttctgtgatgtgaaacttcagtatgcagtccctatcatcagccagcagggggaggttgcagggcgtctccacgtggaagtgatgcgtgttacaggagctgttccagagcgtgtggtggaggatgactcttcggagaattccagtgaaagtgggagccttgaagtcgtagacagcagcggggaaatcattcaccgagtcaaaaagctgacatgtcgggtaaaaattaaagaagcaacggggctgcccttaaacctctcaaattttgtcttctgtcaatacacattctgggaccagtgtgagtctacggtggctgccccggtggtggaccccgaggtgccttcaccacagtccaaggatgcccagtacacagtgaccttctcccactgtaaggactatgtggtgaatgtaacagaagaatttctggagttcatttcagatggagcactggccattgaagtatggggccaccggtgtgctggaaatggcagctccatctgggaggtcgattctcttcatgctaagacaagaacactgcatgacaggtggaatgaagtaacgcgaagaatagaaatgtggatctccatattagaattgaatgagttaggagagtatgctgcagtggaacttcatcaggcaaaagatgtcaacacaggaggcatctttcaacttagacagggtcattcccgtagagtacaagtcacggtgaaacctgtgcagcattcagggacactgccacttatggttgaagccatcctgtcagtatccatcggctgtgtaactgccaggtccaccaaactccaaagagggctggacagttaccagagagatgatgaggatggtgatgatatggatagttatcaggaagaagacttaaactgcgtaagggagaggtggtcagatgcactcattaaacgacgagaatacctggatgaacagataaaaaaagtcagcaataaaacagagaaaacagaggacgatgtggagcgggaagcccagcttgtggagcagtgggtagggctgactgaggaaaggaatgctgtgctggtgccagccccaggcagtgggattcctggggcacctgccgactggatcccacctcctggaatggaaacccacataccagttctcttcctcgatttgaatgcggatgacctcagtgccaatgagcagcttgttggcccccatgcatccggcgtgaactccatcctgcccaaggagcatggcagccagtttttctacctgcccatcataaagcacagtgatgatgaggtttcagccacagcctcttgggattcctcggtgcatgattctgttcacttgaatagggtcacaccacagaatgaaaggatttacctaattgtgaaaaccacagttcaactcagccaccctgctgctatggagttagtattacgaaaacgaattgcagccaatatttacaacaaacagagtttcacgcagagtttgaagaggagaatatccctgaaaaatatattttattcctgtggtgtaacctatgaaatagtatccaatataccaaaggcaactgaggagatagaggaccgggaaacgctggctctcctggcagcaaggagtgaaaacgaaggcacatcagatggggagacgtacattgagaagtacactcgaggcgtgctgcaggtggaaaacattctgagtcttgaacggctccggcaggccgtcacagtcaaagaagcactttccaccaaagcccggcacattcggaggagcctcagtacaccaaatgttcataatgtctcttccagccgaccggacctttctggctttgatgaagatgacaagggttggccagagaaccagttggacatgtctgactatagctccagttaccaagatgtagcatgttatggaactttacccagggattctcctcgaaggaataaagaaggttgtacatcagagactcctcatgccttaaccgtcagcccttttaaagcattctctcctcagccaccaaagtttttcaagcccctaatgcctgtaaaagaggagcataagaaaaggatagccctggaagcaaggcctcttctaagccaggaggactctgaggaggaagaaaatgagctggaagctattaacaggaagctaataagttcacagccttatgtacctgtggagtttgctgacttcagtgtttacaatgccagcttggagaacagggaatggttttcctctaaagtagatctgtcaaactcacgggtcttggagaaagaagtgtcccgtagccctaccaccagcagtattaccagtggctacttttcccacagtgcctccaatgccaccctgtctgacatggtggtcccttctagtgacagctcagaccagctggccattcagacgaaggatgcagactccaccgagcactccacaccatcgcttgtgcatgatttcaggccgtcctcaaacaaagagttgacagaagtcgaaaaaggcttggtaaaggacaagataattgtggtgccactcaaggaaaacagtgccttagccaaagggagcccatcatcccagagcatccctgagaaaaactccaaatcactgtgcaggactggctcatgttcagaactagatgcctgccccagcaaaattagccagccagccaggggattctgccccagggaggtgacggtagaacacaccaccaacatccttgaagaccattctttcacagaatttatgggagtgtcagagggaaaagattttgatggtttgacagattcttctgctggagagctttccagtaggaggagtctaccaaataaaacaggcggcaagactgtctccgatgggctccaccaccccagccagctgcattccaagttagagaatgaccaggtaataattccagaggcagccttttgggttctgtgctgtcaatgagtatgtctaactgtatgtcaaccccagaggcccttcaccgcaacaacttggtaggaaagattcatccagttgtttgtgacagcaaagatgagcccacagagaagcaggctcacttcctgcacagctgtctctgtcggagagcaagtctgttttgggaactagaacgcaattgtgaaattataagaccagtggatttttttacctggcacatgggttggtgttgaatgaagtgttcagatggataaggatcaatctcatattcattccctgggatgtttagttaccagttttcccaaagtgttctggtagcatctaccatatttcatcaaatctgtgattcctttgattattatatgaaccattattttatgtatcattaagaaaaaatactgccaattaaactctgtcatatcaa

SEQ ID NO: 15368 - DNA, 5707 bp, Homo sapiens
  source 1..5707: mol_type = unassigned DNA
cgggcgagcgcagccaacatgtcggataccaaggtaaaagttgccgtccgggtccggcccatgaaccgacgagaactggaactgaacaccaagtgcgtggtggagatggaagggaatcaaacggtcctgcaccctcctccttctaacaccaaacagggagaaaggaaacctcccaaggtatttgcctttgattattgcttttggtccatggatgaatctaacactacaaaatacgctggtcaagaagtggttttcaagtgccttggggaaggaattcttgaaaaagcctttcaggggtataatgcgtgtatttttgcatatggacagacaggttcgggaaaatccttttccatgatgggccatgctgagcagctgggccttattccaaggctctgctgtgctttatttaaaaggatctctttggagcaaaatgagtcacagacctttaaagttgaagtgtcctatatggaaatttataatgagaaagttcgggatcttttagaccccaaagggagtagacagtctcttaaagttcgagaacataaagttttgggaccatatgtagatggtttatctcaactagctgtcactagttttgaggatattgagtcattgatgtctgagggaaataagtctcgaacggtagctgctaccaacatgaacgaagaaagcagccgctcccatgctgtgttcaacatcataatcacacagacactttatgacctgcagtctgggaattccggggagaaagtcagtaaggtcagcttggtagacctggcgggtagcgaaagagtatctaaaacaggagctgcaggagagcgactgaaagaaggcagcaacattaacaaatcgcttacaaccttggggttggttatatcatcactggctgaccaggcagctggcaagggtaaaagcaaatttgtgccttatcgagattcagtcctcacttggctgcttaaggacaacttggggggcaacagccaaacctctatgatagccacaatcagcccagccgcagacaactatgaagagaccctctccacattaagatatgcagaccgagccaaaaggattgtgaaccatgctgttgtgaatgaggaccccaacgcaaaagtgatccgagaactgcgggaggaagtcgagaaactgagagagcagctctctcaggcagaggccatgaaggcccctgaactgaaggagaagctcgaagagtctgaaaagctgataaaagaactaacagtgacttgggaagagaagctgagaaaaacagaagagatagcacaggaaagacaacgacaacttgaaagcatggggatttccctggagatgtccggtatcaaggtgggggatgacaaatgctacttagtcaatctgaatgcagaccctgctcttaacgaacttctggtttattatttaaaggatcacaccagggtgggtgcagatacctctcaagatatccagctttttggcataggaattcagcctcagcactgtgagattgacattgcatctgatggagacgtcactctcactccaaaagaaaatgcaaggtcctgtgtgaacggcacccttgtgtgcagtaccacccagctgtggcatggtgaccgaatcctatggggaaataatcacttttttagaataaacttacctaagaggaaacgtcgagattggttgaaagactttgaaaaagaaacgggcccgccagagcatgacctggatgcagccagtgaggcttcctctgaaccagactataactatgaatttgcacagatggaagttatcatgaaaaccctgaatagtaatgacccagttcaaaatgtggttcaggtcctggagaaacaatacctagaagaaaagagaagtgccctagaggagcagcggctcatgtatgagcgggaactggagcaactccgccagcagctctcccccgacaggcagccacagagtagcggccctgaccgcctggcctacagcagccagacagcgcagcagaaggtgacccagtgggcagaagagagggatgaactcttccgacaaagcctggcaaaactgcgagagcagctggttaaagctaataccttggtgagggaagcaaacttcctggctgaggaaatgagcaaactcaccgattaccaagtgactcttcagatccctgctgcaaacctcagtgccaataggaagagaggtgcaatagtgagtgaaccagctatccaagtgaggaggaaaggaaagagcacccaagtgtggaccattgagaagctggagaataaattaattgacatgagagacctttaccaagaatggaaggaaaaagttcctgaggcaaagagactctacggaaaacgaggtgaccctttctatgaagcccaagaaaatcacaacctcatcggggtggcgaatgtattcttggaatgcctcttctgtgatgtgaaacttcagtatgcagtccctatcatcagccagcagggggaggttgcagggcgtctccacgtggaagtgatgcgtgttacaggagctgttccagagcgtgtggtggaggatgactcttcggagaattccagtgaaagtgggagccttgaagtcgtagacagcagcggggaaatcattcaccgagtcaaaaagctgacatgtcgggtaaaaattaaagaagcaacggggctgcccttaaacctctcaaattttgtcttctgtcaatacacattctgggaccagtgtgagtctacggtggctgccccggtggtggaccccgaggtgccttcaccacagtccaaggatgcccagtacacagtgaccttctcccactgtaaggactatgtggtgaatgtaacagaagaatttctggagttcatttcagatggagcactggccattgaagtatggggccaccggtgtgctggaaatggcagctccatctgggaggtcgattctcttcatgctaagacaagaacactgcatgacaggtggaatgaagtaacgcgaagaatagaaatgtggatctccatattagaattgaatgagttaggagagtatgctgcagtggaacttcatcaggcaaaagatgtcaacacaggaggcatctttcaacttagacagggtcattcccgtagagtacaagtcacggtgaaacctgtgcagcattcagggacactgccacttatggttgaagccatcctgtcagtatccatcggctgtgtaactgccaggtccaccaaactccaaagagggctggacagttaccaggaagaagacttaaactgcgtaagggagaggtggtcagatgcactcattaaacgacgagaatacctggatgaacagataaaaaaagtcagcaataaaacagagaaaacagaggacgatgtggagcgggaagcccagcttgtggagcagtgggtagggctgactgaggaaaggaatgctgtgctggtgccagccccaggcagtgggattcctggggcacctgccgactggatcccacctcctggaatggaaacccacataccagttctcttcctcgatttgaatgcggatgacctcagtgccaatgagcagcttgttggcccccatgcatccggcgtgaactccatcctgcccaaggagcatggcagccagtttttctacctgcccatcataaagcacagtgatgatgaggtttcagccacagcctcttgggattcctcggtgcatgattctgttcacttgaatagggtcacaccacagaatgaaaggatttacctaattgtgaaaaccacagttcaactcagccaccctgctgctatggagttagtattacgaaaacgaattgcagccaatatttacaacaaacagagtttcacgcagagtttgaagaggagaatatccctgaaaaatatattttattcctgtggtgtaacctatgaaatagtatccaatataccaaaggcaactgaggagatagaggaccgggaaacgctggctctcctggcagcaaggagtgaaaacgaaggcacatcagatggggagacgtacattgagaagtacactcgaggcgtgctgcaggtggaaaacattctgagtcttgaacggctccggcaggccgtcacagtcaaagaagcactttccaccaaagcccggcacattcggaggagcctcagtacaccaaatgttcataatgtctcttccagccgaccggacctttctggctttgatgaagatgacaagggttggccagagaaccagttggacatgtctgactatagctccagttaccaagatgtagcatgttatggaactttacccagggattctcctcgaaggaataaagaaggttgtacatcagagactcctcatgccttaaccgtcagcccttttaaagcattctctcctcagccaccaaagtttttcaagcccctaatgcctgtaaaagaggagcataagaaaaggatagccctggaagcaaggcctcttctaagccaggaggactctgaggaggaagaaaatgagctggaagctattaacaggaagctaataagttcacagccttatgtacctgtggagtttgctgacttcagtgtttacaatgccagcttggagaacagggaatggttttcctctaaagtagatctgtcaaactcacgggtcttggagaaagaagtgtcccgtagccctaccaccagcagtattaccagtggctacttttcccacagtgcctccaatgccaccctgtctgacatggtggtcccttctagtgacagctcagaccagctggccattcagacgaaggatgcagactccaccgagcactccacaccatcgcttgtgcatgatttcaggccgtcctcaaacaaagagttgacagaagtcgaaaaaggcttggtaaaggacaagataattgtggtgccactcaaggaaaacagtgccttagccaaagggagcccatcatcccagagcatccctgagaaaaactccaaatcactgtgcaggactggctcatgttcagaactagatgcctgccccagcaaaattagccagccagccaggggattctgccccagggaggtgacggtagaacacaccaccaacatccttgaagaccattctttcacagaatttatgggagtgtcagagggaaaagattttgatggtttgacagattcttctgctggagagctttccagtaggaggagtctaccaaataaaacaggcggcaagactgtctccgatgggctccaccaccccagccagctgcattccaagttagagaatgaccaggtaataattccagaggcagccttttgggttctgtgctgtcaatgagtatgtctaactgtatgtcaaccccagaggcccttcaccgcaacaacttggtaggaaagattcatccagttgtttgtgacagcaaagatgagcccacagagaagcaggctcacttcctgcacagctgtctctgtcggagagcaagtctgttttgggaactagaacgcaattgtgaaattataagaccagtggatttttttacctggcacatgggttggtgttgaatgaagtgttcagatggataaggatcaatctcatattcattccctgggatgtttagttaccagttttcccaaagtgttctggtagcatctaccatatttcatcaaatctgtgattcctttgattattatatgaaccattattttatgtatcattaagaaaaaatactgccaattaaactctgtcatatcaa

SEQ ID NO: 15369 - DNA, 1327 bp, Homo sapiens
  source 1..1327: mol_type = unassigned DNA
cgggatggcccgcgcgcctcggcgctgcctctcggagctcacggcggagcggcggcggccgcgctcgaggggcgcgcggctgcagcggcggcggcgccgcgcgtgaggggccgcctaaggccgagcgggcgcggcgagcggccgggcgagcgcagccaacatgtcggataccaaggtaaaagttgccgtccgggtccggcccatgaaccgacgagaactggaactgaacaccaagtgcgtggtggagatggaagggaatcaaacggtcctgcaccctcctccttctaacaccaaacagggagaaaggctggtcacagtggctcacatctctaattccagcactttgggaggccaaggcaagaggatcacttgagccgaggatttcaagaccagcctttgcaacatggcaaaaccccatctctacaaaaaatttgtttaaaattagctggacgtggtggcgcatacctgtggtcccagctactcaggagactgaggcaggaggctccagtgagctgtttgagccactgcacgccagcctgggtgacagagccagaccctgtcttcaaaaaaataaaaaattaaagtggcgtgaggtgaattgcatcagaccccacatatgaataaatggatggttggcaaagtgttatatataataagtacaattccttaggtgtccttaggtgtactactaaagtgggtttgtgatagcccatatatttagtcatttatgttcaatagtgttatattcatttgagaaattattttaagaaatttaaaattaagaaagttttaaaagtcctttagtaattagagatttctctgggtgggtggatacggttgtttctaattatcccacacatttaatcatttatgttcaatagtgttgtattttttgagaaattattttaagaaatgcaaaattaagaaagatttaaaagtcctttagtaattagagatttttctagttgggtggataagggttatttctaagtatcttttgagtattttttgtcatatatttcgttttttaggcatgattaaaagtgtatttgaggactcttagacacataaagttgaattcctcagattgagagatagttattgctttttaattttgttaagatgctcagctgttggataaataatgcttttgttaaaatcctgtggggcattcatccaacaaatggggtataagaaaggaatgtgtgtttgtgtacatgttcttctatctgttggtcctaaagagtgtaagaaggtaaatttgaccagtgaaattcataattacagagttttatttggtaatccattaataaatcattttctgaaa

SEQ ID NO: 15370 - DNA, 1175 bp, Homo sapiens
  source 1..1175: mol_type = unassigned DNA
agtttccagaggaatagctcctgcccccgccctctctgtttctccccaaaataaccattctccagatccaggactcagtaaccttgcagcatcctacttgaatcctgtcaaatccttcgtgccgcaaatgccaaagctcctcaagtctctctttcccgtccgcgatgagaagaggggcaagcggccgtctcccctcgcacaccaggctcagccggagatgggccctgacgtgctggtgcagacgatgggggccccggccttgaagatctgcgacaaacctgccaaagtgccttccccaccgcctgtcatagctgtcacagcggtcaccccggctccggaggcacaggacgggccccccagccccctgagtgaagcctctagcgggtacttctcccacagcgtctccaccgcgaccctgtcggacgccctgggccccggcctggacgctgcggccccgccggggtccatgcccaccgcccctgaggccgagcccgaggcgcccatcagccaccccccaccgcccacggccgtccccgccgaggagccccctggcccccagcagctcgtgagccccggtcgggagcgccccgacctcgaggccccggcgcccggctccccgttccgcgtccggagggtgcgggcctcggagttgcgctccttctcgcgcatgctggctggggaccccggctgctccccgggggccgaggggaatgcgccggccccgggcgccgggggacaggccctggcctctgattccgaggaagctgacgaggtcccggagtggctccgagagggcgagttcgtcaccgtgggcgcccacaaaacgggcgtggtgagatacgtggggcctgccgacttccaagagggcacgtgggtcggcgtggagctcgacctgccctcaggtaagaatgacggttccatcggcgggaagcagtacttcaggtgtaaccctggctacgggctgctggtcaggcccagccgggtccgcagggccacgggccctgtgcggcggcgcagcacaggactccggctgggtgcccccgaggcccgccggagcgccaccctctcgggctccgccaccaacctggcctcgctgacagctgccctggccaaggccgacaggagccacaagaaccctgagaaccggaaatcctgggccagctgagccgctgcct

SEQ ID NO: 15371 - DNA, 8745 bp, Homo sapiens
  source 1..8745: mol_type = unassigned DNA
ggcagacggaagccgaacgagttcctcggcggctgcaggatgggggactccaaagtgaaagtggcggtgcggatacgacccatgaaccggcgagagactgacttgcataccaaatgtgtggtggatgtggatgcaaacaaggttattcttaatcctgtaaatacgaatctttccaaaggagatgcccggggccagccgaaggtgtttgcttatgatcattgtttctggtctatggatgaatctgtcaaagaaaagtatgcaggtcaagatattgttttcaagtgccttggagagaatatcctgcagaatgcttttgatggctacaatgcatgtatctttgcctatggacagactggctctggaaaatcttataccatgatgggcacagctgaccaacctggattaatcccaagactttgcagtggactctttgaacgaactcagaaagaggaaaatgaagaacagagttttaaagtagaagtgtcctacatggaaatttataatgaaaaagttcgagaccttcttgatcccaaaggaagccgtcagacgttgaaagtcagagagcatagtgtgttgggaccttatgtcgacggactttctaaactggctgtcacaagctacaaggatattgagtcgttgatgtctgagggtaacaaatctcgcacagttgctgcaaccaacatgaacgaggagagtagccgatcccatgcagttttcaaaatcaccctcacacatactctctacgatgtgaagtctgggacatctggagagaaagtgggcaaactcagcctggtggatttagctggcagtgaacgagcaacgaagacaggcgctgcaggggacaggctgaaggaagggagcaacattaacaagtccctcacaaccctcggtctggttatctcagctcttgcagatcagagtgctggcaaaaacaagaataaatttgttccatatcgtgactcagttctcacttggctgctcaaagacagcctcgggggtaacagcaagaccgccatggtggctactgtgagtcctgcagctgataactatgatgaaaccctctcaactctgcggtatgcagatcgagccaagcacattgtaaaccacgctgtggtgaatgaggaccctaatgcccgaattatccgggatctccgggaagaagttgagaaactccgggagcagctgaccaaagcagaggcaatgaaatctccagagctaaaggaccggctggaagaatctgagaagctaatccaggaaatgactgtgacctgggaggagaaattaaggaaaacggaggagattgcacaggaacgacagaaacagcttgagagtcttggaatatctcttcagtcttcgggaatcaaagttggggatgataaatgcttccttgtgaatctgaatgctgacccagctctgaatgagcttctggtgtactatttaaaggaacatacattgatagggtcagcaaattcccaagatatccaactgtgcggcatgggaattcttcctgaacactgtattatagacatcacgtcagaaggccaggttatgctgactcctcagaagaacaccagaacatttgtaaatgggtcatctgtctccagtccaatacagctacaccatggggacaggatattatggggaaacaatcatttcttcagactcaatttgcctaaaaagaaaaagaaagcagaacgagaggatgaggaccaggatccctccatgaagaacgagaatagttctgagcagctggatgtagacggagactcctccagcgaggtgtccagtgaagttaactttaattacgaatacgcacagatggaggtcaccatgaaggccctgggcagcaatgatccgatgcagtccatattaaacagcttagaacaacagcatgaagaagaaaaacgatctgcactggagcgccagaggcttatgtatgagcacgaattggagcagctccggagaaggctgtctcctgagaagcagaactgccggagcatggacaggttttctttccactcgcccagcgctcagcaacgcttaagacagtgggctgaggagagagaagcaacgttgaataacagcctgatgaggctgagggaacaaattgttaaggccaatctattggtgagagaagctaattacattgctgaggagctggataaaagaacagaatacaaagttaccctacagattccagcctccagcctggatgccaacaggaagcgaggctctcttcttagtgagcctgcaatccaggtgagaagaaaaggaaaaggaaagcagatttggtctttggaaaaactggacaacaggctgttggatatgagagacctttatcaggagtggaaagagtgtgaagaagataacccagtaatacgatcatacttcaaacgtgctgatccattctatgatgagcaggaaaatcacagtctcattggggtggccaatgtcttcctcgagtcacttttctatgatgtgaagttacaatacgctgttcccatcatcaaccagaaaggagaggtggcaggtcggctgcacgtggaggtgatgcgactcagtggtgatgttggggagaggatcgcaggaggcgatgaggtggcagaggtctcctttgagaaggagacccaggagaacaaactggtgtgcatggttaaaatcctgcaagctactgggttgccacagcatctgtcccactttgtgttctgcaaatacagcttctgggatcaacaggagccggtgattgtcgctcctgaagtggacacctcctcctcttccgtcagcaaggagccgcactgcatggttgtctttgatcattgcaatgagttttctgttaacatcaccgaagactttatcgagcatctttccgaaggagcattggcaattgaagtatatggacataaaataaacgatccccggaaaaaccccgccctgtgggatttgggaatcatccaagcaaagacacgtagtcttcgggacagatggagtgaagtgaccaggaaattggaattctgggttcaaatcttggaacagaatgagaatggtgaatactgccctgtagaagtgatttctgcaaaggatgtcccaacaggaggaatcttccagctccggcaggggcagtcccggagagttcaagtcgaagtgaagtcagtgcaggaatctgggactttaccactgatggaagaatgtatactgtctgttggcattggatgtgtcaaagttagaccgctcagagcccccagaacacatgagaccttccatgaggaagaggaagacatggacagctaccaggatcgagatttagagagacttcgtagaaaatggctaaatgcattaacaaaacgtcaggagtacttggatcaacaattgcaaaagcttgtcagtaaacgtgataaaacagaggatgatgctgaccgtgaagcgcagcttctggagatgcggttgaccctaactgaggagaggaacgcggtgatggtcccctctgctggcagtggtattccaggggccccagcagaatggaccccagtacctgggatggagacacacattcctgttatattcctggacttaaatgctgatgatttcagctctcaggataatcttgatgacccagaagctggtggatgggatgcgaccttgactggggaagaagaagaggagttctttgaattgcagattgtgaagcagcatgatggggaggtgaaagcagaagcctcctgggactccgcggtgcatggctgccctcagctcagcaggggcacgcccgtggacgagcggttgttcctgatcgtgcgcgtgacggtccagctcagccaccctgctgacatgcaactggtgttacgcaagagaatctgtgtcaatgttcacggccgccagggttttgcacagagtctcctaaaaaagatgtctcatcgaagttctattcctggctgtggagtgacttttgaaattgtctccaatattccagaggatgcccagggagtggaagaacgggaagcattagcaagaatggcagccaatgttgaaaacccagcttctgctgactcggaggcttatattgaaaagtacctcaggagcgtgctggctgtagaaaacctcctgactttagatcgtctgcgccaggaagttgcagtgaaggaacagttaacaggaaaaggaaagttgagcaggaggagtatcagttctccaaatgtgaacagattgtctggaagccgacaagatctcattccatcatacagtctaggcagcaacaagggccggtgggaaagtcagcaggatgtatcccaaaccacagtttccagaggaatagctcctgcccccgccctctctgtttctccccaaaataaccattctccagatccaggactcagtaaccttgcagcatcctacttgaatcctgtcaaatccttcgtgccgcaaatgccaaagctcctcaagtctctctttcccgtccgcgatgagaagaggggcaagcggccgtctcccctcgcacaccagcccgtgccccgcatcatggtgcagtcagccagcccggacatcagggtgaccaggatggaggaggctcagccggagatgggccctgacgtgctggtgcagacgatgggggccccggccttgaagatctgcgacaaacctgccaaagtgccttccccaccgcctgtcatagctgtcacagcggtcaccccggctccggaggcacaggacgggccccccagccccctgagtgaagcctctagcgggtacttctcccacagcgtctccaccgcgaccctgtcggacgccctgggccccggcctggacgctgcggccccgccggggtccatgcccaccgcccctgaggccgagcccgaggcgcccatcagccaccccccaccgcccacggccgtccccgccgaggagccccctggcccccagcagctcgtgagccccggtcgggagcgccccgacctcgaggccccggcgcccggctccccgttccgcgtccggagggtgcgggcctcggagttgcgctccttctcgcgcatgctggctggggaccccggctgctccccgggggccgaggggaatgcgccggccccgggcgccgggggacaggccctggcctctgattccgaggaagctgacgaggtcccggagtggctccgagagggcgagttcgtcaccgtgggcgcccacaaaacgggcgtggtgagatacgtggggcctgccgacttccaagagggcacgtgggtcggcgtggagctcgacctgccctcaggtaagaatgacggttccatcggcgggaagcagtacttcaggtgtaaccctggctacgggctgctggtcaggcccagccgggtccgcagggccacgggccctgtgcggcggcgcagcacaggactccggctgggtgcccccgaggcccgccggagcgccaccctctcgggctccgccaccaacctggcctcgctgacagctgccctggccaaggccgacaggagccacaagaaccctgagaaccggaaatcctgggccagctgagccgctgccttagggcgaacttttctgggggtgcccggccccttttgagccctgccagtgacagccctgaggagccaggagcccggtggccccttccccaggggcagggcgatgaatgctttttgcacgacacagggctggtgacctccctgggcctctggaagctttgtttcttctgtacccgggtaaagtgggggcctcaactgtgcctcctcaggtggatggaaggttctgggtgcccgcaggggctgggggatgctaggactgagaccctgggtggtgcagcgcctggtgatcttgctgtgtgcctgtgcctggggccttatgttgctctttctatcatttccattctggtggccccactaatgtcttaacctaaaccataattgtaaccagtgcctttcctccccactggagggcaagcccccccacccacccaggatgtcctggctcactccgcaagccccccagcctcccaccctggtcccagtttcccgcaaagtgcctctgggggaccccccagcctcccaccctggtcccaggttccacaagtgcctctggagggccctgggctctggcagatggtcctggtgccccagacgggggccgagggcctgagcccccccatccctcctctgccagggtttcttagcggtttctctgtggatgttttggcatctttagacacctggaaagtctcttatgtttgccgtttattcccttcacagaaggcttggaatgtatttatttatatttattttttcaaaatccgaaatcatttgcgagccgcaatcgtcgtctgcctgtgtgggggggcccagggcctgccttgcacgttgcagcctctctggccattgcagagctgctggcctcctgcccaggtggagggtcctggggacggcagaggataaagccccctcctcacatccctctattgcggatccacagtggccttactcttaacttggatgagagcaaaaacctgggagaatgatgtgcttctgtagtcggtgacaaaggaagaggcattgctactttatttggtgcacttttggtttctaggaaggtctttgggtcattttaacttctcggcaactcccagactctcagagtgtggggctggggcctggcggctgggctggtgcagggagtgtgctggttagtctccagaccctcacagcagccacgcccccaggcccaccgtgcatggtgtgggcgggacagccggaagcttccggggtggcctccacctcctggctggggcacttatgctcccagagcctttggtgccaggtttgtgggatgggggttagcgtctatgtgtggaaggccaccaatctagggacaggagtcctgggtcaagattcacacagccacccttggagctggtttctagttctcacatttagtcaacatctagaaagcgctgcggaaggctctggttctctagggacttgaaggcgccaacagagtagtctccatggtgggcctgtcccagccctggctgcgaggacaggttgtctttctctccccagttggcgagggacacgaaggctgcggccgggctggcagagggcccggcccctggggggaggcactcctccagggctctccctgtccttagccgattttgagggaaccctgtggcacctgtccctggatgaagagctgtcacctctgccttgccctttaactcaacccgcttcccagcacagcggctttctttttaaaacctgtttcactgagaagtttgtttttgggtccgctggtgtcactatggcctgggtgagaggccagcactgctgctgccctgaggggaaacgcctgggccgtgtagtggggacgctctgggaatggtggcggacgggcagcgtgggtgggacctggcacttcgtggtggctgagccatccacccagcagcggcctcctgtagcaccatcttgggaaagtcctgggggacgtgtgtgtcgtgctttttaccatcggtttgacttacagtggagtagaacgagccagagttcctgacttgagcaggtggatttgggcccaggccctgttcactcttgcttctcggtgcggactaatgtcagcttgtggctgggaaagagggatgtgcagtgacgtggtcaccaaggcagtgagccccgctgaccccgggccagcacttggcaggcaggaggtgcggtctccagagtggtgggccagggcgggctggcctccgtcttctatcttcttttcttgcctccctgaccagcagactcacctcccaagaacgcctgcccgcccacccgccttaggactcccgatgcgctcctggaaggccccaggagtggcaccttagtgtgggtcggcccgcagatggcacccaaggccgggaagggcagtaactgcacacgcggcgctgtcagagatgggggtgggggatgcttctgggggccctgcctccccattgtgtgcccagaacatccctggccccaccccgccacttccctcgggcccttatgaaggactgaggctccagggtgagaaggctcacttctgccccgggcactgcgtccagcagcagaggggacagggggcaggtgtgtgactgggttcctgggtacccaggcctgaccagagggagcgggagggcagaggtgaggagggggaagatgtttctgggcctaccaaggttcaacaagagaacggagctgggaatgtgactgctggagcctgagaggtggaggagttctgatcccccgttacttcctagcattttctcctcttgccttaaaagttccctgtatgtgaaacgggaagtcctgagagtgtgtgttggtggctgtgcgcacgcacacaagacgggagtcaccctgtgcttcctgcccaagatactgacccattgaacccccaaagcatctttctctccacaaagtccgtggtgccttcctggtgggctgcagacactaatggtgttggggggtcttggaacagcttctctatgtgtggattcgtgtaaatgcgaagagttcacatataaagaagtgactttgattctgtgattatattgatttggtacacagtaaatgggagtttaaaaaatccaaagactctaatgacttgtaaagactctaatgatttgtatcatgtaatgaactaaaccacctgtaattttgtaccgtatgtgtctttccatcaaatgaccaacagcttctcaataaaaccagaccatttctcacctgc

SEQ ID NO: 15372 - DNA, 7274 bp, Homo sapiens
  source 1..7274: mol_type = unassigned DNA
ctggggagccggcgctggaggtggtgagtggcgtggggactgtgtcgagggggtccccaaggtgccggaccctgcggaggggcgaagtttcggcactggggagggcgtgcggacgctttccctacaggcgaccactgctctgcgggcgggtggtcttagctccagtcccccattcagttcctcagcattccaggtcggcggcgaaggggtccccgaacgaagggcgcaaggcagcgtctctgctgggaccgggaagccggacttcagggcctctcggcccgtgggcttctccccgagtctccccgagtcggttggcattaagagtttagcagatactttcagaaatggatacataagaaatggctggaaatcaaatgaatgtccaaagaagagcttagggtcttagtaacattcttttttaaaataactgtctgccaaaatgtcattacacagtactcataatagaaataacagcggtgatattcttgatattccttcttcccaaaatagttcatcactgaatgccctcacccacagtagccgacttaagctgcatttgaagtcggatatgtcagaatgtgaaaatgatgatccattattgagatctgcaggtaaagtcagagacataaatagaacttatgttatttctgccagtagaaaaacagcagacatgccccttacccctaatcctgtaggtagattggcacttcagaggagaactacaaggaacaaagaatcatctttgcttgttagtgagttggaagacacaactgaaaaaacagcagaaacacgtcttacattacaacgtcgtgctaaaacagattctgcagaaaagtggaaaacagctgaaatagattctgtcaaaatgacactgaatgtgggaggtgaaacagaaaataatggtgtttctaaggaaagtagaacaaatgtaaggattgtaaataatgctaaaaactcttttgttgcctcttctgtacctttagatgaagatccacaggtcattgaaatgatggctgataagaaatacaaagaaacattttctgcccccagtagagcaaatgaaaatgttgcacttaagtactcaagtaatagaccacccattgcttccctgagtcagactgaagttgttagatcaggacacttgacaacgaaacctactcagagcaagttggatatcaaagtgttgggaacaggaaacttgtatcatagaagtattgggaaggaaattgcaaaaacttcaaataaatttgggagcttagaaaaaagaacacctacaaaatgtacaacagaacacaaactgacaacaaagtgcagcctgcctcagcttaagagcccagctccatcaatactgaagaatagaatgtctaaccttcaagttaaacaaagaccaaaaagttcctttcttgcaaataaacaggaaagatccgcagaaaatacaattcttcccgaagaagaaactgtagttcagaacacctctgcaggaaaagaccccttaaaagtagagaatagtcaagtgacagtggcagtacgcgtaagacctttcaccaagagagagaagattgaaaaagcatcccaggtagtcttcatgagtgggaaagaaataactgtggaacaccctgacacgaaacaagtttataattttatttatgatgtttcattctggtcttttgatgaatgtcatcctcactacgctagccagacaactgtctatgagaagctagcagcaccactcctagaaagagccttcgaaggcttcaatacctgtctttttgcttatggtcagactggctctggaaaatcatatacgatgatgggatttagtgaagaaccaggaataattccaagattttgtgaagatcttttttctcaagtagccagaaaacaaacccaagaggtcagctatcacattgaaatgagcttctttgaagtatataatgaaaaaattcacgaccttctggtttgtaaagatgaaaatgggcagagaaagcaaccactgagagtgagggaacatcctgtttatggaccatatgttgaagcactgtcaatgaacattgtcagttcttacgctgatatccagagttggctagaattgggaaataaacaaagagctactgctgctactggtatgaatgataaaagttcccgatctcattcagttttcaccctggtgatgacccagaccaagacagaatttgtggaaggggaagaacacgatcacagaataacaagtcgaattaacctaatagatctggcaggcagtgagcgctgctctacggctcacactaatggagatcgactaaaggaaggtgtgagtattaataagtccttgctaactttgggaaaagttatatctgcactttcggaacaagcaaaccaaaggagtgtttttattccttatcgtgaatctgttcttacatggctgttaaaagaaagtctgggtggaaattcaaaaactgcaatgattgctacgattagtcccgctgccagcaacatagaagaaacattaagcacacttagatatgctaaccaagcccgtttaatagtcaacattgctaaagtaaatgaagatatgaacgctaagttaattagagaattgaaggcagaaattgcaaagctaaaagctgctcagagaaacagtcggaatattgaccctgaacgatacaggctctgtcggcaagaaataacatccttaagaatgaaactgcatcaacaggagagagacatggcagaaatgcaaagagtgtggaaagaaaagtttgaacaagctgaaaaaagaaaacttcaagaaacaaaagagttacagaaagcaggaattatgtttcaaatggacaatcatttaccaaaccttgttaatctgaatgaagatccacaactatctgagatgctgctatatatgataaaagaaggaacaactacagttggaaagtataaaccaaactcaagccatgatattcagttatctggggtgctgattgctgatgatcattgtactatcaaaaattttggtgggacagtgagtattatcccagttggggaagcaaagacatatgtaaatggaaaacatattttggaaatcacagtattacgtcatggtgatcgagtgattcttggtggagatcattattttagatttaatcatccagtagaagtccagaaaggaaaaaggccatctggaagagatactcctataagtgagggtccaaaagactttgaatttgcaaaaaatgagttgctcatggcacagagatcacaacttgaagcagaaataaaagaggctcagttgaaggcaaaggaagaaatgatgcaaggaatccagattgcaaaagaaatggctcagcaagagctttcttctcaaaaagctgcatatgaaagcaaaataaaagcactggaagcagaactgagagaagagtctcaaaggaaaaaaatgcaggaaataaataaccagaaggctaatcacaaaattgaggaattagaaaaggcaaagcagcatcttgaacaggaaatatatgtcaacaaaaagcgattagaaatggaaacattggctacaaaacaggctttagaagaccatagcatccgccatgcaagaattctggaagctttagaaactgaaaagcaaaaaattgctaaagaagtacaaattctacagcagaatcggaataatagggataaaacttttacagtgcagacaacttggagctctatgaaactctcaatgatgattcaggaagccaatgctatcagcagcaaattgaaaacatactatgtttttggcagacatgatatatcagataaaagtagttctgacacttctattcgggttcgtaacctgaaactaggaatctcaacattctggagtctggaaaagtttgaatctaaacttgcagcaatgaaagaactttatgagagtaatggtagtaacaggggtgaagatgccttttgtgatcctgaagatgaatgggaacccgacattacagatgcaccagtttcttcactttctagaaggaggagtaggagtttgatgaagaacagaagaatttctggttgtttacatgacatacaagtccatccaattaagaatttgcattcttcacattcatcaggtttaatggacaaatcaagcactatttactcaaattcagcagagtcctttcttcctggaatttgcaaagaattgattggttcttcgttagatttttttggacagagttatgatgaagaaagaactatagcagacagcctaattaatagttttcttaaaatttataatgggctatttgccatttccaaggctcatgaagaacaagatgaagaaagtcaagataacttgttttcttctgatcgagcaatccagtcacttactattcagactgcatgtgcttttgagcagctagtagtgctaatgaaacactggctgagtgatttactgccttgtaccaacatagcaagacttgaggatgagttgagacaagaagttaaaaaactgggaggctacttacagttatttttgcagggatgctgtttggatatttcatcaatgataaaagaggctcaaaagaatgcaatccaaattgtacaacaagctgtaaagtatgtggggcagttagcagttctgaaagggagcaagctacattttctagaaaacggtaacaataaagctgccagtgtccaggaggaattcatggatgctgtttgtgatggtgtaggcttaggaatgaagattttattagattctggactggaaaaagcaaaagaacttcagcatgaactctttaggcagtgtacaaaaaatgaggttaccaaagaaatgaaaactaatgccatgggattgattagatctcttgaaaacatctttgctgaatcgaaaattaaaagtttcagaaggcaagtacaagaagaaaactttgaataccaagatttcaagaggatggttaatcgtgctccagaattcttaaagttaaaacattgcttagagaaagctattgaaattattatttctgcactgaaaggatgccatagtgatataaatcttctccagacttgtgttgaaagtattcgcaacttggccagtgatttttacagtgacttcagtgtgccttctacttctgttggcagctatgagagtagagtaactcacattgtccaccaggaactagaatctctagctaagtctctcctcttttgttttgaatctgaagaaagccctgatttgttgaaaccctgggaaacttataatcaaaataccaaagaagaacaccaacaatctaaatcaagcgggattgacggcagtaagaataaaggtgtaccaaagcgtgtctatgagctccatggctcatccccagcagtgagctcagaggaatgcacacccagtaggattcagtgggtgtgaatactgatgtgtaggcacttttatgaccacccatgaaagaaaaagaacacttgctcggtaattttctttatgcaggagagtttaagagaaatcagcacagatatttcaaaaaagtccatgtctttttatctttaaaatatctatttatcaaaggccagacacagtggctcacgcctgtaatcccagcactttgggaggcgggcagatcacaaggtcaggagtttgagaccggcctggccaacatggcgaaaccccgtctctactaaaaatacaaaaatttgctgggcatggtggcgcgtgcctgtaatcccagctactaggggggctgaggcaggaggatcgcttgaacctgagaggcagaggttgcagtgagccaagatcatgccactttactccagtctgagcaacagaacgagacttagtcaaaataaataaataaataaataaataaataaataaataaataaataaaatatatttttatctttaaagtgtttaacattggtatactgtctgtagttggttcattagtcgtttataaagggttattttctcatgagtggaaacctgaacaatcagttacctttgtgcctatgccttctctctcctcagacagctgggatgtttatggtgaaatggcctgtacaagtttaactaagacaacttaacttgcattgttaatcaaaaattcttttctcaaagggttaactggttgccattttgaatagtatgttcaagggtgtagcttcctgtttctttccaaattataagtagctacctaaatatagtataattatatattaataatatggcttgctggcacagtagtttaccctgttatctgtgtttcataatgggggctgtatgaatattatttaaaactaataaaatgttgccagaattatactaaactgttggatgagattaggagatcagaggctggaccttctcttgataatgcttgttttgttaaaggtataatgaaataatttgtatatgatttgatgaagattaaagacccttattttccacagctttaaaaaaaaacctttatttatgatcaagtaataaagataatattctacttgtgggatcttacattacggaaatagtttgacgtttttgacctcaagagtatgtataatttgaagagatactttgtaactatgcttgggtgatattgagcagttcctaaagaataattcatttaaaaaaaaagaagaaaaaaaaagaagaattcatttaaataacctgatcctttcatttgcccttttcgaatttacagatactacttgtacatttggcataactagttgaaattggccattcgtaccatgaataaatctgatagtttccttgttaggaagagattgtaagtaaatacagtcattgcagtcagaacagtattagtgaaccttgtgtggtgttttcaagctctttaaaatggtacaatgtagcacatttgctttcatttctttttttatttttggcatttgaccttgtattctttctgaagctctatatgtgtttttattagtcaataatctggcaagtagcactttgcctgtgcagtttgctggagtgtagatgtacatatgaggatttcccgggaggtgcacttctttgaagaacttcctaaagtacctgtatagtagttttcatcttaatattcagtatttaatcttcagtttgtgctttgtaaactcatgacttaattggtcagaaactttttagtgtctttataaaattttgtatacatatttatactaaacacattgtgatactgtatttgaatgaatggtgaaaaaatatttgctattggaattatgtgcactgacaagaaatgttataaagagaatgcctttaataaatcttttcagcattagaa

SEQ ID NO: 15373 - DNA, 8832 bp, Homo sapiens
  source 1..8832: mol_type = unassigned DNA
cacagcgcagagcagccggcgagcggcagcagctccgggctcgagagcccgcgcccatgccagtgcccatgcggggccgccgccagtgacgccggagaggtgttccccccacactggggctcccactactgcgaggagtgacccacgaaggccacagagatggccggggcttcggtgaaggtggcggtgcgggtccgccccttcaattcccgggaaatgagccgtgactccaagtgcatcattcagatgtctggaagcaccaccaccattgttaaccccaaacagcccaaggagacgcccaaaagcttcagctttgactactcctactggtcgcacacctcacctgaggacatcaactacgcgtcgcagaagcaggtgtaccgggacatcggcgaggagatgctgcagcatgcctttgagggatacaacgtgtgcatcttcgcctatgggcagacgggtgccggcaagtcctacaccatgatgggcaagcaggagaaggaccagcagggcatcatcccacagctctgcgaggacctcttctctcggatcaacgacacgaccaacgacaacatgtcctactccgtggaggtcagctacatggagatttactgtgagcgcgtccgtgacctcctgaaccccaagaacaagggcaaccttcgcgtgagggagcacccactgctggggccctacgtggaggacctctccaagctggctgtcacctcctacaatgacatccaggacctcatggactcagggaacaaggccaggaccgtggcggccaccaacatgaatgagaccagcagtcgctcccacgccgtcttcaacatcatcttcacccagaagcgccatgacgcagagaccaatatcaccacggagaaggtgagcaaaatcagcctggtggacctggctgggagcgagcgggctgactccacgggagccaagggcacgcgcctcaaggagggggccaacatcaacaagtcgctgaccaccctgggcaaggtcatctccgccctggctgaaatggactccggacccaacaagaacaagaaaaagaagaagacagatttcattccgtaccgagattccgtgttgacctggctcctccgggaaaacctgggcggtaactcaaggacagctatggtggcagccttgagtcctgcagacatcaactacgatgagacccttagcacgctgaggtatgctgaccgggccaagcagatccgctgcaatgctgtcatcaatgaggaccccaacaacaagctgatccgcgagctgaaggatgaggtgacccggctgcgggaccttctgtacgcccagggtcttggcgacatcactgacatgaccaatgccctggtgggtatgagcccctcatcctcgctctcagccctgtccagccgcgcggcctccgtgtccagcctccacgagcgcatcttgtttgccccgggcagcgaggaggccattgaaagactgaaggaaacagagaagatcatagctgagctcaatgagacctgggaggagaagctgcggcggacagaagccatccggatggagagggaagccctgctggccgagatgggtgtggccatgagggaggatggcggcaccttgggcgtattctctcccaaaaagacaccacacctcgtcaacctgaacgaggacccgctgatgtctgagtgcctgctctactacatcaaggatgggatcaccagagtgggcagggaggatggcgagaggcggcaggacattgttctgagtgggcacttcatcaaggaggagcactgcgtcttccggagcgactccaggggaggcagcgaagctgtggtgaccttggagccctgtgagggggcagacacctacgtcaatggcaagaaagtcacagagcccagcatcctgcgttcaggaaaccgcatcatcatgggtaagagccatgtgttccggttcaaccaccccgagcaggcccggcaggagcgtgagcgcacgccttgtgcggagacgccagctgagcctgtggactgggccttcgcccagcgtgagctgctggagaagcagggcatcgacatgaagcaggagatggagcagaggctccaggaactggaggaccagtaccgccgcgagcgggaggaggccacctacctgctggagcagcagcggctggactatgagagcaagctggaggctctgcagaagcagatggactccaggtactacccggaggtgaacgaggaggaggaggagcccgaggatgaagtccagtggacagagcgggagtgtgagctggcgctctgggccttccggaagtggaagtggtaccagttcacgtctctgcgggacctgctgtggggcaacgccatcttcctcaaggaggccaatgccatcagcgtggagctgaaaaagaaggtacaattccagtttgtcctcctgacggacacactctactcccctctgccacccgacctgctgcccccagaggccgccaaagaccgagagacgcggcccttcccccgcaccattgtggccgtggaggtccaggaccagaagaacggggccacccactactggacgctggagaagctcaggcagcgtctggacctgatgcgggagatgtacgaccgcgctgcagaggtgccctccagtgtcatcgaggactgtgacaacgtggtgaccggcggagaccccttctatgaccgcttcccctggttccggctggtgggcagggccttcgtgtacctgagcaacctgctgtaccccgttcccctggtacaccgtgtggcaatcgtcagcgagaagggcgaggtgaagggcttcctccgcgtggccgtccaggccatctcagccgatgaagaggcccctgattatggctctggcgtccgccagtcgggaactgctaaaatctcctttgatgaccagcattttgaaaagttccagtccgagtcttgccccgtggtggggatgtcccgctcgggaacctcccaggaagagcttcgcatcgtggagggccagggccagggtgcagacgtggggccctcagccgatgaagtcaacaacaacacctgttcagcagtgcccccagaaggcctcctcctagacagctctgagaaagccgccctggatgggcccctggatgctgccctggaccacctccgcctgggcaacaccttcaccttccgtgtgacagtcctgcaggcgtccagcatctctgccgaatatgccgacatcttctgccagttcaacttcatccaccgccacgacgaggccttctccacagagcccctgaagaacacaggcagaggccccccacttggcttctaccacgtccagaacatcgcagtggaggtgaccaagtccttcattgagtacatcaagagccagcccattgttttcgaggtctttggccactaccagcagcacccgttcccgcccctctgcaaggacgtgctcagccccctgaggccctcgcgccgccacttccctcgggtcatgccactgtccaagccagtgcccgccaccaagctcagcacactgacgcggccctgtccgggaccctgccactgcaagtacgacctgctggtctacttcgagatctgtgagctggaggccaacggcgattacatcccggccgtggtggaccaccgtgggggcatgccatgcatggggaccttcctcctccaccagggcatccagcgacggattacggtgacactactgcatgagacaggcagccatatccgctggaaggaagtgcgcgagctggtcgtgggccgcatccgaaacactccagagaccgacgagtccctgatcgaccccaacatcttgtctctcaacatcctctcttccggatacatccacccagcccaagatgaccggaccttttaccaatttgaggctgcgtgggacagctccatgcacaactctctcctgctgaaccgggtcaccccttatcgagagaaaatctacatgacactctccgcttatatcgagatggagaactgcacccagccggctgttgtcaccaaggacttctgcatggtcttctattcccgtgatgccaagctgccagcctcgcgctccatccgcaacctctttggcagtgggagccttcgggcctcagagagtaaccgtgtgactggtgtgtacgagctcagcctgtgccacgtggctgacgcgggcagcccagggatgcagcgccggcgccgacgagtcctggacacatctgtggcctatgtccggggcgaggagaacctggcaggctggaggccccggagtgacagtctcattctggaccaccagtgggagctggagaagctgagcctcctgcaggaggtggagaagactaggcactacctgctcctgcgggagaagctggagaccgcccagcggcctgtcccggaggcactgtccccggccttcagcgaggactctgagtcccatggctcctccagcgcctcctccccgctctcggctgagggccgcccatcacccctggaggctcccaacgagaggcagcgggagctggccgtcaagtgcttgcgcctgctcacgcacacattcaacagagagtacacacacagccacgtctgcgtcagtgccagcgagagcaagctctccgagatgtctgtcaccctgctccgggacccgtcgatgtcccctctaggggtggccactctcaccccctcctccacttgcccctctctggttgaagggcggtacggtgccactgacctgaggaccccgcagccctgctcccggccagccagcccagagcccgagctgctgccagaggccgactccaagaagctcccttcccctgcccgggcaacagagacagacaaggagccccagcgcctgctggtccctgacatccaggagatccgagtcagcccgatcgtttccaagaaggggtacctgcacttcctggagccgcacacgtcaggctgggccaggcgcttcgtggtggtgcggcgcccctatgcctacatgtacaacagcgacaaggacaccgtggagcggttcgtgctcaacctggccactgcccaggtggagtacagtgaggaccagcaggctatgctcaagacacccaacacattcgcggtgtgcacggaacaccgcggcatcctgctgcaggccgccagcgacaaggacatgcatgactggctgtacgccttcaaccccctcctggccgggaccatacggtccaagctctccagaaggaggtctgcccagatgcgggtctgaacctgagccctcccgtgacagccggcaggcccagcccatcccctccctcatcctcgtctgtcctgtcacctgccgcccagcccctctcctgccagacagcccacgaccgggtcgaccccccaggggacgcccatgccaggcccggggacctgtgccacacgaccagctgtgctcccagcagaggctgtgcgtgtcagttcttcttgcagaatgtgctctggtggaacaagttgggagaggctgggggggccaagggcacaggttacgggggttcttgctgccgttctaatatttttttaagcatagacagacttataattaatatacgttagttagtgacattgaaacagtcaactcggaaattaactataagacttgttctatttataagtatttatttctaatgcctccacatagccctgtaatattcagatggaacccccaaccacctccaccctgtttgttcccacatgtgtctcccaagcctgctagggacaggcagggcagggacagccaccttggaaggccgcagtgaggagctgtctggaccagtggggcaccttggggctagcacacgggtgtatcgcctgggccccaggcttctccatggccacatgggtcctgggtgtatgtgtgggagagtgggggggtgtctttggtgcctgaagtctgcgcggcatggagggtggtgtgagttcctctggtgggagggagaacgcacatctcttctgggcggccacctgaggagtgactccaagaagagttccggcagctttccccaggaaagggtgaggggtgacactcggctctggctctgagatgaggcagacggcacccaggctgtgatctgtcctgggcggggaccaggagggagcggggtcgggatcacctgccagtgtgcagactctgggactgcgtgctgtctccggaccatcagggtagggtggtgggttgagaccaggaagtcagggaagatcggaattcagggcgacggtctaggtgtcgagggctgtggcgcagcctcttcagctgcggcgagaaatggagtgagtcaaggtagcttctgggaagaaatgctgccattagcaggtttcttgcaaagactttcctctctttgttcccagggcagagagtttctgtgagtcccactgagaaaatcccatggggtgggggtatcctggtcggtcggcaatggagggtggctggcttggtggttattgtcttcaaggagctcttcgctgctgcatctgcggtgtccctttgttcttgtcccatttcaccccctctgcagacaccaatgtccgagggccacccaggacaggacgggggtcagccccaagctgagagtctggtcataggagtcatgtccagaggcctagggaggttttagggccctccccacccacacccacaggtcgatttggtctctttttagctcaaggaaagacagtagccaagcaacagagcccctctcccgccgtggcccgtgggagcagttacatcgggtctggtgctccagacctagggcccagcactttcatcagatcctgcctcctggagtgggggaaacgcagcaccccactggttctgaggcccctaccctcccaggctgtcccacgtgatgctgacatgagcctcagagaccccaatcccatgcctgggggagagacagcggctcaggagtgggggagcacgggccttctacaccacatgggaaggctctggcatgaggttttcctttgggaaggttgtttgggcccctgaagttccatctccgagagtggtgtgcagggcaggccagggcccatgctggctgcagtctctgtggctgcctgcctgggccagcctgtttgggagctgggactgtgggctcgccttttcgtacctgggctcaggtgcggtgtggccaccgccaccctcatcccctgcctgggaggctctcccaggggctgatgggggggttctgtgagggagaatcagggctcgggaagccacgcctgggaaggcaggacacaggacacagcagctttctttggaaatctcccaggtgaggattcacatcccaaaataaaattcagaagccaggtggcctgtgctccccatgggtgacctctggaggcagtggaccaagatgcagcaaggagaggatgcagaacagcttcttgcagaagcacctgctccggcatccagcgctgcctggaggcaggaaggagaggcagggcaggacacgctggtctgagatgagggggagccccacgggccccaggcaggctagaggaggcacaggccctgccacggccaactcaggtcagccagcctgaggctgtggcctccaaagggtctgggcgcaccccccaggtcgcaggtgtctgaggccagccaacctgcagagcactcgcggcgtgggtgggctgagtggaggtgcctgggagctgcctaaattcagaagcctccactgccatggagactgcctggctgtgtcctctcagccaggtgccgtgttggccttggctaggacccagagccacactgcagcctccgccgactccctccttccgggcctgctctagtgaggagtgcctaagccaggacccagaaactcagagttgatggtgagaggaggccgcctgagtcaggacacctggcttcttgaaaagttcgctctgccagaaaccacctagggaccacgttagctgccttccttgagctccccaggagtcggtttccacatctgtgaggtggagggctggtgtggaggtgctcatggggtgcggtgcttgggagacagccaggcccagggtggctgctgcttcctgctaagtgggggaggtgagacagatctggaaagccgtctccctcagatggtttcatttaatgctttatactgccgagtctgggggcttgttttggtttgggggcagccatcctccaccagaaagggggagctccttccgctgcggctccagatagatggggatgccgggctccaggccgaccagcacttgggatctgatgggacacggccagtgcctaggggtgccaagtccaaggcctcccactgggagtcatcgctgagaagatgccaatgtttcatccaccggctgcacaggcacaaactcccccacccaggacggctgtgatgaggtggccctccctgtcaaccctggtccctggagtccccagcacctggggccctggtggggctgatgtcacaggtgtttactgtgctgctgcactggtcctatgccagcctcacccatgtggggaccacggaaggcacactcccttacccccggtgccgggccgtgcggtcccccagacggacagcagctgtggcgacctgcgtttctccctgggcctgtgcttcctgtagttagtccgtcccctggttcccctgtggctcagaggccgcgtccctggcttgtacatatgtgattgctgtgggcacaccccagaccccatgtcatagctgccgtcccgacgtcacgacgcctgtcccgatgtcttacacccgagtgttagccctaggctcctgtactgtgcgtgcacttgaggctctgtccaattaagaaataaatgtggctcttactcaacacagtc

SEQ ID NO: 15374 - DNA, 9140 bp, Homo sapiens
  source 1..9140: mol_type = unassigned DNA
agccggcgagcggcagcagctccgggctcgagagcccgcgcccatgccagtgcccatgcggggccgccgccagtgacgccggagaggtgttccccccacactggggctcccactactgcgaggagtgacccacgaaggccacagagatggccggggcttcggtgaaggtggcggtgcgggtccgccccttcaattcccgggaaatgagccgtgactccaagtgcatcattcagatgtctggaagcaccaccaccattgttaaccccaaacagcccaaggagacgcccaaaagcttcagctttgactactcctactggtcgcacacctcacctgaggacatcaactacgcgtcgcagaagcaggtgtaccgggacatcggcgaggagatgctgcagcatgcctttgagggatacaacgtgtgcatcttcgcctatgggcagacgggtgccggcaagtcctacaccatgatgggcaagcaggagaaggaccagcagggcatcatcccacagctctgcgaggacctcttctctcggatcaacgacacgaccaacgacaacatgtcctactccgtggaggtcagctacatggagatttactgtgagcgcgtccgtgacctcctgaaccccaagaacaagggcaaccttcgcgtgagggagcacccactgctggggccctacgtggaggacctctccaagctggctgtcacctcctacaatgacatccaggacctcatggactcagggaacaaggccaggaccgtggcggccaccaacatgaatgagaccagcagtcgctcccacgccgtcttcaacatcatcttcacccagaagcgccatgacgcagagaccaatatcaccacggagaaggtgagcaaaatcagcctggtggacctggctgggagcgagcgggctgactccacgggagccaagggcacgcgcctcaaggagggggccaacatcaacaagtcgctgaccaccctgggcaaggtcatctccgccctggctgaaatggtgagtggcccggcccggaacaagaaaaagaagaagacagatttcattccgtaccgagattccgtgttgacctggctcctccgggaaaacctgggcggtaactcaaggacagctatggtggcagccttgagtcctgcagacatcaactacgatgagacccttagcacgctgaggtatgctgaccgggccaagcagatccgctgcaatgctgtcatcaatgaggaccccaacaacaagctgatccgcgagctgaaggatgaggtgacccggctgcgggaccttctgtacgcccagggtcttggcgacatcactgacaccaacactgtgcctggaggacccaaattgaccaatgccctggtgggtatgagcccctcatcctcgctctcagccctgtccagccgcgcggcctccgtgtccagcctccacgagcgcatcttgtttgccccgggcagcgaggaggccattgaaagactgaaggaaacagagaagatcatagctgagctcaatgagacctgggaggagaagctgcggcggacagaagccatccggatggagagggaagccctgctggccgagatgggtgtggccatgagggaggatggcggcaccttgggcgtattctctcccaaaaagacaccacacctcgtcaacctgaacgaggacccgctgatgtctgagtgcctgctctactacatcaaggatgggatcaccagagtgggcagggaggatggcgagaggcggcaggacattgttctgagtgggcacttcatcaaggaggagcactgcgtcttccggagcgactccaggggaggcagcgaagctgtggtgaccttggagccctgtgagggggcagacacctacgtcaatggcaagaaagtcacagagcccagcatcctgcgttcaggaaaccgcatcatcatgggtaagagccatgtgttccggttcaaccaccccgagcaggcccggcaggagcgtgagcgcacgccttgtgcggagacgccagctgagcctgtggactgggccttcgcccagcgtgagctgctggagaagcagggcatcgacatgaagcaggagatggagcagaggctccaggaactggaggaccagtaccgccgcgagcgggaggaggccacctacctgctggagcagcagcggctggactatgagagcaagctggaggctctgcagaagcagatggactccaggtactacccggaggtgaacgaggaggaggaggagcccgaggatgaagtccagtggacagagcgggagtgtgagctggcgctctgggccttccggaagtggaagtggtaccagttcacgtctctgcgggacctgctgtggggcaacgccatcttcctcaaggaggccaatgccatcagcgtggagctgaaaaagaaggtacaattccagtttgtcctcctgacggacacactctactcccctctgccacccgacctgctgcccccagaggccgccaaagaccgagagacgcggcccttcccccgcaccattgtggccgtggaggtccaggaccagaagaacggggccacccactactggacgctggagaagctcaggcagcgtctggacctgatgcgggagatgtacgaccgcgctgcagaggtgccctccagtgtcatcgaggactgtgacaacgtggtgaccggcggagaccccttctatgaccgcttcccctggttccggctggtgggcagttcagccatctctggctgcaacagctaccctcttctcaacacatgcatgagcgagcgcatggctgctctcaccccctcccccaccttctcgagccccgactccgacgccaccgagcctgccgaggagcagagcgtgggggaggaggaggaggaggaggaggaggaggaggatgaggaggaggaggacctggaggacgacgtctttccggagcacgcgctgtgcgacggccgggacccgttttacgaccggccccccctgttcagtttagtaggaagggccttcgtgtacctgagcaacctgctgtaccccgttcccctggtacaccgtgtggcaatcgtcagcgagaagggcgaggtgaagggcttcctccgcgtggccgtccaggccatctcagccgatgaagaggcccctgattatggctctggcgtccgccagtcgggaactgctaaaatctcctttgatgaccagcattttgaaaagttccagtccgagtcttgccccgtggtggggatgtcccgctcgggaacctcccaggaagagcttcgcatcgtggagggccagggccagggtgcagacgtggggccctcagccgatgaagtcaacaacaacacctgttcagcagtgcccccagaaggcctcctcctagacagctctgagaaagccgccctggatgggcccctggatgctgccctggaccacctccgcctgggcaacaccttcaccttccgtgtgacagtcctgcaggcgtccagcatctctgccgaatatgccgacatcttctgccagttcaacttcatccaccgccacgacgaggccttctccacagagcccctgaagaacacaggcagaggccccccacttggcttctaccacgtccagaacatcgcagtggaggtgaccaagtccttcattgagtacatcaagagccagcccattgttttcgaggtctttggccactaccagcagcacccgttcccgcccctctgcaaggacgtgctcagccccctgaggccctcgcgccgccacttccctcgggtcatgccactgtccaagccagtgcccgccaccaagctcagcacactgacgcggccctgtccgggaccctgccactgcaagtacgacctgctggtctacttcgagatctgtgagctggaggccaacggcgattacatcccggccgtggtggaccaccgtgggggcatgccatgcatggggaccttcctcctccaccagggcatccagcgacggattacggtgacactactgcatgagacaggcagccatatccgctggaaggaagtgcgcgagctggtcgtgggccgcatccgaaacactccagagaccgacgagtccctgatcgaccccaacatcttgtctctcaacatcctctcttccggatacatccacccagcccaagatgaccgcgtttcattgggaaatgacactaggaccttttaccaatttgaggctgcgtgggacagctccatgcacaactctctcctgctgaaccgggtcaccccttatcgagagaaaatctacatgacactctccgcttatatcgagatggagaactgcacccagccggctgttgtcaccaaggacttctgcatggtcttctattcccgtgatgccaagctgccagcctcgcgctccatccgcaacctctttggcagtgggagccttcgggcctcagagagtaaccgtgtgactggtgtgtacgagctcagcctgtgccacgtggctgacgcgggcagcccagggatgcagcgccggcgccgacgagtcctggacacatctgtggcctatgtccggggcgaggagaacctggcaggctggaggccccggagtgacagtctcattctggaccaccagtgggagctggagaagctgagcctcctgcaggaggtggagaagactaggcactacctgctcctgcgggagaagctggagaccgcccagcggcctgtcccggaggcactgtccccggccttcagcgaggactctgagtcccatggctcctccagcgcctcctccccgctctcggctgagggccgcccatcacccctggaggctcccaacgagaggcagcgggagctggccgtcaagtgcttgcgcctgctcacgcacacattcaacagagagtacacacacagccacgtctgcgtcagtgccagcgagagcaagctctccgagatgtctgtcaccctgctccgggacccgtcgatgtcccctctaggggtggccactctcaccccctcctccacttgcccctctctggttgaagggcggtacggtgccactgacctgaggaccccgcagccctgctcccggccagccagcccagagcccgagctgctgccagaggccgactccaagaagctcccttcccctgcccgggcaacagagacagacaaggagccccagcgcctgctggtccctgacatccaggagatccgagtcagcccgatcgtttccaagaaggggtacctgcacttcctggagccgcacacgtcaggctgggccaggcgcttcgtggtggtgcggcgcccctatgcctacatgtacaacagcgacaaggacaccgtggagcggttcgtgctcaacctggccactgcccaggtggagtacagtgaggaccagcaggctatgctcaagacacccaacacattcgcggtgtgcacggaacaccgcggcatcctgctgcaggccgccagcgacaaggacatgcatgactggctgtacgccttcaaccccctcctggccgggaccatacggtccaagctctccagaaggaggtctgcccagatgcgggtctgaacctgagccctcccgtgacagccggcaggcccagcccatcccctccctcatcctcgtctgtcctgtcacctgccgcccagcccctctcctgccagacagcccacgaccgggtcgaccccccaggggacgcccatgccaggcccggggacctgtgccacacgaccagctgtgctcccagcagaggctgtgcgtgtcagttcttcttgcagaatgtgctctggtggaacaagttgggagaggctgggggggccaagggcacaggttacgggggttcttgctgccgttctaatatttttttaagcatagacagacttataattaatatacgttagttagtgacattgaaacagtcaactcggaaattaactataagacttgttctatttataagtatttatttctaatgcctccacatagccctgtaatattcagatggaacccccaaccacctccaccctgtttgttcccacatgtgtctcccaagcctgctagggacaggcagggcagggacagccaccttggaaggccgcagtgaggagctgtctggaccagtggggcaccttggggctagcacacgggtgtatcgcctgggccccaggcttctccatggccacatgggtcctgggtgtatgtgtgggagagtgggggggtgtctttggtgcctgaagtctgcgcggcatggagggtggtgtgagttcctctggtgggagggagaacgcacatctcttctgggcggccacctgaggagtgactccaagaagagttccggcagctttccccaggaaagggtgaggggtgacactcggctctggctctgagatgaggcagacggcacccaggctgtgatctgtcctgggcggggaccaggagggagcggggtcgggatcacctgccagtgtgcagactctgggactgcgtgctgtctccggaccatcagggtagggtggtgggttgagaccaggaagtcagggaagatcggaattcagggcgacggtctaggtgtcgagggctgtggcgcagcctcttcagctgcggcgagaaatggagtgagtcaaggtagcttctgggaagaaatgctgccattagcaggtttcttgcaaagactttcctctctttgttcccagggcagagagtttctgtgagtcccactgagaaaatcccatggggtgggggtatcctggtcggtcggcaatggagggtggctggcttggtggttattgtcttcaaggagctcttcgctgctgcatctgcggtgtccctttgttcttgtcccatttcaccccctctgcagacaccaatgtccgagggccacccaggacaggacgggggtcagccccaagctgagagtctggtcataggagtcatgtccagaggcctagggaggttttagggccctccccacccacacccacaggtcgatttggtctctttttagctcaaggaaagacagtagccaagcaacagagcccctctcccgccgtggcccgtgggagcagttacatcgggtctggtgctccagacctagggcccagcactttcatcagatcctgcctcctggagtgggggaaacgcagcaccccactggttctgaggcccctaccctcccaggctgtcccacgtgatgctgacatgagcctcagagaccccaatcccatgcctgggggagagacagcggctcaggagtgggggagcacgggccttctacaccacatgggaaggctctggcatgaggttttcctttgggaaggttgtttgggcccctgaagttccatctccgagagtggtgtgcagggcaggccagggcccatgctggctgcagtctctgtggctgcctgcctgggccagcctgtttgggagctgggactgtgggctcgccttttcgtacctgggctcaggtgcggtgtggccaccgccaccctcatcccctgcctgggaggctctcccaggggctgatgggggggttctgtgagggagaatcagggctcgggaagccacgcctgggaaggcaggacacaggacacagcagctttctttggaaatctcccaggtgaggattcacatcccaaaataaaattcagaagccaggtggcctgtgctccccatgggtgacctctggaggcagtggaccaagatgcagcaaggagaggatgcagaacagcttcttgcagaagcacctgctccggcatccagcgctgcctggaggcaggaaggagaggcagggcaggacacgctggtctgagatgagggggagccccacgggccccaggcaggctagaggaggcacaggccctgccacggccaactcaggtcagccagcctgaggctgtggcctccaaagggtctgggcgcaccccccaggtcgcaggtgtctgaggccagccaacctgcagagcactcgcggcgtgggtgggctgagtggaggtgcctgggagctgcctaaattcagaagcctccactgccatggagactgcctggctgtgtcctctcagccaggtgccgtgttggccttggctaggacccagagccacactgcagcctccgccgactccctccttccgggcctgctctagtgaggagtgcctaagccaggacccagaaactcagagttgatggtgagaggaggccgcctgagtcaggacacctggcttcttgaaaagttcgctctgccagaaaccacctagggaccacgttagctgccttccttgagctccccaggagtcggtttccacatctgtgaggtggagggctggtgtggaggtgctcatggggtgcggtgcttgggagacagccaggcccagggtggctgctgcttcctgctaagtgggggaggtgagacagatctggaaagccgtctccctcagatggtttcatttaatgctttatactgccgagtctgggggcttgttttggtttgggggcagccatcctccaccagaaagggggagctccttccgctgcggctccagatagatggggatgccgggctccaggccgaccagcacttgggatctgatgggacacggccagtgcctaggggtgccaagtccaaggcctcccactgggagtcatcgctgagaagatgccaatgtttcatccaccggctgcacaggcacaaactcccccacccaggacggctgtgatgaggtggccctccctgtcaaccctggtccctggagtccccagcacctggggccctggtggggctgatgtcacaggtgtttactgtgctgctgcactggtcctatgccagcctcacccatgtggggaccacggaaggcacactcccttacccccggtgccgggccgtgcggtcccccagacggacagcagctgtggcgacctgcgtttctccctgggcctgtgcttcctgtagttagtccgtcccctggttcccctgtggctcagaggccgcgtccctggcttgtacatatgtgattgctgtgggcacaccccagaccccatgtcatagctgccgtcccgacgtcacgacgcctgtcccgatgtcttacacccgagtgttagccctaggctcctgtactgtgcgtgcacttgaggctctgtccaattaagaaataaatgtggctcttactcaac

SEQ ID NO: 15375 - DNA, 585 bp, Homo sapiens
  source 1..585: mol_type = unassigned DNA
acgtccccgggaatagggactttcccccagagactggaggaccccttccccaagcgtcagccctttccaaggggtgcctgcattgctggaattaaaggcctgccagggcaagcggattggatcttgcggctgcggagaggaggcggtgcggagaggcccctgcctcgcagggctggcactggcctcaccctggggacgcacagcgcgacaccgtgctcggctctgcgggacaccaggtcgcactcaggctggcggggcctttgccagggaagccatgccagcaccctcgtggtgtgagaaggcagcagaggcttcctcaggcttgcgaagctgggttccactggtcccgctgggctcctgctttctagaattatctgcgctgcctcctctccttgtggattccaccccatgtgttccccccacactggggctcccactactgcgaggagtgacccacgaaggccacagagatggccggggcttcggtgaaggtggcggtgcgggtccgccccttcaattcccgggaaatgagccgtgactccaagtgcatcattcagatgtctggaagcaccaccaccattgtta

SEQ ID NO: 15376 - DNA, 9162 bp, Homo sapiens
  source 1..9162: mol_type = unassigned DNA
ggacgccgcgcgcagccaaccagcgcctcgggaggggcgcggggcggtccgggccgggggcgcgcagcccgtcacgcggcggcgccgtcacagcgcagagcagccggcgagcggcagcagctccgggctcgagagcccgcgcccatgccagtgcccatgcggggccgccgccagtgacgccggagaggtgttccccccacactggggctcccactactgcgaggagtgacccacgaaggccacagagatggccggggcttcggtgaaggtggcggtgcgggtccgccccttcaattcccgggaaatgagccgtgactccaagtgcatcattcagatgtctggaagcaccaccaccattgttaaccccaaacagcccaaggagacgcccaaaagcttcagctttgactactcctactggtcgcacacctcacctgaggacatcaactacgcgtcgcagaagcaggtgtaccgggacatcggcgaggagatgctgcagcatgcctttgagggatacaacgtgtgcatcttcgcctatgggcagacgggtgccggcaagtcctacaccatgatgggcaagcaggagaaggaccagcagggcatcatcccacagctctgcgaggacctcttctctcggatcaacgacacgaccaacgacaacatgtcctactccgtggaggtcagctacatggagatttactgtgagcgcgtccgtgacctcctgaaccccaagaacaagggcaaccttcgcgtgagggagcacccactgctggggccctacgtggaggacctctccaagctggctgtcacctcctacaatgacatccaggacctcatggactcagggaacaaggccaggaccgtggcggccaccaacatgaatgagaccagcagtcgctcccacgccgtcttcaacatcatcttcacccagaagcgccatgacgcagagaccaatatcaccacggagaaggtgagcaaaatcagcctggtggacctggctgggagcgagcgggctgactccacgggagccaagggcacgcgcctcaaggagggggccaacatcaacaagtcgctgaccaccctgggcaaggtcatctccgccctggctgaaatggactccggacccaacaagaacaagaaaaagaagaagacagatttcattccgtaccgagattccgtgttgacctggctcctccgggaaaacctgggcggtaactcaaggacagctatggtggcagccttgagtcctgcagacatcaactacgatgagacccttagcacgctgaggtatgctgaccgggccaagcagatccgctgcaatgctgtcatcaatgaggaccccaacaacaagctgatccgcgagctgaaggatgaggtgacccggctgcgggaccttctgtacgcccagggtcttggcgacatcactgacaccaacactgtgcctggaggacccaaattgaccaatgccctggtgggtatgagcccctcatcctcgctctcagccctgtccagccgcgcggcctccgtgtccagcctccacgagcgcatcttgtttgccccgggcagcgaggaggccattgaaagactgaaggaaacagagaagatcatagctgagctcaatgagacctgggaggagaagctgcggcggacagaagccatccggatggagagggaagccctgctggccgagatgggtgtggccatgagggaggatggcggcaccttgggcgtattctctcccaaaaagacaccacacctcgtcaacctgaacgaggacccgctgatgtctgagtgcctgctctactacatcaaggatgggatcaccagagtgggcagggaggatggcgagaggcggcaggacattgttctgagtgggcacttcatcaaggaggagcactgcgtcttccggagcgactccaggggaggcagcgaagctgtggtgaccttggagccctgtgagggggcagacacctacgtcaatggcaagaaagtcacagagcccagcatcctgcgttcaggaaaccgcatcatcatgggtaagagccatgtgttccggttcaaccaccccgagcaggcccggcaggagcgtgagcgcacgccttgtgcggagacgccagctgagcctgtggactgggccttcgcccagcgtgagctgctggagaagcagggcatcgacatgaagcaggagatggagcagaggctccaggaactggaggaccagtaccgccgcgagcgggaggaggccacctacctgctggagcagcagcggctggactatgagagcaagctggaggctctgcagaagcagatggactccaggtactacccggaggtgaacgaggaggaggaggagcccgaggatgaagtccagtggacagagcgggagtgtgagctggcgctctgggccttccggaagtggaagtggtaccagttcacgtctctgcgggacctgctgtggggcaacgccatcttcctcaaggaggccaatgccatcagcgtggagctgaaaaagaaggtacaattccagtttgtcctcctgacggacacactctactcccctctgccacccgacctgctgcccccagaggccgccaaagaccgagagacgcggcccttcccccgcaccattgtggccgtggaggtccaggaccagaagaacggggccacccactactggacgctggagaagctcaggcagcgtctggacctgatgcgggagatgtacgaccgcgctgcagaggtgccctccagtgtcatcgaggactgtgacaacgtggtgaccggcggagaccccttctatgaccgcttcccctggttccggctggtgggcagttcagccatctctggctgcaacagctaccctcttctcaacacatgcatgagcgagcgcatggctgctctcaccccctcccccaccttctcgagccccgactccgacgccaccgagcctgccgaggagcagagcgtgggggaggaggaggaggaggaggaggaggaggaggatgaggaggaggaggacctggaggacgacgtctttccggagcacgcgctgtgcgacggccgggacccgttttacgaccggccccccctgttcagtttagtaggaagggccttcgtgtacctgagcaacctgctgtaccccgttcccctggtacaccgtgtggcaatcgtcagcgagaagggcgaggtgaagggcttcctccgcgtggccgtccaggccatctcagccgatgaagaggcccctgattatggctctggcgtccgccagtcgggaactgctaaaatctcctttgatgaccagcattttgaaaagttccagtccgagtcttgccccgtggtggggatgtcccgctcgggaacctcccaggaagagcttcgcatcgtggagggccagggccagggtgcagacgtggggccctcagccgatgaagtcaacaacaacacctgttcagcagtgcccccagaaggcctcctcctagacagctctgagaaagccgccctggatgggcccctggatgctgccctggaccacctccgcctgggcaacaccttcaccttccgtgtgacagtcctgcaggcgtccagcatctctgccgaatatgccgacatcttctgccagttcaacttcatccaccgccacgacgaggccttctccacagagcccctgaagaacacaggcagaggccccccacttggcttctaccacgtccagaacatcgcagtggaggtgaccaagtccttcattgagtacatcaagagccagcccattgttttcgaggtctttggccactaccagcagcacccgttcccgcccctctgcaaggacgtgctcagccccctgaggccctcgcgccgccacttccctcgggtcatgccactgtccaagccagtgcccgccaccaagctcagcacactgacgcggccctgtccgggaccctgccactgcaagtacgacctgctggtctacttcgagatctgtgagctggaggccaacggcgattacatcccggccgtggtggaccaccgtgggggcatgccatgcatggggaccttcctcctccaccagggcatccagcgacggattacggtgacactactgcatgagacaggcagccatatccgctggaaggaagtgcgcgagctggtcgtgggccgcatccgaaacactccagagaccgacgagtccctgatcgaccccaacatcttgtctctcaacatcctctcttccggatacatccacccagcccaagatgaccggaccttttaccaatttgaggctgcgtgggacagctccatgcacaactctctcctgctgaaccgggtcaccccttatcgagagaaaatctacatgacactctccgcttatatcgagatggagaactgcacccagccggctgttgtcaccaaggacttctgcatggtcttctattcccgtgatgccaagctgccagcctcgcgctccatccgcaacctctttggcagtgggagccttcgggcctcagagagtaaccgtgtgactggtgtgtacgagctcagcctgtgccacgtggctgacgcgggcagcccagggatgcagcgccggcgccgacgagtcctggacacatctgtggcctatgtccggggcgaggagaacctggcaggctggaggccccggagtgacagtctcattctggaccaccagtgggagctggagaagctgagcctcctgcaggaggtggagaagactaggcactacctgctcctgcgggagaagctggagaccgcccagcggcctgtcccggaggcactgtccccggccttcagcgaggactctgagtcccatggctcctccagcgcctcctccccgctctcggctgagggccgcccatcacccctggaggctcccaacgagaggcagcgggagctggccgtcaagtgcttgcgcctgctcacgcacacattcaacagagagtacacacacagccacgtctgcgtcagtgccagcgagagcaagctctccgagatgtctgtcaccctgctccgggacccgtcgatgtcccctctaggggtggccactctcaccccctcctccacttgcccctctctggttgaagggcggtacggtgccactgacctgaggaccccgcagccctgctcccggccagccagcccagagcccgagctgctgccagaggccgactccaagaagctcccttcccctgcccgggcaacagagacagacaaggagccccagcgcctgctggtccctgacatccaggagatccgagtcagcccgatcgtttccaagaaggggtacctgcacttcctggagccgcacacgtcaggctgggccaggcgcttcgtggtggtgcggcgcccctatgcctacatgtacaacagcgacaaggacaccgtggagcggttcgtgctcaacctggccactgcccaggtggagtacagtgaggaccagcaggctatgctcaagacacccaacacattcgcggtgtgcacggaacaccgcggcatcctgctgcaggccgccagcgacaaggacatgcatgactggctgtacgccttcaaccccctcctggccgggaccatacggtccaagctctccagaaggaggtctgcccagatgcgggtctgaacctgagccctcccgtgacagccggcaggcccagcccatcccctccctcatcctcgtctgtcctgtcacctgccgcccagcccctctcctgccagacagcccacgaccgggtcgaccccccaggggacgcccatgccaggcccggggacctgtgccacacgaccagctgtgctcccagcagaggctgtgcgtgtcagttcttcttgcagaatgtgctctggtggaacaagttgggagaggctgggggggccaagggcacaggttacgggggttcttgctgccgttctaatatttttttaagcatagacagacttataattaatatacgttagttagtgacattgaaacagtcaactcggaaattaactataagacttgttctatttataagtatttatttctaatgcctccacatagccctgtaatattcagatggaacccccaaccacctccaccctgtttgttcccacatgtgtctcccaagcctgctagggacaggcagggcagggacagccaccttggaaggccgcagtgaggagctgtctggaccagtggggcaccttggggctagcacacgggtgtatcgcctgggccccaggcttctccatggccacatgggtcctgggtgtatgtgtgggagagtgggggggtgtctttggtgcctgaagtctgcgcggcatggagggtggtgtgagttcctctggtgggagggagaacgcacatctcttctgggcggccacctgaggagtgactccaagaagagttccggcagctttccccaggaaagggtgaggggtgacactcggctctggctctgagatgaggcagacggcacccaggctgtgatctgtcctgggcggggaccaggagggagcggggtcgggatcacctgccagtgtgcagactctgggactgcgtgctgtctccggaccatcagggtagggtggtgggttgagaccaggaagtcagggaagatcggaattcagggcgacggtctaggtgtcgagggctgtggcgcagcctcttcagctgcggcgagaaatggagtgagtcaaggtagcttctgggaagaaatgctgccattagcaggtttcttgcaaagactttcctctctttgttcccagggcagagagtttctgtgagtcccactgagaaaatcccatggggtgggggtatcctggtcggtcggcaatggagggtggctggcttggtggttattgtcttcaaggagctcttcgctgctgcatctgcggtgtccctttgttcttgtcccatttcaccccctctgcagacaccaatgtccgagggccacccaggacaggacgggggtcagccccaagctgagagtctggtcataggagtcatgtccagaggcctagggaggttttagggccctccccacccacacccacaggtcgatttggtctctttttagctcaaggaaagacagtagccaagcaacagagcccctctcccgccgtggcccgtgggagcagttacatcgggtctggtgctccagacctagggcccagcactttcatcagatcctgcctcctggagtgggggaaacgcagcaccccactggttctgaggcccctaccctcccaggctgtcccacgtgatgctgacatgagcctcagagaccccaatcccatgcctgggggagagacagcggctcaggagtgggggagcacgggccttctacaccacatgggaaggctctggcatgaggttttcctttgggaaggttgtttgggcccctgaagttccatctccgagagtggtgtgcagggcaggccagggcccatgctggctgcagtctctgtggctgcctgcctgggccagcctgtttgggagctgggactgtgggctcgccttttcgtacctgggctcaggtgcggtgtggccaccgccaccctcatcccctgcctgggaggctctcccaggggctgatgggggggttctgtgagggagaatcagggctcgggaagccacgcctgggaaggcaggacacaggacacagcagctttctttggaaatctcccaggtgaggattcacatcccaaaataaaattcagaagccaggtggcctgtgctccccatgggtgacctctggaggcagtggaccaagatgcagcaaggagaggatgcagaacagcttcttgcagaagcacctgctccggcatccagcgctgcctggaggcaggaaggagaggcagggcaggacacgctggtctgagatgagggggagccccacgggccccaggcaggctagaggaggcacaggccctgccacggccaactcaggtcagccagcctgaggctgtggcctccaaagggtctgggcgcaccccccaggtcgcaggtgtctgaggccagccaacctgcagagcactcgcggcgtgggtgggctgagtggaggtgcctgggagctgcctaaattcagaagcctccactgccatggagactgcctggctgtgtcctctcagccaggtgccgtgttggccttggctaggacccagagccacactgcagcctccgccgactccctccttccgggcctgctctagtgaggagtgcctaagccaggacccagaaactcagagttgatggtgagaggaggccgcctgagtcaggacacctggcttcttgaaaagttcgctctgccagaaaccacctagggaccacgttagctgccttccttgagctccccaggagtcggtttccacatctgtgaggtggagggctggtgtggaggtgctcatggggtgcggtgcttgggagacagccaggcccagggtggctgctgcttcctgctaagtgggggaggtgagacagatctggaaagccgtctccctcagatggtttcatttaatgctttatactgccgagtctgggggcttgttttggtttgggggcagccatcctccaccagaaagggggagctccttccgctgcggctccagatagatggggatgccgggctccaggccgaccagcacttgggatctgatgggacacggccagtgcctaggggtgccaagtccaaggcctcccactgggagtcatcgctgagaagatgccaatgtttcatccaccggctgcacaggcacaaactcccccacccaggacggctgtgatgaggtggccctccctgtcaaccctggtccctggagtccccagcacctggggccctggtggggctgatgtcacaggtgtttactgtgctgctgcactggtcctatgccagcctcacccatacggacagcagctgtggcgacctgcgtttctccctgggcctgtgcttcctgtagttagtccgtcccctggttcccctgtggctcagaggccgcgtccctggcttgtacatatgtgattgctgtgggcacaccccagaccccatgtcatagctgccgtcccgacgtcacgacgcctgtcccgatgtcttacacccgagtgttagccctaggctcctgtactgtgcgtgcacttgaggctctgtccaattaagaaataaatgtggctcttactcaacacag

SEQ ID NO: 15377 - DNA, 6816 bp, Homo sapiens
  source 1..6816: mol_type = unassigned DNA
cccggccccccgcgcccccgcgcgccgcggctcctgttgacccggtccgcccgtcggtctgcagcgcggctgaggaaacttggctgtaacttcaaaagaagatttgattctttatttctggactgcatatatatatataacaaggccattaaaatgtcgggagcctcagtgaaggtggctgtccgggtaaggcccttcaattctcgagagaccagcaaggaatccaaatgcatcattcagatgcaaggcaactcgaccagtattattaacccaaagaatccaaaggaagctccaaagtccttcagcttcgactattcctactggtctcatacctcacccgaagatccctgttttgcatctcaaaaccgtgtgtacaatgacattggcaaggaaatgctcttacacgcctttgagggatataatgtctgtatttttgcctatgggcagactggtgctggaaaatcttatacaatgatgggtaaacaagaagaaagccaggctggcatcattccacagttatgtgaagaactttttgagaaaatcaatgacaactgtaatgaagaaatgtcttactctgtagaggtgagctacatggaaatttactgtgaaagagtacgagatttgctgaatccaaaaaacaagggtaatttgcgtgtgcgtgaacacccacttcttggaccctatgtggaggatctgtccaagttggcagttacttcctacacagacattgctgacctcatggatgctgggaacaaagccaggacagtggcagctacaaacatgaatgaaacaagtagccgttcccacgctgtgtttacgattgttttcacccagaagaaacacgataatgagaccaacctttccactgagaaggtcagtaaaatcagcttggtggatctagcaggaagtgaacgagctgattcaactggtgccaaagggactcgattaaaggaaggagcaaatattaataagtctcttacaactttgggcaaagtcatttcagccttggccgaggtgagtaaaaagaagaagaaaacagattttattccctacagggattctgtacttacttggctccttcgagaaaatttaggtggcaattctcggactgcaatggttgctgctctgagccccgcggatatcaactacgatgagactttgagcactctgagatatgcagatcgtgcaaaacaaattaaatgcaatgctgttatcaatgaggaccccaatgccaaactggttcgtgaattaaaggaggaggtgacacggctgaaggaccttcttcgtgctcagggcctgggagatattattgatacatccatggggtccctcacttcatccccatcttcctgctcactcagtagtcaggtgggcttgacgtctgtgaccagtattcaagagaggatcatgtctacacctggaggagaggaagctattgaacgtttaaaggaatcagagaagatcattgctgagttgaatgaaacttgggaagagaagcttcgtaaaacagaggccatcagaatggagagagaggctttgttggctgagatgggagttgccattcgggaagatggaggaaccctaggggttttctcacctaaaaagaccccacatcttgttaacctcaatgaagacccactaatgtctgagtgcctactttattacatcaaagatggaattacaagggttggccaagcagatgctgagcggcgccaggacatagtgctgagcggggctcacattaaagaagagcattgtatcttccggagtgagagaagcaacagcggggaagttatcgtgaccttagagccctgtgagcgctcagaaacctacgtaaatggcaagagggtgtcccagcctgttcagctgcgctcaggaaaccgtatcatcatgggtaaaaaccatgttttccgctttaaccacccggaacaagcacgagctgagcgagagaagactccttctgctgagaccccctctgagcctgtggactggacatttgcccagagggagcttctggaaaaacaaggaattgatatgaaacaagagatggagaaaaggctacaggaaatggagatcttatacaaaaaggagaaggaagaagcagatcttcttttggagcagcagagactggactatgagagtaaattgcaggccttgcagaagcaggttgaaacccgatctctggctgcagaaacaactgaagaggaggaagaagaggaagaagttccttggacacagcatgaatttgagttggcccaatgggccttccggaaatggaagtctcatcagtttacttcattacgggacttactctggggcaatgccgtgtacctaaaggaggccaatgccatcagtgtggaactgaaaaagaaggtgcagtttcagtttgttctgctgactgacacactgtactcccctttgcctcctgaattacttcccactgagatggaaaaaactcatgaggacaggcctttccctcgcacagtggtagcagtagaagtccaggatttgaagaatggagcaacacactattggtctttggagaaactcaagcagaggctggatttgatgcgagagatgtatgatagggcaggggagatggcctccagtgcccaagacgaaagcgaaaccactgtgactggcagcgatcccttctatgatcggttccactggttcaaacttgtggggagctcccccattttccacggctgtgtgaacgagcgccttgccgaccgcacaccctcccccactttttccacggccgattccgacatcactgagctggctgacgagcagcaagatgagatggaggattttgatgatgaggcattcgtggatgacgccggctctgacgcagggacggaggagggatcagatctcttcagtgacgggcatgacccgttttacgaccgatccccttggttcattttagtgggaagggcatttgtttacctgagcaatctgctgtatcccgtgcccctgatccacagggtggccatcgtcagtgagaaaggtgaagtgcggggatttctgcgtgtggctgtacaggccatcgcagcggatgaagaagctcctgattatggctctggaattcgacagtcaggaacagctaaaatatcttttgataatgaatactttaatcagagtgacttttcgtctgttgcaatgactcgttctggtctgtccttggaggagttgaggattgtggaaggacagggtcagagttctgaggtcatcactcctccagaagaaatcagtcgaattaatgacttggatttgaagtcaagcactttgctggatggtaagatggtaatggaagggttttctgaagagattggcaaccacctgaaactgggcagtgccttcactttccgagtaacagtgttgcaggccagtggaatcctcccagagtatgcagatatcttctgtcagttcaactttttgcatcgccatgatgaagcattctccacggagcccctcaaaaacaatggcagaggaagtcccctggccttttatcatgtgcagaatattgcagtggagatcactgaatcatttgtggattacatcaaaaccaagcctattgtatttgaagtctttgggcattatcagcagcacccacttcatctgcaaggacaggagcttaacagtccgcctcagccgtgccgccgattcttccctccacccatgccactgtccaagccagttccagccaccaagttaaacacgatgagcaaaaccagccttggccagagcatgagcaagtatgacctcctggtttggtttgagatcagtgaactggagcctacaggagagtatatcccagctgtggttgaccacacagcaggcttgccttgccaggggacatttttgcttcatcagggcatccagcgaaggatcacagtgaccattatccatgagaaggggagcgagctccattggaaagatgttcgtgaactggtggtaggtcgtattcggaataagcctgaggtggatgaagctgcagttgatgccatcctctccctaaatattatttctgccaagtacctgaagtcttcccacaactctagcaggaccttctaccgctttgaggctgtgtgggatagctctctgcataactcccttcttctgaaccgagtgacaccctatggagaaaagatctacatgaccttgtcggcctacctagagctggatcattgcatccagccggctgtcatcaccaaggatgtgtgcatggtcttctactcccgagatgccaagatctcaccaccacgctctctgcgtagcctctttggcagcggctactcaaagtcaccagattcgaatcgagtcactggcatttacgaactcagcttatgcaaaatgtcagacacaggtagtccaggtatgcagagaaggagaagaaaaatcttagatacgtcagtggcatatgtgcggggagaagagaacttagcaggctggcggccccgtggagacagcctcatccttgagcaccagtgggagctggagaagctggagctcctacatgaggtggaaaaaacccgccactttttgctgctgcgtgagagacttggtgacagcatccccaaatccctgagcgactcgttatcccccagcctcagcagtgggaccctcagcacctccaccagtatctcctctcagatctcaaccactacctttgaaagcgccatcacacctagcgagagcagtggctatgattcaggagacatcgaaagcctggtggaccgagagaaagagctggctaccaagtgcctgcaacttctcacccacactttcaacagagaattcagccaggtgcacggcagcgtcagtgactgtaagttgtctgatatctctccaattggacgggatccctctgagtccagtttcagcagtgccaccctcactccctcctccacctgtccctctctggtagactctaggagcaactctctggatcagaagaccccagaagccaattcccgggcctctagtccctgcccagaatttgaacagtttcagattgtcccagctgtggaaacaccatatttggcccgagcaggaaaaaacgaatttctcaatcttgttccagatattgaagaaattagaccaagctcagtggtctctaagaaaggataccttcatttcaaggagcctctttacagtaactgggctaaacattttgttgtcgtccgtcggccttatgtcttcatctataacagtgacaaagaccctgtggagcgtggaatcattaacctgtccacagcacaggtggagtacagtgaggaccagcaggccatggtgaagacaccaaacacctttgctgtctgcacaaagcaccgtggggtccttttgcaggccctcaatgacaaagacatgaacgactggttgtatgccttcaacccacttctagctggcacaatacggtcaaagctttcccgcagatgcccgagccagtcgaaatactaagtgactctgccgagtgccctcactcgccttcgagagataaagaaagcgttacctctcatttctctttgtgattcttgacggtgactcttgtatgtaatcctgtggcttaactacttctccctccttgtccagcacttttctagctctcccgttccccatctccattgctctgtactcttttcttttttcttgtgctgagaatctcgttagtagcatgtggcctaacaaaaggaaaaaatgtttttaaacacacacacacacacacacacacacacacacatacacagacaaaaacacaaaaactctgaggggatctggtgaatctccaaattattgtgggtgtactttggcttccttttgtatgataggtccccatcatgaccacctctgatgtctgtgctgctgtcaccaggcacctttgtttttcaagacaacatactttttttttcttttctctgtttgtgatatcactttaatttttcttgggtggcttagagactaagggaggagacatctggcctttttagaacctgagaggaaaaaaagagtctttttttcccctctgtctctttttgccatggctaatccctgcatttccattcagggaaaaggtggtagtgagcatagaactgcaacagttatattctgagtcaaagttggggctttttacggcataattatggaatttttatttactggtagagaggagacgagaggctttttcagtgggcctgggacagtggctgctcttgactttgtgtgaagggaaatgccaaggatgcttctggtggacttcaggggaccccagggtttggccgtgggccgtgatggcagcaggcggtgggatgcttgtagctcctcacagcaggattcctgcccactgttttttctctgttgggagggaagctcttttctaggagtgtctcagttctgcttttggcattagtgatggtggtggtacagttggaattagtgccatgtcatacacaaatgttccacaaggcgggagtgtttcactttctggtgataaacttgatggtcattgttatgattaagataatgccgggcaggccgggcacagtggctcacgcctgtaatccaagcacttggggaggccgaggcgggcagatcacgagatcaggagttcaagaccagcctggccaatatgatgaaaccccgtctctactaaaaatacaaaattagtcgggtatggtggcacatgcctgtaattccagctgcttgggagcctgaggcaggagaactgcttgaacccaggaggcagaggttgcagtgagccaagatcgcgctattgcactccagcctgggtgacagagcaagactctgcctcag

SEQ ID NO: 15378 - DNA, 5724 bp, Homo sapiens
  source 1..5724: mol_type = unassigned DNA
ctcccacctcgatgcggtgccgggctgctgcgtgatggggctgcggagcggcgccctgcggctcgcggcggccgctgctcgcgctgaggtgcgtcggtgcccggccccccgcgcccccgcgcgccgcggctcctgttgacccggtccgcccgtcggtctgcagcgcggctgaggaaacttggctgtaacttcaaaagaagatttgattctttatttctggactgcatatatatatataacaaggccattaaaatgtcgggagcctcagtgaaggtggctgtccgggtaaggcccttcaattctcgagagaccagcaaggaatccaaatgcatcattcagatgcaaggcaactcgaccagtattattaacccaaagaatccaaaggaagctccaaagtccttcagcttcgactattcctactggtctcatacctcacccgaagatccctgttttgcatctcaaaaccgtgtgtacaatgacattggcaaggaaatgctcttacacgcctttgagggatataatgtctgtatttttgcctatgggcagactggtgctggaaaatcttatacaatgatgggtaaacaagaagaaagccaggctggcatcattccacagttatgtgaagaactttttgagaaaatcaatgacaactgtaatgaagaaatgtcttactctgtagaggtgagctacatggaaatttactgtgaaagagtacgagatttgctgaatccaaaaaacaagggtaatttgcgtgtgcgtgaacacccacttcttggaccctatgtggaggatctgtccaagttggcagttacttcctacacagacattgctgacctcatggatgctgggaacaaagccaggacagtggcagctacaaacatgaatgaaacaagtagccgttcccacgctgtgtttacgattgttttcacccagaagaaacacgataatgagaccaacctttccactgagaaggtcagtaaaatcagcttggtggatctagcaggaagtgaacgagctgattcaactggtgccaaagggactcgattaaaggaaggagcaaatattaataagtctcttacaactttgggcaaagtcatttcagccttggccgaggtggatactagtaagaaaaagagtaaaaagaagaagaaaacagattttattccctacagggattctgtacttacttggctccttcgagaaaatttaggtggcaattctcggactgcaatggttgctgctctgagccccgcggatatcaactacgatgagactttgagcactctgagatatgcagatcgtgcaaaacaaattaaatgcaatgctgttatcaatgaggaccccaatgccaaactggttcgtgaattaaaggaggaggtgacacggctgaaggaccttcttcgtgctcagggcctgggagatattattgatattgatccattgatcgatgattactctggaagtggaagcaaatatctgaaagattttcagaacaataagcatagatacttgctagcctctgagaatcaacgccctggccatttttccacagcatccatggggtccctcacttcatccccatcttcctgctcactcagtagtcaggtgggcttgacgtctgtgaccagtattcaagagaggatcatgtctacacctggaggagaggaagctattgaacgtttaaaggaatcagagaagatcattgctgagttgaatgaaacttgggaagagaagcttcgtaaaacagaggccatcagaatggagagagaggctttgttggctgagatgggagttgccattcgggaagatggaggaaccctaggggttttctcacctaaaaagaccccacatcttgttaacctcaatgaagacccactaatgtctgagtgcctactttattacatcaaagatggaattacaagggttggccaagcagatgctgagcggcgccaggacatagtgctgagcggggctcacattaaagaagagcattgtatcttccggagtgagagaagcaacagcggggaagttatcgtgaccttagagccctgtgagcgctcagaaacctacgtaaatggcaagagggtgtcccagcctgttcagctgcgctcaggaaaccgtatcatcatgggtaaaaaccatgttttccgctttaaccacccggaacaagcacgagctgagcgagagaagactccttctgctgagaccccctctgagcctgtggactggacatttgcccagagggagcttctggaaaaacaaggaattgatatgaaacaagagatggagaaaaggctacaggaaatggagatcttatacaaaaaggagaaggaagaagcagatcttcttttggagcagcagagactggactatgagagtaaattgcaggccttgcagaagcaggttgaaacccgatctctggctgcagaaacaactgaagaggaggaagaagaggaagaagttccttggacacagcatgaatttgagttggcccaatgggccttccggaaatggaagtctcatcagtttacttcattacgggacttactctggggcaatgccgtgtacctaaaggaggccaatgccatcagtgtggaactgaaaaagaaggtgcagtttcagtttgttctgctgactgacacactgtactcccctttgcctcctgaattacttcccactgagatggaaaaaactcatgaggacaggcctttccctcgcacagtggtagcagtagaagtccaggatttgaagaatggagcaacacactattggtctttggagaaactcaagcagaggctggatttgatgcgagagatgtatgatagggcaggggagatggcctccagtgcccaagacgaaagcgaaaccactgtgactggcagcgatcccttctatgatcggttccactggttcaaacttgtggggagctcccccattttccacggctgtgtgaacgagcgccttgccgaccgcacaccctcccccactttttccacggccgattccgacatcactgagctggctgacgagcagcaagatgagatggaggattttgatgatgaggcattcgtggatgacgccggctctgacgcagggacggaggagggatcagatctcttcagtgacgggcatgacccgttttacgaccgatccccttggttcattttagtgggaagggcatttgtttacctgagcaatctgctgtatcccgtgcccctgatccacagggtggccatcgtcagtgagaaaggtgaagtgcggggatttctgcgtgtggctgtacaggccatcgcagcggatgaagaagctcctgattatggctctggaattcgacagtcaggaacagctaaaatatcttttgataatgaatactttaatcagagtgacttttcgtctgttgcaatgactcgttctggtctgtccttggaggagttgaggattgtggaaggacagggtcagagttctgaggtcatcactcctccagaagaaatcagtcgaattaatgacttggatttgaagtcaagcactttgctggatggtaagatggtaatggaagggttttctgaagagattggcaaccacctgaaactgggcagtgccttcactttccgagtaacagtgttgcaggccagtggaatcctcccagagtatgcagatatcttctgtcagttcaactttttgcatcgccatgatgaagcattctccacggagcccctcaaaaacaatggcagaggaagtcccctggccttttatcatgtgcagaatattgcagtggagatcactgaatcatttgtggattacatcaaaaccaagcctattgtatttgaagtctttgggcattatcagcagcacccacttcatctgcaaggacaggagcttaacagtccgcctcagccgtgccgccgattcttccctccacccatgccactgtccaagccagttccagccaccaagttaaacacgatgagcaaaaccagccttggccagagcatgagcaagtatgacctcctggtttggtttgagatcagtgaactggagcctacaggagagtatatcccagctgtggttgaccacacagcaggcttgccttgccaggggacatttttgcttcatcagggcatccagcgaaggatcacagtgaccattatccatgagaaggggagcgagctccattggaaagatgttcgtgaactggtggtaggtcgtattcggaataagcctgaggtggatgaagctgcagttgatgccatcctctccctaaatattatttctgccaagtacctgaagtcttcccacaactctagcaggaccttctaccgctttgaggctgtgtgggatagctctctgcataactcccttcttctgaaccgagtgacaccctatggagaaaagatctacatgaccttgtcggcctacctagagctggatcattgcatccagccggctgtcatcaccaaggatgtgtgcatggtcttctactcccgagatgccaagatctcaccaccacgctctctgcgtagcctctttggcagcggctactcaaagtcaccagattcgaatcgagtcactggcatttacgaactcagcttatgcaaaatgtcagacacaggtagtccaggtatgcagagaaggagaagaaaaatcttagatacgtcagtggcatatgtgcggggagaagagaacttagcaggctggcggccccgtggagacagcctcatccttgagcaccagtgggagctggagaagctggagctcctacatgaggtggaaaaaacccgccactttttgctgctgcgtgagagacttggtgacagcatccccaaatccctgagcgactcgttatcccccagcctcagcagtgggaccctcagcacctccaccagtatctcctctcagatctcaaccactacctttgaaagcgccatcacacctagcgagagcagtggctatgattcaggagacatcgaaagcctggtggaccgagagaaagagctggctaccaagtgcctgcaacttctcacccacactttcaacagagaattcagccaggtgcacggcagcgtcagtgactgtaagttgtctgatatctctccaattggacgggatccctctgagtccagtttcagcagtgccaccctcactccctcctccacctgtccctctctggtagactctaggagcaactctctggatcagaagaccccagaagccaattcccgggcctctagtccctgcccagaatttgaacagtttcagattgtcccagctgtggaaacaccatatttggcccgagcaggaaaaaacgaatttctcaatcttgttccagatattgaagaaattagaccaagctcagtggtctctaagaaaggataccttcatttcaaggagcctctttacagtaactgggctaaacattttgttgtcgtccgtcggccttatgtcttcatctataacagtgacaaagaccctgtggagcgtggaatcattaacctgtccacagcacaggtggagtacagtgaggaccagcaggccatggtgaagacaccaaacacctttgctgtctgcacaaagcaccgtggggtccttttgcaggccctcaatgacaaagacatgaacgactggttgtatgccttcaacccacttctagctggcacaatacgaccaggtcatctggcttccgagatcatcagagaagataagtctgtctctttcagctgccagtaa

SEQ ID NO: 15379 - DNA, 8746 bp, Homo sapiens
  source 1..8746: mol_type = unassigned DNA
gaaacttggctgtaacttcaaaagaagatttgattctttatttctggactgcatatatatatataacaaggccattaaaatgtcgggagcctcagtgaaggtggctgtccgggtaaggcccttcaattctcgagagaccagcaaggaatccaaatgcatcattcagatgcaaggcaactcgaccagtattattaacccaaagaatccaaaggaagctccaaagtccttcagcttcgactattcctactggtctcatacctcacccgaagatccctgttttgcatctcaaaaccgtgtgtacaatgacattggcaaggaaatgctcttacacgcctttgagggatataatgtctgtatttttgcctatgggcagactggtgctggaaaatcttatacaatgatgggtaaacaagaagaaagccaggctggcatcattccacagttatgtgaagaactttttgagaaaatcaatgacaactgtaatgaagaaatgtcttactctgtagaggtgagctacatggaaatttactgtgaaagagtacgagatttgctgaatccaaaaaacaagggtaatttgcgtgtgcgtgaacacccacttcttggaccctatgtggaggatctgtccaagttggcagttacttcctacacagacattgctgacctcatggatgctgggaacaaagccaggacagtggcagctacaaacatgaatgaaacaagtagccgttcccacgctgtgtttacgattgttttcacccagaagaaacacgataatgagaccaacctttccactgagaaggtcagtaaaatcagcttggtggatctagcaggaagtgaacgagctgattcaactggtgccaaagggactcgattaaaggaaggagcaaatattaataagtctcttacaactttgggcaaagtcatttcagccttggccgaggtggataactgcactagcaagagtaaaaagaagaagaaaacagattttattccctacagggattctgtacttacttggctccttcgagaaaatttaggtggcaattctcggactgcaatggttgctgctctgagccccgcggatatcaactacgatgagactttgagcactctgagatatgcagatcgtgcaaaacaaattaaatgcaatgctgttatcaatgaggaccccaatgccaaactggttcgtgaattaaaggaggaggtgacacggctgaaggaccttcttcgtgctcagggcctgggagatattattgatattgatccattgatcgatgattactctggaagtggaagcaaatatctgaaagattttcagaacaataagcatagatacttgctagcctctgagaatcaacgccctggccatttttccacagcatccatggggtccctcacttcatccccatcttcctgctcactcagtagtcaggtgggcttgacgtctgtgaccagtattcaagagaggatcatgtctacacctggaggagaggaagctattgaacgtttaaaggaatcagagaagatcattgctgagttgaatgaaacttgggaagagaagcttcgtaaaacagaggccatcagaatggagagagaggctttgttggctgagatgggagttgccattcgggaagatggaggaaccctaggggttttctcacctaaaaagaccccacatcttgttaacctcaatgaagacccactaatgtctgagtgcctactttattacatcaaagatggaattacaagggttggccaagcagatgctgagcggcgccaggacatagtgctgagcggggctcacattaaagaagagcattgtatcttccggagtgagagaagcaacagcggggaagttatcgtgaccttagagccctgtgagcgctcagaaacctacgtaaatggcaagagggtgtcccagcctgttcagctgcgctcaggaaaccgtatcatcatgggtaaaaaccatgttttccgctttaaccacccggaacaagcacgagctgagcgagagaagactccttctgctgagaccccctctgagcctgtggactggacatttgcccagagggagcttctggaaaaacaaggaattgatatgaaacaagagatggagaaaaggctacaggaaatggagatcttatacaaaaaggagaaggaagaagcagatcttcttttggagcagcagagactggactatgagagtaaattgcaggccttgcagaagcaggttgaaacccgatctctggctgcagaaacaactgaagaggaggaagaagaggaagaagttccttggacacagcatgaatttgagttggcccaatgggccttccggaaatggaagtctcatcagtttacttcattacgggacttactctggggcaatgccgtgtacctaaaggaggccaatgccatcagtgtggaactgaaaaagaaggtgcagtttcagtttgttctgctgactgacacactgtactcccctttgcctcctgaattacttcccactgagatggaaaaaactcatgaggacaggcctttccctcgcacagtggtagcagtagaagtccaggatttgaagaatggagcaacacactattggtctttggagaaactcaagcagaggctggatttgatgcgagagatgtatgatagggcaggggagatggcctccagtgcccaagacgaaagcgaaaccactgtgactggcagcgatcccttctatgatcggttccactggttcaaacttgtggggagctcccccattttccacggctgtgtgaacgagcgccttgccgaccgcacaccctcccccactttttccacggccgattccgacatcactgagctggctgacgagcagcaagatgagatggaggattttgatgatgaggcattcgtggatgacgccggctctgacgcagggacggaggagggatcagatctcttcagtgacgggcatgacccgttttacgaccgatccccttggttcattttagtgggaagggcatttgtttacctgagcaatctgctgtatcccgtgcccctgatccacagggtggccatcgtcagtgagaaaggtgaagtgcggggatttctgcgtgtggctgtacaggccatcgcagcggatgaagaagctcctgattatggctctggaattcgacagtcaggaacagctaaaatatcttttgataatgaatactttaatcagagtgacttttcgtctgttgcaatgactcgttctggtctgtccttggaggagttgaggattgtggaaggacagggtcagagttctgaggtcatcactcctccagaagaaatcagtcgaattaatgacttggatttgaagtcaagcactttgctggatggtaagatggtaatggaagggttttctgaagagattggcaaccacctgaaactgggcagtgccttcactttccgagtaacagtgttgcaggccagtggaatcctcccagagtatgcagatatcttctgtcagttcaactttttgcatcgccatgatgaagcattctccacggagcccctcaaaaacaatggcagaggaagtcccctggccttttatcatgtgcagaatattgcagtggagatcactgaatcatttgtggattacatcaaaaccaagcctattgtatttgaagtctttgggcattatcagcagcacccacttcatctgcaaggacaggagcttaacagtccgcctcagccgtgccgccgattcttccctccacccatgccactgtccaagccagttccagccaccaagttaaacacgatgagcaaaaccagccttggccagagcatgagcaagtatgacctcctggtttggtttgagatcagtgaactggagcctacaggagagtatatcccagctgtggttgaccacacagcaggcttgccttgccaggggacatttttgcttcatcagggcatccagcgaaggatcacagtgaccattatccatgagaaggggagcgagctccattggaaagatgttcgtgaactggtggtaggtcgtattcggaataagcctgaggtggatgaagctgcagttgatgccatcctctccctaaatattatttctgccaagtacctgaagtcttcccacaactctagcaggaccttctaccgctttgaggctgtgtgggatagctctctgcataactcccttcttctgaaccgagtgacaccctatggagaaaagatctacatgaccttgtcggcctacctagagctggatcattgcatccagccggctgtcatcaccaaggatgtgtgcatggtcttctactcccgagatgccaagatctcaccaccacgctctctgcgtagcctctttggcagcggctactcaaagtcaccagattcgaatcgagtcactggcatttacgaactcagcttatgcaaaatgtcagacacaggtagtccaggtatgcagagaaggagaagaaaaatcttagatacgtcagtggcatatgtgcggggagaagagaacttagcaggctggcggccccgtggagacagcctcatccttgagcaccagtgggagctggagaagctggagctcctacatgaggtggaaaaaacccgccactttttgctgctgcgtgagagacttggtgacagcatccccaaatccctgagcgactcgttatcccccagcctcagcagtgggaccctcagcacctccaccagtatctcctctcagatctcaaccactacctttgaaagcgccatcacacctagcgagagcagtggctatgattcaggagacatcgaaagcctggtggaccgagagaaagagctggctaccaagtgcctgcaacttctcacccacactttcaacagagaattcagccaggtgcacggcagcgtcagtgactgtaagttgtctgatatctctccaattggacgggatccctctgagtccagtttcagcagtgccaccctcactccctcctccacctgtccctctctggtagactctaggagcaactctctggatcagaagaccccagaagccaattcccgggcctctagtccctgcccagaatttgaacagtttcagattgtcccagctgtggaaacaccatatttggcccgagcaggaaaaaacgaatttctcaatcttgttccagatattgaagaaattagaccaagctcagtggtctctaagaaaggataccttcatttcaaggagcctctttacagtaactgggctaaacattttgttgtcgtccgtcggccttatgtcttcatctataacagtgacaaagaccctgtggagcgtggaatcattaacctgtccacagcacaggtggagtacagtgaggaccagcaggccatggtgaagacaccaaacacctttgctgtctgcacaaagcaccgtggggtccttttgcaggccctcaatgacaaagacatgaacgactggttgtatgccttcaacccacttctagctggcacaatacgaccaggtcatctggcttccgagatcatcagagaagataagtctgtctctttcagctgccagtaagttttccaggatgagaggggaaaaagaaagcctccagtgacttcagttgctttgccagttgtcttgggattgttttacaccatcctttacttcccttgctcagacctctctgtttcaccattgctcaggcattcaggaaagtatctgctcactcccacttggtgagtcctcggccttgaggttgctgactctcaggcgttaggcagctggatgacttcccgcttcacgcagcaaaggccaggggcttgcgcgcctctgcagagttgttgctagggagacttgtgtcatcatccacaaccttgtttctcacttcctggttgggctcatctctgaagaacaggtctcccagcttcgctccttatcactgcattgtgaagaggaggaaaagtgaatcacggagagagaaaggaaaggatagaatcacaggctgcgtctgcacctgaaaagtgacccgcggaaactctatggcggattttttttttaactttcttcttcctgttaaaacataggtcactaactgtgatgttatttgttttctaagtggtatgtgagattttctaatgtagttagaagtttcattgtctgatggacacaatatgcccttccggttctattcaaaccagcaggatctgtcggtgcttagagatggctgcctggactggaatcaaatctaatttcagggaaatgaagatggaatttgaaggtcacttttaaaattaagtcattgatgctgctgttacagagtgtgacagaggatccatgtctgtgacacaggacggtgggaagcctgagagagagtgaaattatgtgatacactgaaatgacttttgtttttcttctaactcatacaaaactggtttggaaagtctttgctttggaagcgtcagacattagaacaggccaaactggactgtctgttcatagcgtgcctgaataagaaggcctcttagggagccagagggagcagagtggtcgtgtcctgcgtgctcttcaccctctggggcgcccctgctgcggctggcaggtgcagacagcctttgctggtccccagcacgtccagggtgggtgctcccttgcccgacagaaccatccccactgtgaggctgtgagagatttgtggcaggaactgtttatgaggctctagttgttgctgttgtggcgggaaagttaagaaacatagcccttaaggaaaccacctttatgtattttcttaaagcacgcctttaaataagcaaaaactttaaaaggcaggaaagagaattcttaggcaaattcagagaaataagtgctagttaatactaatcacctcctcctctgtctctcatcctcctttctcccatcaaagcaaaatatggcctcaccaccagccccaaatcagtgctcagaccctctctgtgtctgtgtgccctcctgggagtcagtcagcgctcaggccaggactgtgcagggccagccagcccatgcgctagtcaggagcacaggcaaggggtgcttgtggcagtggccgggcacctgagccccagctcgttgttaaacgtgctgacggcaaggggcaatggagtgagtttcccaactaagaaaccactattatatattttttcccttcagtcacatagacttcagacaactctcctattttttatggatttttcagctcatttcagatgaaggaactaagtcattgtgaactgtctcttgagatctaaaaacaagatgacttttcctggcacatattccaaagcaaagactttgttgcctgctgcttattgtctaatttacagggatatttaattttgtcaggtctatgtatatttatccagctatacttacttgcacagtggattggagagaaaggattctccagtgtgcacactcatcggtactctttctgcatttccctcgtgctgtgtcccgctcgggttccaatggacagtatcagggcttgtttgacttaggtctttcagttttcctttcggttcccttttaaaaatgtgattgttaacctgcctcttgaaagattcaaccgggtgtggtggctcacgcctgtaatcccagcacattgggaggccaaggcaggtggatcacctgaggtcagaagtttgagaccagcctggccaacatggtgaaaccccgtctctactaaaaatacaaaaagtagccaggcgtggtggcgtgtgcctgtagtcccagctacttgggaggctgaggcaggagaatagcttgaacctgggaggtggaggctgcagtgagttgagactgcaccattgcactccagcctgggtgacaaagcaggactccgtctcaaaaaaaaagaaaagattcatgatgctgctgctcccagaaggtttgctggatgtgtttacataggactctaacttgtgtgcactacagttgttcaccagggccagtgattcaccccagtgtgtggccagaccatgactgtgtagcaggaatgttttaatttgtgcttccttagtaaattgaaatatcagctgagagattatttgctgctgttattcaaaaggccatttatgaagttagtatttgagccccataagatctttaaaaagcctccaatcatttaaaggaagaaatcagagttgctataaaattcagtaaaaagctcatagccaaacggctgtgctcagatggaaagtctgagctgaggttggtctcttgccaaaccgtggctgttgtgtgttgttcttcatgtcttcgagttcattttttttcattctgcctattctggcatcagctcacttgaggagtccctcagccttcttgtatttaaggcatcgtcttagactttgtggctctaaagtacctgtctgttgagatttcaagtctcttgtcaccatcctcacacatgacaacaaaacccataatgcataagtggcctttttgaaccaagactttgcaaactgatctctcccccgtgaaggagttgagcacattagcaacaatgtacattaattttggattttcattttcatgttttattttgtaaatattatctgatgtttggagcttgagtatacagactgtaaatatagttcttgtatttgtactaattctgattcttttgctgtatagccttagatgtgcaatgcagacactatctaactgtgtgtggtaaccttgcgtcacggagctgttagtgaacgaggtaaaaataataaaggtacagccagtgca

SEQ ID NO: 15380 - DNA, 5885 bp, Homo sapiens
  source 1..5885: mol_type = unassigned DNA
ggattcttttcacacagtagtgttggctttgttctgttgggagggaaactattcctctaaaaaatgttcacatttttcctattacttcattcagtagtgaaatgtaatgatttgactctgccatgagtcagtggcatatctgagggatctttgaagttaaaggaaattggccaggcgcagtgactcacgcttataatcccagcactttgggagaccgaggcaggtgaatctgaggaaacttggctgtaacttcaaaagaagatttgattctttatttctggactgcatatatatatataacaaggccattaaaatgtcgggagcctcagtgaaggtggctgtccgggtaaggcccttcaattctcgagagaccagcaaggaatccaaatgcatcattcagatgcaaggcaactcgaccagtattattaacccaaagaatccaaaggaagctccaaagtccttcagcttcgactattcctactggtctcatacctcacccgaagatccctgttttgcatctcaaaaccgtgtgtacaatgacattggcaaggaaatgctcttacacgcctttgagggatataatgtctgtatttttgcctatgggcagactggtgctggaaaatcttatacaatgatgggtaaacaagaagaaagccaggctggcatcattccacagttatgtgaagaactttttgagaaaatcaatgacaactgtaatgaagaaatgtcttactctgtagaggtgagctacatggaaatttactgtgaaagagtacgagatttgctgaatccaaaaaacaagggtaatttgcgtgtgcgtgaacacccacttcttggaccctatgtggaggatctgtccaagttggcagttacttcctacacagacattgctgacctcatggatgctgggaacaaagccaggacagtggcagctacaaacatgaatgaaacaagtagccgttcccacgctgtgtttacgattgttttcacccagaagaaacacgataatgagaccaacctttccactgagaaggtcagtaaaatcagcttggtggatctagcaggaagtgaacgagctgattcaactggtgccaaagggactcgattaaaggaaggagcaaatattaataagtctcttacaactttgggcaaagtcatttcagccttggccgaggtgagtaaaaagaagaagaaaacagattttattccctacagggattctgtacttacttggctccttcgagaaaatttaggtggcaattctcggactgcaatggttgctgctctgagccccgcggatatcaactacgatgagactttgagcactctgagatatgcagatcgtgcaaaacaaattaaatgcaatgctgttatcaatgaggaccccaatgccaaactggttcgtgaattaaaggaggaggtgacacggctgaaggaccttcttcgtgctcagggcctgggagatattattgatacatccatggggtccctcacttcatccccatcttcctgctcactcagtagtcaggtgggcttgacgtctgtgaccagtattcaagagaggatcatgtctacacctggaggagaggaagctattgaacgtttaaaggaatcagagaagatcattgctgagttgaatgaaacttgggaagagaagcttcgtaaaacagaggccatcagaatggagagagaggctttgttggctgagatgggagttgccattcgggaagatggaggaaccctaggggttttctcacctaaaaagaccccacatcttgttaacctcaatgaagacccactaatgtctgagtgcctactttattacatcaaagatggaattacaagggttggccaagcagatgctgagcggcgccaggacatagtgctgagcggggctcacattaaagaagagcattgtatcttccggagtgagagaagcaacagcggggaagttatcgtgaccttagagccctgtgagcgctcagaaacctacgtaaatggcaagagggtgtcccagcctgttcagctgcgctcaggaaaccgtatcatcatgggtaaaaaccatgttttccgctttaaccacccggaacaagcacgagctgagcgagagaagactccttctgctgagaccccctctgagcctgtggactggacatttgcccagagggagcttctggaaaaacaaggaattgatatgaaacaagagatggagaaaaggctacaggaaatggagatcttatacaaaaaggagaaggaagaagcagatcttcttttggagcagcagagactggacgcggattctgatagcggggacgattctgacaagaggtcgtgtgaagagagctggaaactgattacttctctgagagaaaagctacctcccagcaagttgcaaaccattgttaaaaaatgtggcctcccaagcagtgggaagaaacgtgaaccaattaaaatgtatcagataccccaaagaaggcgcttgagtaaagattccaagtgggtcacaatctcagatcttaaaattcaggctgtcaaagagatttgctatgaggttgctctcaatgacttcaggcacagtcggcaggagattgaagccctggccattgtcaagatgaaggagctttgtgccatgtatggcaagaaagaccccaatgagcgggactcctggagggcagtggccagggacgtctgggataccgtcggtgttggggatgagaagatcgaagacgtcatggccactgggaaaggcagcactgatgtagatgacctcaaggttcatatagacaagctggaagatattttgcaagaagtcaaaaagcaaaataacatgaaagacgaggagataaaagtcttaagaaataaaatgctcaaaatggaaaaagtcttgccactgatcggatctcaggaacagaaaagcccaggaagccacaaagcaaaggagcctgttggtgctggtgttagtagcacctctgagaataatgtaagtaaaggagacaatggagaacttgcaaaagaagaacgtgtttcccagctgatgaatggggatccagcttttagacgtggacgtctgcgctggatgaggcaagagcaaattcggtttaagaacttgcaacagcaggagataacaaagcagcttcgtcggcagaatgtacctcataggttcatccctcctgagaaccggaagccccgcttcccctttaagagcaaccctaaacacagaaactcttggagtcctgggacacatatcatcataacagaagatgaggttatagagcttaggattccaaaagacgatgaagcaaggaaagggaataaagaagagagccaagaaaaagggggtaaaggagcttttaaggatccccagtttccatggggctctcaaggaatgagaagtcaagatcacatccaagttagcaagcagcacattaataatcagcaacagccacctcaactacgttggagaagcaattctctcaataatggccagccgaaaagtacgcgctgccaggcatctgcctccgcggagtcattaaactcccacagtggtcaccccactgctgatgtacagactttccaggcaaagcgccatattcatcaacaccgtcagtcttactgtaattataacactggaggtcagttagagggcaatgcagccacttcctatcagaagcagactgacaaacccagccactgtagccagtttgtgacacctccgcggatgaggagacagttctcagcacccaatctcaaagctggtcgagaaaccacagtataaatcagttactggacaaacttgaaatcatggtggaagaaacagacagtgttagctcatgatttgatttggttctacctttggccttgagttcttattatttacattataaatattaactggttttatattgttaagacaaaacactggtaaaagtttcaacacctcccttttgcttgtataccataaatgggcagtttctgaaattttggataaagcatcaagaactcctttttctgaaacgttcctccttttttagtgcctaattaatatacttacttacacagacttgtcccatcttgatgtaagtttgttatgtttttataatgcctataaattaatctgacatccagaaagacctgcctcttagtttatgcagacattcaaaaggagaatttgataagcagaattaaatgtctgttattcataaatgttagaaattggtttaaaaataataacatgcaactgggtgggcacagctttggatttctcatccacgtctgttcccttctttaaatatgattagaattttcgtaagccaaaactaaaggtcttcaaacatatcttgcaatacatagctttgcatcttccacacaacttccacgtcttcttttattctgtattttacaaaaaactcatataatggttttttcttttgaatgtatcagaatatgtatgaaatttgtcatatcagaatctataaattggcactgtgtctgggattctgtttgtggtttgcattttgaagttcaatgtatcatttgacacacatgcacacaaagtgaactattcaccaaaatcatgccaacagaaataccaacaaaaaacttgtgtagcttgtaaggaggttatttggcttgagagggaagaggtgggacagacatgggggacaaagctacagcatatggctctgtggtgctgcttttttccaatagttgatgaaatagtgaaataaaagttaactttggttgggcttggaataaaggagatgatacataataaactattctttggttagcattagtaatgcttgtagacactcaaacaaggaaggcgaagtcctgatgatgatttattgtatcaatacctcattttatttggttgtggtctcagtttgcctcactggagaatccactaagaaagatggattttaatgggaagaaaagaattattttctacatcgttcctcatctcttgagtttgtcaaaaagttttctaagaggcagtgtgaagagccagagatgtccgaaattgcctgacttcatgttttggaagattcctaagtcacatgaaatcatctatcaaacacttgtcttccaaacggtgtgaaaaactacagccaagatagcagttagcattcaaggaagccttaaagattgtgattatgtttttttttcctttgcgtgtgggcactatgctttattagaacacattatttttaatcatagtattttttctttgcctctaagaaaatactttcttaatgctcagaaagttgcttccaattaatgtttttttccccttaaaaagagaagctttgagagatatttttgctttcatagctagaacagttgaagtcttcaactgaggttttatagcagattagacatgggtaaatgatgtctgtaatgggttgagttactgagatgacaatctcctgtgccatttggtttgaatgtacttgataggctgcttcaaatcagtcacttcaatgcattttgtgtaaacccagttgtccttttttattcctctttagacataaatgtgctaactattcctttctatacacaatttattttctaagattaaaaataataattgctaggtttggtggcacatgcgtacagccccagctacttaggaggctgaagcaggaggatccctagagcccaggagttctgggctgtggtacactatgccagttgggtgtaagtttggcatcaatatggtgatgtccctgaagcaggaaaccacaaacttgcatcaggacgggtgaacccagcccaggttggaaatggagcaggccaaaactcccaggctgatcagtaatgggatcttgcctatgaatagccagtgcactgcagccaggacaacagagtgagaacctgtcttt

SEQ ID NO: 15381 - DNA, 10669 bp, Homo sapiens
  source 1..10669: mol_type = unassigned DNA
ggaggctgcttgagcaagctagtcattgttcatgcaacacaaaacattcccgcccctaacgccagaatggagcttccagatccctttttttttttttccttgattgctaaatgagcttccaaggaaacttggctgtaacttcaaaagaagatttgattctttatttctggactgcatatatatatataacaaggccattaaaatgtcgggagcctcagtgaaggtggctgtccgggtaaggcccttcaattctcgagagaccagcaaggaatccaaatgcatcattcagatgcaaggcaactcgaccagtattattaacccaaagaatccaaaggaagctccaaagtccttcagcttcgactattcctactggtctcatacctcacccgaagatccctgttttgcatctcaaaaccgtgtgtacaatgacattggcaaggaaatgctcttacacgcctttgagggatataatgtctgtatttttgcctatgggcagactggtgctggaaaatcttatacaatgatgggtaaacaagaagaaagccaggctggcatcattccacagttatgtgaagaactttttgagaaaatcaatgacaactgtaatgaagaaatgtcttactctgtagaggtgagctacatggaaatttactgtgaaagagtacgagatttgctgaatccaaaaaacaagggtaatttgcgtgtgcgtgaacacccacttcttggaccctatgtggaggatctgtccaagttggcagttacttcctacacagacattgctgacctcatggatgctgggaacaaagccaggacagtggcagctacaaacatgaatgaaacaagtagccgttcccacgctgtgtttacgattgttttcacccagaagaaacacgataatgagaccaacctttccactgagaaggtcagtaaaatcagcttggtggatctagcaggaagtgaacgagctgattcaactggtgccaaagggactcgattaaaggaaggagcaaatattaataagtctcttacaactttgggcaaagtcatttcagccttggccgaggtggataactgcactagcaagagtaaaaagaagaagaaaacagattttattccctacagggattctgtacttacttggctccttcgagaaaatttaggtggcaattctcggactgcaatggttgctgctctgagccccgcggatatcaactacgatgagactttgagcactctgagatatgcagatcgtgcaaaacaaattaaatgcaatgctgttatcaatgaggaccccaatgccaaactggttcgtgaattaaaggaggaggtgacacggctgaaggaccttcttcgtgctcagggcctgggagatattattgatattgatccattgatcgatgattactctggaagtggaagcaaatatctgaaagattttcagaacaataagcatagatacttgctagcctctgagaatcaacgccctggccatttttccacagcatccatggggtccctcacttcatccccatcttcctgctcactcagtagtcaggtgggcttgacgtctgtgaccagtattcaagagaggatcatgtctacacctggaggagaggaagctattgaacgtttaaaggaatcagagaagatcattgctgagttgaatgaaacttgggaagagaagcttcgtaaaacagaggccatcagaatggagagagaggctttgttggctgagatgggagttgccattcgggaagatggaggaaccctaggggttttctcacctaaaaagaccccacatcttgttaacctcaatgaagacccactaatgtctgagtgcctactttattacatcaaagatggaattacaagggttggccaagcagatgctgagcggcgccaggacatagtgctgagcggggctcacattaaagaagagcattgtatcttccggagtgagagaagcaacagcggggaagttatcgtgaccttagagccctgtgagcgctcagaaacctacgtaaatggcaagagggtgtcccagcctgttcagctgcgctcaggaaaccgtatcatcatgggtaaaaaccatgttttccgctttaaccacccggaacaagcacgagctgagcgagagaagactccttctgctgagaccccctctgagcctgtggactggacatttgcccagagggagcttctggaaaaacaaggaattgatatgaaacaagagatggagaaaaggctacaggaaatggagatcttatacaaaaaggagaaggaagaagcagatcttcttttggagcagcagagactggactatgagagtaaattgcaggccttgcagaagcaggttgaaacccgatctctggctgcagaaacaactgaagaggaggaagaagaggaagaagttccttggacacagcatgaatttgagttggcccaatgggccttccggaaatggaagtctcatcagtttacttcattacgggacttactctggggcaatgccgtgtacctaaaggaggccaatgccatcagtgtggaactgaaaaagaaggtgcagtttcagtttgttctgctgactgacacactgtactcccctttgcctcctgaattacttcccactgagatggaaaaaactcatgaggacaggcctttccctcgcacagtggtagcagtagaagtccaggatttgaagaatggagcaacacactattggtctttggagaaactcaagcagaggctggatttgatgcgagagatgtatgatagggcaggggagatggcctccagtgcccaagacgaaagcgaaaccactgtgactggcagcgatcccttctatgatcggttccactggttcaaacttgtggggagctcccccattttccacggctgtgtgaacgagcgccttgccgaccgcacaccctcccccactttttccacggccgattccgacatcactgagctggctgacgagcagcaagatgagatggaggattttgatgatgaggcattcgtggatgacgccggctctgacgcagggacggaggagggatcagatctcttcagtgacgggcatgacccgttttacgaccgatccccttggttcattttagtgggaagggcatttgtttacctgagcaatctgctgtatcccgtgcccctgatccacagggtggccatcgtcagtgagaaaggtgaagtgcggggatttctgcgtgtggctgtacaggccatcgcagcggatgaagaagctcctgattatggctctggaattcgacagtcaggaacagctaaaatatcttttgataatgaatactttaatcagagtgacttttcgtctgttgcaatgactcgttctggtctgtccttggaggagttgaggattgtggaaggacagggtcagagttctgaggtcatcactcctccagaagaaatcagtcgaattaatgacttggatttgaagtcaagcactttgctggatggtaagatggtaatggaagggttttctgaagagattggcaaccacctgaaactgggcagtgccttcactttccgagtaacagtgttgcaggccagtggaatcctcccagagtatgcagatatcttctgtcagttcaactttttgcatcgccatgatgaagcattctccacggagcccctcaaaaacaatggcagaggaagtcccctggccttttatcatgtgcagaatattgcagtggagatcactgaatcatttgtggattacatcaaaaccaagcctattgtatttgaagtctttgggcattatcagcagcacccacttcatctgcaaggacaggagcttaacagtccgcctcagccgtgccgccgattcttccctccacccatgccactgtccaagccagttccagccaccaagttaaacacgatgagcaaaaccagccttggccagagcatgagcaagtatgacctcctggtttggtttgagatcagtgaactggagcctacaggagagtatatcccagctgtggttgaccacacagcaggcttgccttgccaggggacatttttgcttcatcagggcatccagcgaaggatcacagtgaccattatccatgagaaggggagcgagctccattggaaagatgttcgtgaactggtggtaggtcgtattcggaataagcctgaggtggatgaagctgcagttgatgccatcctctccctaaatattatttctgccaagtacctgaagtcttcccacaactctagcaggaccttctaccgctttgaggctgtgtgggatagctctctgcataactcccttcttctgaaccgagtgacaccctatggagaaaagatctacatgaccttgtcggcctacctagagctggatcattgcatccagccggctgtcatcaccaaggatgtgtgcatggtcttctactcccgagatgccaagatctcaccaccacgctctctgcgtagcctctttggcagcggctactcaaagtcaccagattcgaatcgagtcactggcatttacgaactcagcttatgcaaaatgtcagacacaggtagtccaggtatgcagagaaggagaagaaaaatcttagatacgtcagtggcatatgtgcggggagaagagaacttagcaggctggcggccccgtggagacagcctcatccttgagcaccagtgggagctggagaagctggagctcctacatgaggtggaaaaaacccgccactttttgctgctgcgtgagagacttggtgacagcatccccaaatccctgagcgactcgttatcccccagcctcagcagtgggaccctcagcacctccaccagtatctcctctcagatctcaaccactacctttgaaagcgccatcacacctagcgagagcagtggctatgattcaggagacatcgaaagcctggtggaccgagagaaagagctggctaccaagtgcctgcaacttctcacccacactttcaacagagaattcagccaggtgcacggcagcgtcagtgactgtaagttgtctgatatctctccaattggacgggatccctctgagtccagtttcagcagtgccaccctcactccctcctccacctgtccctctctggtagactctaggagcaactctctggatcagaagaccccagaagccaattcccgggcctctagtccctgcccagaatttgaacagtttcagattgtcccagctgtggaaacaccatatttggcccgagcaggaaaaaacgaatttctcaatcttgttccagatattgaagaaattagaccaagctcagtggtctctaagaaaggataccttcatttcaaggagcctctttacagtaactgggctaaacattttgttgtcgtccgtcggccttatgtcttcatctataacagtgacaaagaccctgtggagcgtggaatcattaacctgtccacagcacaggtggagtacagtgaggaccagcaggccatggtgaagacaccaaacacctttgctgtctgcacaaagcaccgtggggtccttttgcaggccctcaatgacaaagacatgaacgactggttgtatgccttcaacccacttctagctggcacaatacggtcaaagctttcccgcagatgcccgagccagtcgaaatactaagtgactctgccgagtgccctcactcgccttcgagagataaagaaagcgttacctctcatttctctttgtgattcttgacggtgactcttgtatgtaatcctgtggcttaactacttctccctccttgtccagcacttttctagctctcccgttccccatctccattgctctgtactcttttcttttttcttgtgctgagaatctcgttagtagcatgtggcctaacaaaaggaaaaaatgtttttaaacacacacacacacacacacacacacacacacatacacagacaaaaacacaaaaactctgaggggatctggtgaatctccaaattattgtgggtgtactttggcttccttttgtatgataggtccccatcatgaccacctctgatgtctgtgctgctgtcaccaggcacctttgtttttcaagacaacatactttttttttcttttctctgtttgtgatatcactttaatttttcttgggtggcttagagactaagggaggagacatctggcctttttagaacctgagaggaaaaaaagagtctttttttcccctctgtctctttttgccatggctaatccctgcatttccattcagggaaaaggtggtagtgagcatagaactgcaacagttatattctgagtcaaagttggggctttttacggcataattatggaatttttatttactggtagagaggagacgagaggctttttcagtgggcctgggacagtggctgctcttgactttgtgtgaagggaaatgccaaggatgcttctggtggacttcaggggaccccagggtttggccgtgggccgtgatggcagcaggcggtgggatgcttgtagctcctcacagcaggattcctgcccactgttttttctctgttgggagggaagctcttttctaggagtgtctcagttctgcttttggcattagtgatggtggtggtacagttggaattagtgccatgtcatacacaaatgttccacaaggcgggagtgtttcactttctggtgataaacttgatggtcattgttatgattaagataatgccgggcaggccgggcacagtggctcacgcctgtaatccaagcacttggggaggccgaggcgggcagatcacgagatcaggagttcaagaccagcctggccaatatgatgaaaccccgtctctactaaaaatacaaaattagtcgggtatggtggcacatgcctgtaattccagctgcttgggagcctgaggcaggagaactgcttgaacccaggaggcagaggttgcagtgagccaagatcgcgctattgcactccagcctgggtgacagagcaagactctgcctcagaaaaaaaaaaaaataataatgctgggtagtgaccttgtgattgttacagctccctttgatcaaagaaatatagctttcaggcataaacctggaagtctccctctgaatccagcagttgttttcattgatgcttgtcaggttgaagatgctttcagtgatgctctctatactcataaataagcaaatgtggcaggctttgctttctggatcccaggattaaaactaaccgtgaccactactccaaacaaaacacaatatgcctaggggcacggatgaacgtccagggagcccgggccccaggctttgttgcgtgttccctgctcctctccatctggtgtggaaacactgcccagggagaaaggaggaagctcactgtggacagtcttctttccttctgacagaccaggtcatctggcttccgagatcatcagagaagataagtctgtctctttcagctgccagtaagttttccaggatgagaggggaaaaagaaagcctccagtgacttcagttgctttgccagttgtcttgggattgttttacaccatcctttacttcccttgctcagacctctctgtttcaccattgctcaggcattcaggaaagtatctgctcactcccacttggtgagtcctcggccttgaggttgctgactctcaggcgttaggcagctggatgacttcccgcttcacgcagcaaaggccaggggcttgcgcgcctctgcagagttgttgctagggagacttgtgtcatcatccacaaccttgtttctcacttcctggttgggctcatctctgaagaacaggtctcccagcttcgctccttatcactgcattgtgaagaggaggaaaagtgaatcacggagagagaaaggaaaggatagaatcacaggctgcgtctgcacctgaaaagtgacccgcggaaactctatggcggattttttttttaactttcttcttcctgttaaaacataggtcactaactgtgatgttatttgttttctaagtggtatgtgagattttctaatgtagttagaagtttcattgtctgatggacacaatatgcccttccggttctattcaaaccagcaggatctgtcggtgcttagagatggctgcctggactggaatcaaatctaatttcagggaaatgaagatggaatttgaaggtcacttttaaaattaagtcattgatgctgctgttacagagtgtgacagaggatccatgtctgtgacacaggacggtgggaagcctgagagagagtgaaattatgtgatacactgaaatgacttttgtttttcttctaactcatacaaaactggtttggaaagtctttgctttggaagcgtcagacattagaacaggccaaactggactgtctgttcatagcgtgcctgaataagaaggcctcttagggagccagagggagcagagtggtcgtgtcctgcgtgctcttcaccctctggggcgcccctgctgcggctggcaggtgcagacagcctttgctggtccccagcacgtccagggtgggtgctcccttgcccgacagaaccatccccactgtgaggctgtgagagatttgtggcaggaactgtttatgaggctctagttgttgctgttgtggcgggaaagttaagaaacatagcccttaaggaaaccacctttatgtattttcttaaagcacgcctttaaataagcaaaaactttaaaaggcaggaaagagaattcttaggcaaattcagagaaataagtgctagttaatactaatcacctcctcctctgtctctcatcctcctttctcccatcaaagcaaaatatggcctcaccaccagccccaaatcagtgctcagaccctctctgtgtctgtgtgccctcctgggagtcagtcagcgctcaggccaggactgtgcagggccagccagcccatgcgctagtcaggagcacaggcaaggggtgcttgtggcagtggccgggcacctgagccccagctcgttgttaaacgtgctgacggcaaggggcaatggagtgagtttcccaactaagaaaccactattatatattttttcccttcagtcacatagacttcagacaactctcctattttttatggatttttcagctcatttcagatgaaggaactaagtcattgtgaactgtctcttgagatctaaaaacaagatgacttttcctggcacatattccaaagcaaagactttgttgcctgctgcttattgtctaatttacagggatatttaattttgtcaggtctatgtatatttatccagctatacttacttgcacagtggattggagagaaaggattctccagtgtgcacactcatcggtactctttctgcatttccctcgtgctgtgtcccgctcgggttccaatggacagtatcagggcttgtttgacttaggtctttcagttttcctttcggttcccttttaaaaatgtgattgttaacctgcctcttgaaagattcaaccgggtgtggtggctcacgcctgtaatcccagcacattgggaggccaaggcaggtggatcacctgaggtcagaagtttgagaccagcctggccaacatggtgaaaccccgtctctactaaaaatacaaaaagtagccaggcgtggtggcgtgtgcctgtagtcccagctacttgggaggctgaggcaggagaatagcttgaacctgggaggtggaggctgcagtgagttgagactgcaccattgcactccagcctgggtgacaaagcaggactccgtctcaaaaaaaaagaaaagattcatgatgctgctgctcccagaaggtttgctggatgtgtttacataggactctaacttgtgtgcactacagttgttcaccagggccagtgattcaccccagtgtgtggccagaccatgactgtgtagcaggaatgttttaatttgtgcttccttagtaaattgaaatatcagctgagagattatttgctgctgttattcaaaaggccatttatgaagttagtatttgagccccataagatctttaaaaagcctccaatcatttaaaggaagaaatcagagttgctataaaattcagtaaaaagctcatagccaaacggctgtgctcagatggaaagtctgagctgaggttggtctcttgccaaaccgtggctgttgtgtgttgttcttcatgtcttcgagttcattttttttcattctgcctattctggcatcagctcacttgaggagtccctcagccttcttgtatttaaggcatcgtcttagactttgtggctctaaagtacctgtctgttgagatttcaagtctcttgtcaccatcctcacacatgacaacaaaacccataatgcataagtggcctttttgaaccaagactttgcaaactgatctctcccccgtgaaggagttgagcacattagcaacaatgtacattaattttggattttcattttcatgttttattttgtaaatattatctgatgtttggagcttgagtatacagactgtaaatatagttcttgtatttgtactaattctgattcttttgctgtatagccttagatgtgcaatgcagacactatctaactgtgtgtggtaaccttgcgtcacggagctgttagtgaacgaggtaaaaataataaaggtacagccagtgcatcagaa

SEQ ID NO: 15382 - DNA, 7565 bp, Homo sapiens
  source 1..7565: mol_type = unassigned DNA
cccggccccccgcgcccccgcgcgccgcggctcctgttgacccggtccgcccgtcggtctgcagcgcggctgaggaaacttggctgtaacttcaaaagaagatttgattctttatttctggactgcatatatatatataacaaggccattaaaatgtcgggagcctcagtgaaggtggctgtccgggtaaggcccttcaattctcgagagaccagcaaggaatccaaatgcatcattcagatgcaaggcaactcgaccagtattattaacccaaagaatccaaaggaagctccaaagtccttcagcttcgactattcctactggtctcatacctcacccgaagatccctgttttgcatctcaaaaccgtgtgtacaatgacattggcaaggaaatgctcttacacgcctttgagggatataatgtctgtatttttgcctatgggcagactggtgctggaaaatcttatacaatgatgggtaaacaagaagaaagccaggctggcatcattccacagttatgtgaagaactttttgagaaaatcaatgacaactgtaatgaagaaatgtcttactctgtagaggtgagctacatggaaatttactgtgaaagagtacgagatttgctgaatccaaaaaacaagggtaatttgcgtgtgcgtgaacacccacttcttggaccctatgtggaggatctgtccaagttggcagttacttcctacacagacattgctgacctcatggatgctgggaacaaagccaggacagtggcagctacaaacatgaatgaaacaagtagccgttcccacgctgtgtttacgattgttttcacccagaagaaacacgataatgagaccaacctttccactgagaaggtcagtaaaatcagcttggtggatctagcaggaagtgaacgagctgattcaactggtgccaaagggactcgattaaaggaaggagcaaatattaataagtctcttacaactttgggcaaagtcatttcagccttggccgaggtgagtaaaaagaagaagaaaacagattttattccctacagggattctgtacttacttggctccttcgagaaaatttaggtggcaattctcggactgcaatggttgctgctctgagccccgcggatatcaactacgatgagactttgagcactctgagatatgcagatcgtgcaaaacaaattaaatgcaatgctgttatcaatgaggaccccaatgccaaactggttcgtgaattaaaggaggaggtgacacggctgaaggaccttcttcgtgctcagggcctgggagatattattgatacatccatggggtccctcacttcatccccatcttcctgctcactcagtagtcaggtgggcttgacgtctgtgaccagtattcaagagaggatcatgtctacacctggaggagaggaagctattgaacgtttaaaggaatcagagaagatcattgctgagttgaatgaaacttgggaagagaagcttcgtaaaacagaggccatcagaatggagagagaggctttgttggctgagatgggagttgccattcgggaagatggaggaaccctaggggttttctcacctaaaaagaccccacatcttgttaacctcaatgaagacccactaatgtctgagtgcctactttattacatcaaagatggaattacaagggttggccaagcagatgctgagcggcgccaggacatagtgctgagcggggctcacattaaagaagagcattgtatcttccggagtgagagaagcaacagcggggaagttatcgtgaccttagagccctgtgagcgctcagaaacctacgtaaatggcaagagggtgtcccagcctgttcagctgcgctcaggaaaccgtatcatcatgggtaaaaaccatgttttccgctttaaccacccggaacaagcacgagctgagcgagagaagactccttctgctgagaccccctctgagcctgtggactggacatttgcccagagggagcttctggaaaaacaaggaattgatatgaaacaagagatggagaaaaggctacaggaaatggagatcttatacaaaaaggagaaggaagaagcagatcttcttttggagcagcagagactggacgcggattctgatagcggggacgattctgacaagaggtcgtgtgaagagagctggaaactgattacttctctgagagaaaagctacctcccagcaagttgcaaaccattgttaaaaaatgtggcctcccaagcagtgggaagaaacgtgaaccaattaaaatgtatcagataccccaaagaaggcgcttgagtaaagattccaagtgggtcacaatctcagatcttaaaattcaggctgtcaaagagatttgctatgaggttgctctcaatgacttcaggcacagtcggcaggagattgaagccctggccattgtcaagatgaaggagctttgtgccatgtatggcaagaaagaccccaatgagcgggactcctggagggcagtggccagggacgtctgggataccgtcggtgttggggatgagaagatcgaagacgtcatggccactgggaaaggcagcactgatgtagatgacctcaaggttcatatagacaagctggaagatattttgcaagaagtcaaaaagcaaaataacatgaaagacgaggagataaaagtcttaagaaataaaatgctcaaaatggaaaaagtcttgccactgatcggatctcaggaacagaaaagcccaggaagccacaaagcaaaggagcctgttggtgctggtgttagtagcacctctgagaataatgtaagtaaaggagacaatggagaacttgcaaaagaagaacgtgtttcccagctgatgaatggggatccagcttttagacgtggacgtctgcgctggatgaggcaagagcaaattcggtttaagaacttgcaacagcaggagataacaaagcagcttcgtcggcagaatgtacctcataggttcatccctcctgagaaccggaagccccgcttcccctttaagagcaaccctaaacacagaaactcttggagtcctgggacacatatcatcataacagaagatgaggttatagagcttaggattccaaaagacgatgaagcaaggaaagggaataaagaagagagccaagaaaaagggggtaaaggagcttttaaggatccccagtttccatggggctctcaaggaatgagaagtcaagatcacatccaagttagcaagcagcacattaataatcagcaacagccacctcaactacgttggagaagcaattctctcaataatggccagccgaaaagtacgcgctgccaggcatctgcctccgcggagtcattaaactcccacagtggtcaccccactgctgatgtacagactttccaggcaaagcgccatattcatcaacaccgtcagtcttactgtaattataacactggaggtcagttagagggcaatgcagccacttcctatcagaagcagactgacaaacccagccactgtagccagtttgtgacacctccgcggatgaggagacagttctcagcacccaatctcaaagctggtcgagaaaccacagtataaatcagttactggacaaacttgaaatcatggtggaagaaacagacagtgttagctcatgatttgatttggttctacctttggccttgagttcttattatttacattataaatattaactggttttatattgttaagacaaaacactggtaaaagtttcaacacctcccttttgcttgtataccataaatgggcagtttctgaaattttggataaagcatcaagaactcctttttctgaaacgttcctccttttttagtgcctaattaatatacttacttacacagacttgtcccatcttgatgtaagtttgttatgtttttataatgcctataaattaatctgacatccagaaagacctgcctcttagtttatgcagacattcaaaaggagaatttgataagcagaattaaatgtctgttattcataaatgttagaaattggtttaaaaataataacatgcaactgggtgggcacagctttggatttctcatccacgtctgttcccttctttaaatatgattagaattttcgtaagccaaaactaaaggtcttcaaacatatcttgcaatacatagctttgcatcttccacacaacttccacgtcttcttttattctgtattttacaaaaaactcatataatggttttttcttttgaatgtatcagaatatgtatgaaatttgtcatatcagaatctataaattggcactgtgtctgggattctgtttgtggtttgcattttgaagttcaatgtatcatttgacacacatgcacacaaagtgaactattcaccaaaatcatgccaacagaaataccaacaaaaaacttgtgtagcttgtaaggaggttatttggcttgagagggaagaggtgggacagacatgggggacaaagctacagcatatggctctgtggtgctgcttttttccaatagttgatgaaatagtgaaataaaagttaactttggttgggcttggaataaaggagatgatacataataaactattctttggttagcattagtaatgcttgtagacactcaaacaaggaaggcgaagtcctgatgatgatttattgtatcaatacctcattttatttggttgtggtctcagtttgcctcactggagaatccactaagaaagatggattttaatgggaagaaaagaattattttctacatcgttcctcatctcttgagtttgtcaaaaagttttctaagaggcagtgtgaagagccagagatgtccgaaattgcctgacttcatgttttggaagattcctaagtcacatgaaatcatctatcaaacacttgtcttccaaacggtgtgaaaaactacagccaagatagcagttagcattcaaggaagccttaaagattgtgattatgtttttttttcctttgcgtgtgggcactatgctttattagaacacattatttttaatcatagtattttttctttgcctctaagaaaatactttcttaatgctcagaaagttgcttccaattaatgtttttttccccttaaaaagagaagctttgagagatatttttgctttcatagctagaacagttgaagtcttcaactgaggttttatagcagattagacatgggtaaatgatgtctgtaatgggttgagttactgagatgacaatctcctgtgccatttggtttgaatgtacttgataggctgcttcaaatcagtcacttcaatgcattttgtgtaaacccagttgtccttttttattcctctttagacataaatgtgctaactattcctttctatacacaatttattttctaagattaaaaataataattgctaggtttggtggcacatgcgtacagccccagctacttaggaggctgaagcaggaggatccctagagcccaggagttctgggctgtggtacactatgccagttgggtgtaagtttggcatcaatatggtgatgtccctgaagcaggaaaccacaaacttgcatcaggacgggtgaacccagcccaggttggaaatggagcaggccaaaactcccaggctgatcagtaatgggatcttgcctatgaatagccagtgcactgcagccaggacaacagagtgagaacctgtctttaaaaaaaaaaaaaaaaaaaaaaaaaaaggtaatatttattatattattcaggtttcaactctgtagcaaaaatgggctctcatttccctaacttgagataacatagggtaggtccatatattttcattcttacagtggtcttttcatgggagtgaatgagttactctccactggtgattaggtaatactgtagaatgaagagttgtataatatattcatttacagctgtggattgtggtaaggactatgtccacagtgatattccaaagaattgggtttatatttgtgcttcatctgttaatcccaggtgtcctcatgttgctgaaatatttagatagctaaaatatcccttaatttcacagatgaccaggaagaaattaaccaaggttttattgactgccatgtatgtcccatgatgcatttctgagcaaatgcttatcctagagaataactctgtatgaataaaattgcttaattgagtctcttactaaataagtaactagtgccatgcttttgtgagctcttggtatggcccatattactttgttttttgtttttgttattgttgttttgtgatagtcttgctctgtcgcccaggctgcagtgcagtggcacaatctcagctcactgcaacctctgcctcctgggttcaagcaattctcctgtctcagcctcctgggtagctgggactacaggtgcatgccaccatgcctggctaacttttgtatttttagtagagacagggtttcaccacgttggtcaggctggtctcgaattcctaacctcaggtgatccacctgccttggcctcccaaagtgctgagattacaggcgtgagccaccgcgcctggcctgtttgtttttttaacatgatttttctctaagcttaaataccacaaggccaaagagaaatggtcataatttaaaccattattatattgttgaggtatccctagctattattatagcaaagtgggaaaaaagtgtttattctattgaagttatgtaatgatccgacattaatgggaatatagaggagtcctaattaattggtataatttcacaaagcggaatggtattccttggagagttaaagacattctctttagtaagtgtaaaccaaagggcattttctttattcctgcttctaattccttctagcccagtgaattatttctcttttcactggtaatgtgatgaatgggaattgtttattacattgaagtgacttgaagtgaccttttgtgctttaggtgcaggttgacactgaaaaaaaaacaaaacactgaatttttcacacctatgtctgcattaaaggctgttttactaccggaagttacatagacttcctgcagtcagctgctgtgccccagtgccttactggtcctttgtagatttgccttaatgatttgtacaaatgactgggaggcggggatgctgcctgtgtcctggtgaaccttaatgaaggggccgtcttaggcacagtgcaaaacaagcatttgtcctgtactgttagagccaaaattgtgatgagcaatactgataattgtccagtttatgtcatctttcccagattttaaaatctgttctagatattcttagcttgaaccacttttgattgtgaaatgtattaggtgttgtcccattattactgtaaaatgaagttttgaatcttcttgttaataaactgtggatttcccctctcaatttcttaaacaacaacaaaaaaatgcttgaagattgtctttgagtgtaagatctgccttttcagaaagggagtgttagtttgtaatgttaaaaaataaagacctcattcaataaaagttgaagtcatcttttaa

SEQ ID NO: 15383 - DNA, 3201 bp, Homo sapiens
  source 1..3201: mol_type = unassigned DNA
cgccccctttccttacgcggattggtagctgcaggcttccctatctgattggccgaacgaacgcagcgcgtaatttaaaatattgtatctgtaacaaagctgcacctcgtgggcggagttgtgctctgcggctgcgaaagtccagcttcggcgactaggtgtgagtaagccagtatcccaggaggagcaagtggcacgtcttcggacctaggctgcccctgccgtcatgtcgcaagggatcctttctccgccagcgggcttgctgtccgatgacgatgtcgtagtttctcccatgtttgagtccacagctgcagatttggggtctgtggtacgcaagaacctgctatcagactgctctgtcgtctctacctccctagaggacaagcagcaggttccatctgaggacagtatggagaaggtgaaagtatacttgagggttaggcccttgttaccttcagagttggaacgacaggaagatcagggttgtgtccgtattgagaatgtggagacccttgttctacaagcacccaaggactcttttgccctgaagagcaatgaacggggaattggccaagccacacacaggttcaccttttcccagatctttgggccagaagtgggacaggcatccttcttcaacctaactgtgaaggagatggtaaaggatgtactcaaagggcagaactggctcatctatacatatggagtcactaactcagggaaaacccacacgattcaaggtaccatcaaggatggagggattctcccccggtccctggcgctgatcttcaatagcctccaaggccaacttcatccaacacctgatctgaagcccttgctctccaatgaggtaatctggctagacagcaagcagatccgacaggaggaaatgaagaagctgtccctgctaaatggaggcctccaagaggaggagctgtccacttccttgaagaggagtgtctacatcgaaagtcggataggtaccagcaccagcttcgacagtggcattgctgggctctcttctatcagtcagtgtaccagcagtagccagctggatgaaacaagtcatcgatgggcacagccagacactgccccactacctgtcccggcaaacattcgcttctccatctggatctcattctttgagatctacaacgaactgctttatgacctattagaaccgcctagccaacagcgcaagaggcagactttgcggctatgcgaggatcaaaatggcaatccctatgtgaaagatctcaactggattcatgtgcaagatgctgaggaggcctggaagctcctaaaagtgggtcgtaagaaccagagctttgccagcacccacctcaaccagaactccagccgcagtcacagcatcttctcaatcaggatcctacaccttcagggggaaggagatatagtccccaagatcagcgagctgtcactctgtgatctggctggctcagagcgctgcaaagatcagaagagtggtgaacggttgaaggaagcaggaaacattaacacctctctacacaccctgggccgctgtattgctgcccttcgtcaaaaccagcagaaccggtcaaagcagaacctggttcccttccgtgacagcaagttgactcgagtgttccaaggtttcttcacaggccgaggccgttcctgcatgattgtcaatgtgaatccctgtgcatctacctatgatgaaactcttcatgtggccaagttctcagccattgctagccagcttgtgcatgccccacctatgcaactgggattcccatccctgcactcgttcatcaaggaacatagtcttcaggtatcccccagcttagagaaaggggctaaggcagacacaggccttgatgatgatattgaaaatgaagctgacatctccatgtatggcaaagaggagctcctacaagttgtggaagccatgaagacactgcttttgaaggaacgacaggaaaagctacagctggagatgcatctccgagatgaaatttgcaatgagatggtagaacagatgcaacagcgggaacagtggtgcagtgaacatttggacacccaaaaggaactattggaggaaatgtatgaagaaaaactaaatatcctcaaggagtcactgacaagtttttaccaagaagagattcaggagcgggatgaaaagattgaagagctagaagctctcttgcaggaagccagacaacagtcagtggcccatcagcaatcagggtctgaattggccctacggcggtcacaaaggttggcagcttctgcctccacccagcagcttcaggaggttaaagctaaattacagcagtgcaaagcagagctaaactctaccactgaagagttgcataagtatcagaaaatgttagaaccaccaccctcagccaagcccttcaccattgatgtggacaagaagttagaagagggccagaagaatataaggctgttgcggacagagcttcagaaacttggtgagtctctccaatcagcagagagagcttgttgccacagcactggggcaggaaaacttcgtcaagccttgaccacttgtgatgacatcttaatcaaacaggaccagactctggctgaactgcagaacaacatggtgctagtgaaactggaccttcggaagaaggcagcatgtattgctgagcagtatcatactgtgttgaaactccaaggccaggtttctgccaaaaagcgccttggtaccaaccaggaaaatcagcaaccaaaccaacaaccaccagggaagaaaccattccttcgaaatttacttccccgaacaccaacctgccaaagctcaacagactgcagcccttatgcccggatcctacgctcacggcgttcccctttactcaaatctgggccttttggcaaaaagtactaaggctgtggggaaagagaagagcagtcatggccctgaggtgggtcagctactctcctgaagaaataggtctcttttatgctttaccatatatcaggaattatatccaggatgcaatactcagacactagcttttttctcacttttgtattataaccacctatgtaatctcatgttgttgtttttttttatttacttatatgatttctatgcacacaaaaacagttatattaaagatattattgttcacattttttattgaattccaaatgtagcaaaatcattaaaacaaattataaaaggga

SEQ ID NO: 15384 - DNA, 810 bp, Homo sapiens
  source 1..810: mol_type = unassigned DNA
tggagcccgggttaccagctcttgcccgcgcggaataggctttaagaaatcggagctgcagccatctgtttttctcttaatgctgcatctctgttctcacggtggtccttgggacctaggctgcccctgccgtcatgtcgcaagggatcctttctccgccagcgggcttgctgtccgatgacgatgtcgtagtttctcccatgtttgagtccacagctgcagatttggggtctgtggtacgcaagaacctgctatcagactgctctgtcgtctctacctccctagaggacaagcagcaggttccatctgaggacagtatggagaaggtgaaagtatacttgagggttaggcccttgttaccttcagagttggaacgacaggaagatcagggttgtgtccgtattgagaatgtggagacccttgttctacaagcacccaaggactcttttgccctgaagagcaatgaacggggaattggccaagccacacacaggttcaccttttcccagatctttgggccagaagtgggacaggcatccttcttcaacctaactgtgaaggagatggtaaaggatgtactcaaagggcagaactggctcatctatacatatggagtcactaactcagggaaaacccacacgattcaaggtaccatcaaggatggagggattctcccccggtccctggcgctgatcttcaatagcctccaaggccaacttcatccaacacctgatctgaagcccttgctctccaatgaggtaatctggctagacagcaagcagatccgacaggaggaaatgaagaagctgt

SEQ ID NO: 15385 - DNA, 2935 bp, Homo sapiens
  source 1..2935: mol_type = unassigned DNA
gagtaagccagtatcccaggaggagcaagtggcacgtcttcggacctaggctgcccctgccgtcatgtcgcaagggatcctttctccgccagcgggcttgctgtccgatgacgatgtcgtagtttctcccatgtttgagtccacagctgcagatttggggtctgtggtacgcaagaacctgctatcagactgctctgtcgtctctacctccctagaggacaagcagcaggttccatctgaggacagtatggagaaggaagatcagggttgtgtccgtattgagaatgtggagacccttgttctacaagcacccaaggactcttttgccctgaagagcaatgaacggggaattggccaagccacacacaggttcaccttttcccagatctttgggccagaagtgggacaggcatccttcttcaacctaactgtgaaggagatggtaaaggatgtactcaaagggcagaactggctcatctatacatatggagtcactaactcagggaaaacccacacgattcaaggtaccatcaaggatggagggattctcccccggtccctggcgctgatcttcaatagcctccaaggccaacttcatccaacacctgatctgaagcccttgctctccaatgaggtaatctggctagacagcaagcagatccgacaggaggaaatgaagaagctgtccctgctaaatggaggcctccaagaggaggagctgtccacttccttgaagaggagtgtctacatcgaaagtcggataggtaccagcaccagcttcgacagtggcattgctgggctctcttctatcagtcagtgtaccagcagtagccagctggatgaaacaagtcatcgatgggcacagccagacactgccccactacctgtcccggcaaacattcgcttctccatctggatctcattctttgagatctacaacgaactgctttatgacctattagaaccgcctagccaacagcgcaagaggcagactttgcggctatgcgaggatcaaaatggcaatccctatgtgaaagatctcaactggattcatgtgcaagatgctgaggaggcctggaagctcctaaaagtgggtcgtaagaaccagagctttgccagcacccacctcaaccagaactccagccgcagtcacagcatcttctcaatcaggatcctacaccttcagggggaaggagatatagtccccaagatcagcgagctgtcactctgtgatctggctggctcagagcgctgcaaagatcagaagagtggtgaacggttgaaggaagcaggaaacattaacacctctctacacaccctgggccgctgtattgctgcccttcgtcaaaaccagcagaaccggtcaaagcagaacctggttcccttccgtgacagcaagttgactcgagtgttccaaggtttcttcacaggccgaggccgttcctgcatgattgtcaatgtgaatccctgtgcatctacctatgatgaaactcttcatgtggccaagttctcagccattgctagccagcttgtgcatgccccacctatgcaactgggattcccatccctgcactcgttcatcaaggaacatagtcttcaggtatcccccagcttagagaaaggggctaaggcagacacaggccttgatgatgatattgaaaatgaagctgacatctccatgtatggcaaagaggagctcctacaagttgtggaagccatgaagacactgcttttgaaggaacgacaggaaaagctacagctggagatgcatctccgagatgaaatttgcaatgagatggtagaacagatgcaacagcgggaacagtggtgcagtgaacatttggacacccaaaaggaactattggaggaaatgtatgaagaaaaactaaatatcctcaaggagtcactgacaagtttttaccaagaagagattcaggagcgggatgaaaagattgaagagctagaagctctcttgcaggaagccagacaacagtcagtggcccatcagcaatcagggtctgaattggccctacggcggtcacaaaggttggcagcttctgcctccacccagcagcttcaggaggttaaagctaaattacagcagtgcaaagcagagctaaactctaccactgaagagttgcataagtatcagaaaatgttagaaccaccaccctcagccaagcccttcaccattgatgtggacaagaagttagaagagggccagaagaatataaggctgttgcggacagagcttcagaaacttggtgagtctctccaatcagcagagagagcttgttgccacagcactggggcaggaaaacttcgtcaagccttgaccacttgtgatgacatcttaatcaaacaggaccagactctggctgaactgcagaacaacatggtgctagtgaaactggaccttcggaagaaggcagcatgtattgctgagcagtatcatactgtgttgaaactccaaggccaggtttctgccaaaaagcgccttggtaccaaccaggaaaatcagcaaccaaaccaacaaccaccagggaagaaaccattccttcgaaatttacttccccgaacaccaacctgccaaagctcaacagactgcagcccttatgcccggatcctacgctcacggcgttcccctttactcaaatctgggccttttggcaaaaagtactaaggctgtggggaaagagaagagcagtcatggccctgaggtgggtcagctactctcctgaagaaataggtctcttttatgctttaccatatatcaggaattatatccaggatgcaatactcagacactagcttttttctcacttttgtattataaccacctatgtaatctcatgttgttgtttttttttatttacttatatgatttctatgcacacaaaaacagttatattaaagatattattgttcacatttt

SEQ ID NO: 15386 - DNA, 631 bp, Homo sapiens
  source 1..631: mol_type = unassigned DNA
gaaatgtcgtttttccccttaagacaaagcaagcaccctaaaccagttaccctgtgcactcctgttaagattgttgctaaggaaggacaggagttggctgctgaagcctcaagatttcctttaggctcttagacctaggctgcccctgccgtcatgtcgcaagggatcctttctccgccagcgggcttgctgtccgatgacgatgtcgtagtttctcccatgtttgagtccacagctgcagatttggggtctgtggtacgcaagaacctgctatcagactgctctgtcgtctctacctccctagaggacaagcagcaggttccatctgaggacagtatggagaaggtgaaagtatacttgagggttaggcccttgttaccttcagagttggaacgacaggaagatcagggttgtgtccgtattgagaatgtggagacccttgttctacaagcacccaaggactcttttgccctgaagagcaatgaacggggaattggccaagccacacacaggttcaccttttcccagatctttgggccagaagtgggacaggcatccttcttcaacctaactgtgaaggagatggtaaaggatgtactcaaagggcagaactggctcatctatacatatg

SEQ ID NO: 15387 - DNA, 6499 bp, Homo sapiens
  source 1..6499: mol_type = unassigned DNA
gaggagcccggagcgccctggcgggcgtggagtccccagcctggccgctgggaggccgcgtccccaccggagggggcagggcgcactcacccggccgccctgaggccgctggcggcctgttggcttctccacaggcgcgctcgccgttcaagcgcgctttgtccccgccccagatcctggggggtgagcggtggagaaggggcgggcgcccgcgagccgtgaatcacctcctcctcttgctgcctcagcgccgccgccacctttccattcagtcgcccaacatggctggagcgcggcggaggtgagccggccgcccgcccgcagacgccccagcctactgcgcccgagtcccgcggccccagtggcgcctcagctctgcggtgccgaggcccaacggctcgatcgctgcccgccgccagcatgttgggcgccccggacgagagctccgtgcgggtggctgtcagaataagaccacagcttgccaaagagaagattgaaggatgccatatttgtacatctgtcacaccaggagagcctcaggtcttcctagggaaagataaggcttttacttttgactatgtatttgacattgactcccagcaagagcagatctacattcaatgtatagaaaaactaattgaaggttgctttgaaggatacaatgctacagtttttgcttatggacaaactggagctggtaaaacatacacaatgggaacaggatttgatgttaacattgttgaggaagaactgggtattatttctcgagctgttaaacacctttttaagagtattgaagaaaaaaaacacatagcaattaaaaatgggcttcctgctccagattttaaagtgaatgcccaattcttagagctctataatgaagaggtccttgacttatttgataccactcgtgatattgatgcaaaaagtaaaaaatcaaatataagaattcatgaagattcaactggaggaatttatactgtgggcgttacaacacgtactgtgaatacagaatcagagatgatgcagtgtttgaagttgggtgctttatcccggacaactgccagtacccagatgaatgttcagagctctcgttcacatgccatttttaccattcatgtgtgtcaaaccagagtgtgtccccaaatagatgctgacaatgcaactgataataaaattatttctgaatcagcacagatgaatgaatttgaaaccctgactgcaaagttccattttgttgatctcgcaggatctgaaagactgaagcgtactggagctacaggcgagagggcaaaagaaggcatttctatcaactgtggacttttggcacttggcaatgtaataagtgccttgggagacaagagcaagagggccacacatgtcccctatagagattccaagctaacaagactactacaggattccctcgggggtaatagccaaacaatcatgatagcatgtgtcagcccttcagacagagactttatggaaacgttaaacaccctgaaatacgccaatcgagctagaaatatcaagaataaggtgatggtcaatcaggacagagctagtcagcaaatcaatgcacttcgtagtgaaatcacacgacttcagatggagctcatggagtacaaaacaggtaaaagaataattgacgaagagggtgtggaaagcatcaatgacatgtttcatgagaatgctatgctacagactgaaaataataacctgcgtgtaagaattaaagccatgcaagagacggttgatgcattgaggtccagaattacacagcttgttagtgatcaggccaaccatgttcttgccagagcaggtgaaggaaatgaggagattagtaatatgattcatagttatataaaagaaatcgaagatctcagggcaaaattattagaaagtgaagcagtgaatgagaaccttcgaaaaaacttgacaagagccacagcaagagcgccatatttcagcggatcatcaactttttctcctaccatactatcctcagacaaagaaaccattgaaattatagacctagcaaaaaaagatttagagaagttgaaaagaaaagaaaagaggaagaaaaaaaggctacagaaacttgaggaaagcaatcgagaagaaagaagtgtggctggtaaagaggataatacagacactgaccaagagaagaaagaagaaaagggtgtttcggaaagagaaaacaatgaattagaagtggaagaaagtcaagaagtgagtgatcatgaggatgaagaagaggaggaggaggaggaggaagatgacattgatgggggtgaaagttctgatgaatcagattctgaatcagatgaaaaagccaattatcaagcagacttggcaaacattacttgtgaaattgcaattaagcaaaagctgattgatgaactagaaaacagccagaaaagactgcagactctgaaaaagcagtatgaagagaagctaatgatgctgcaacataaaattcgggatactcagcttgaaagagaccaggtgcttcaaaacttaggctcggtagaatcttactcagaagaaaaagcaaaaaaagttaggtctgaatatgaaaagaaactccaagccatgaacaaagaactgcagagacttcaagcagctcaaaaagaacatgcaaggttgcttaaaaatcagtctcagtatgaaaagcaattgaagaaattgcagcaggatgtgatggaaatgaaaaaaacaaaggttcgcctaatgaaacaaatgaaagaagaacaagagaaagccagactgactgagtctagaagaaacagagagattgctcagttgaaaaaggatcaacgtaaaagagatcatcaacttagacttctggaagcccaaaaaagaaaccaagaagtggttctacgtcgcaaaactgaagaggttacggctcttcgtcggcaagtaagacccatgtcagataaagtggctgggaaagttactcggaagctgagttcatctgatgcacctgctcaggacacaggttccagtgcagctgctgtcgaaacagatgcatcaaggacaggagcccagcagaaaatgagaattcctgtggcgagagtccaggccttaccaacgccggcaacaaatggaaacaggaaaaaatatcagaggaaaggattgactggccgagtgtttatttccaagacagctcgcatgaagtggcagctccttgagcgcagggtcacagacatcatcatgcagaagatgaccatttccaacatggaggcagatatgaatagactcctcaagcaacgggaggaactcacaaaaagacgagagaaactttcaaaaagaagggagaagatagtcaaggagaatggagagggagataaaaatgtggctaatatcaatgaagagatggagtcactgactgctaatatcgattacatcaatgacagtatttctgattgtcaggccaacataatgcagatggaagaagcaaaggaagaaggtgagacattggatgttactgcagtcattaatgcctgcacccttacagaagcccgatacctgctagatcacttcctgtcaatgggcatcaataagggtcttcaggctgcccagaaagaggctcaaattaaagtactggaaggtcgactcaaacaaacagaaataaccagtgctacccaaaaccagctcttattccatatgttgaaagagaaggcagaattaaatcctgagctagatgctttactaggccatgctttacaagattttaaacatttttttgtagaaaatgtagaggatagtactgatgaggatgctcctttaaacagcccaggatcagaaggaagcacgctgtcttcagatctcatgaagctttgtggtgaagtgaaacctaagaacaaggcccgaaggagaaccaccactcagatggaattgctgtatgcagatagcagtgaactagcttcagacactagtacaggagatgcctccttgcctggccctctcacacctgttgcagaagggcaagagattggaatgaatacagagacaagtggtacttctgctagggaaaaagagctctctcccccacctggcttaccttctaagataggcagcatttccaggcagtcatctctatcagaaaaaaaaattccagagccttctcctgtaacaaggagaaaggcatatgagaaagcagaaaaatcaaaggccaaggaacaaaagcagtctgatgaaagtgactcctctctctcggaggtacacaggggcataatcaacccatttcctgcttcaaaaggaatcagagcttttccacttcagtgtattcacatagctgaagggcatacaaaagctgtgctctgtgtggattctactgatgatctcctcttcactggatcaaaagatcgtacttgtaaagtatggaatctggtgactgggcaggaaataatgtcactggggggtcatcccaacaatgtcgtgtctgtaaaatactgtaattataccagtttggtcttcactgtatcaacatcttatattaaggtgtgggatatcagagattcagcaaagtgcattcgaacactaacgtcttcaggtcaagttactcttggagatgcttgttctgcaagtaccagtcgaacagtagctattccttctggagagaaccagatcaatcaaattgccctaaacccaactggcaccttcctctatgctgcttctggaaatgctgtcaggatgtgggatcttaaaaggtttcagtctacaggaaagttaacaggacacctaggccctgttatgtgccttactgtggatcagatttccagtggacaagatctaatcatcactggctccaaggatcattacatcaaaatgtttgatgttacagaaggagctcttgggactgtgagtcccacccacaattttgaaccccctcattatgatggcatagaagcactaaccattcaaggggataacctatttagtgggtctagagataatggaatcaagaaatgggacttaactcaaaaagaccttcttcagcaagttccaaatgcacataaggattgggtctgtgccctgggagtggtgccagaccacccagttttgctcagtggctgcagagggggcattttgaaagtctggaacatggatacttttatgccagtgggagagatgaagggtcatgatagtcctatcaatgccatatgtgttaattccacccacatttttactgcagctgatgatcgaactgtgagaatttggaaggctcgcaatttgcaagatggtcagatctctgacacaggagatctgggggaagatattgccagtaattaaacatgaatgaagataggttgtaaactgaatgctgtgataatactctgtattctttatggaaaatgttgtcctgtacttactaggcaaaacgtatgaatcggattaactggaaaatatatctgaattcaactgctgactataaatggtattctaataaaattgtgtactatcctgtgtgcttagttttaagatcaaccaatagatatatatcctacaattgatatattgctttattcacacttttattgtggctgaatttttgtgcctatctataaaacacactttcaaattatttgaattaccaagacgtctgcttttgtgacagtcagaaaacacacctggaatacgatgcagcccaccattaactcattcatgtagtttattcaagtgatttatgtatttaaactaaatattgaaaatgttagtcaaattgtggtttgcttgtcaggtatttatatcagtctgtagtggattcccaaatttcaaagctcttttaatgtaatggacaaaaataagatatgagaatattattgatgaattttcataaggtggaattgatcttaatctactaacagagaagggtagacagtttgtgttaaatgttggcatttacttgtattgaccaaagttttgcagctctactatattctgtgctcaggactaaaatgctgttaatttttttttttttttccagtgctgtgcatatattctgtgatgggaaacattgttgatgtcctaacagaaatatattttgatctattttcctatggagttgtttctattatgaccatttaattttgtttttatttaatagtagtatttccttcccttttatctaattttttatatgctgctaaatatattttaaatatactatgtttgcgaaccttggtagctatgatgagagctattatcatctgtggtgggaaaagctatgtaaataggtagattgtatagagagactatcttgtgttgtgcctgtatgaatttttaaaagttgttgactggattttgcaaaaggatgtataatatttctgtctgctcagaatattaatttgtaaattctgcaagtttaatttttatgtagatggtataacatttgaaaatattgtcttatgtgattttttcccctgaaaatatttgcttgtaaatgaaaacttagctagggcttaaataaacatgttgctatgaaatt

SEQ ID NO: 15388 - DNA, 5044 bp, Homo sapiens
  source 1..5044: mol_type = unassigned DNA
gctgcccgccgccagcatgttgggcgccccggacgagagctccgtgcgggtggctgtcagaataagaccacagcttgccaaagagaagattgaaggatgccatatttgtacatctgtcacaccaggagagcctcaggtcttcctagggaaagataaggcttttacttttgactatgtatttgacattgactcccagcaagagcagatctacattcaatgtatagaaaaactaattgaaggttgctttgaaggatacaatgctacagtttttgcttatggacaaactggagctggtaaaacatacacaatgggaacaggatttgatgttaacattgttgaggaagaactgggtattatttctcgagctgttaaacacctttttaagagtattgaagaaaaaaaacacatagcaattaaaaatgggcttcctgctccagattttaaagtgaatgcccaattcttagagctctataatgaagaggtccttgacttatttgataccactcgtgatattgatgcaaaaagtaaaaaatcaaatataagaattcatgaagattcaactggaggaatttatactgtgggcgttacaacacgtactgtgaatacagaatcagagatgatgcagtgtttgaagttgggtgctttatcccggacaactgccagtacccagatgaatgttcagagctctcgttcacatgccatttttaccattcatgtgtgtcaaaccagagtgtgtccccaaatagatgctgacaatgcaactgataataaaattatttctgaatcagcacagatgaatgaatttgaaaccctgactgcaaagttccattttgttgatctcgcaggatctgaaagactgaagcgtactggagctacaggcgagagggcaaaagaaggcatttctatcaactgtggacttttggcacttggcaatgtaataagtgccttgggagacaagagcaagagggccacacatgtcccctatagagattccaagctaacaagactactacaggattccctcgggggtaatagccaaacaatcatgatagcatgtgtcagcccttcagacagagactttatggaaacgttaaacaccctgaaatacgccaatcgagctagaaatatcaagaataaggtgatggtcaatcaggacagagctagtcagcaaatcaatgcacttcgtagtgaaatcacacgacttcagatggagctcatggagtacaaaacaggtaaaagaataattgacgaagagggtgtggaaagcatcaatgacatgtttcatgagaatgctatgctacagactgaaaataataacctgcgtgtaagaattaaagccatgcaagagacggttgatgcattgaggtccagaattacacagcttgttagtgatcaggccaaccatgttcttgccagagcaggtgaaggaaatgaggagattagtaatatgattcatagttatataaaagaaatcgaagatctcagggcaaaattattagaaagtgaagcagtgaatgagaaccttcgaaaaaacttgacaagagccacagcaagagcgccatatttcagcggatcatcaactttttctcctaccatactatcctcagacaaagaaaccattgaaattatagacctagcaaaaaaagatttagagaagttgaaaagaaaagaaaagaggaagaaaaaaaggctacagaaacttgaggaaagcaatcgagaagaaagaagtgtggctggtaaagaggataatacagacactgaccaagagaagaaagaagaaaagggtgtttcggaaagagaaaacaatgaattagaagtggaagaaagtcaagaagtgagtgatcatgaggatgaagaagaggaggaggaggaggaggaagatgacattgatgggggtgaaagttctgatgaatcagattctgaatcagatgaaaaagccaattatcaagcagacttggcaaacattacttgtgaaattgcaattaagcaaaagctgattgatgaactagaaaacagccagaaaagactgcagactctgaaaaagcagtatgaagagaagctaatgatgctgcaacataaaattcgggatactcagcttgaaagagaccaggtgcttcaaaacttaggctcggtagaatcttactcagaagaaaaagcaaaaaaagttaggtctgaatatgaaaagaaactccaagccatgaacaaagaactgcagagacttcaagcagctcaaaaagaacatgcaaggttgcttaaaaatcagtctcagtatgaaaagcaattgaagaaattgcagcaggatgtgatggaaatgaaaaaaacaaaggttcgcctaatgaaacaaatgaaagaagaacaagagaaagccagactgactgagtctagaagaaacagagagattgctcagttgaaaaaggatcaacgtaaaagagatcatcaacttagacttctggaagcccaaaaaagaaaccaagaagtggttctacgtcgcaaaactgaagaggttacggctcttcgtcggcaagtaagacccatgtcagataaagtggctgggaaagttactcggaagctgagttcatctgatgcacctgctcaggacacaggttccagtgcagctgctgtcgaaacagatgcatcaaggacaggagcccagcagaaaatgagaattcctgtggcgagagtccaggccttaccaacgccggcaacaaatggaaacaggaaaaaatatcagaggaaaggattgactggccgagtgtttatttccaagacagctcgcatgaagtggcagctccttgagcgcagggtcacagacatcatcatgcagaagatgaccatttccaacatggaggcagatatgaatagactcctcaagcaacgggaggaactcacaaaaagacgagagaaactttcaaaaagaagggagaagatagtcaaggagaatggagagggagataaaaatgtggctaatatcaatgaagagatggagtcactgactgctaatatcgattacatcaatgacagtatttctgattgtcaggccaacataatgcagatggaagaagcaaaggaagaaggtgagacattggatgttactgcagtcattaatgcctgcacccttacagaagcccgatacctgctagatcacttcctgtcaatgggcatcaataagggtcttcaggctgcccagaaagaggctcaaattaaagtactggaaggtcgactcaaacaaacagaaataaccagtgctacccaaaaccagctcttattccatatgttgaaagagaaggcagaattaaatcctgagctagatgctttactaggccatgctttacaagatctagatagcgtaccattagaaaatgtagaggatagtactgatgaggatgctcctttaaacagcccaggatcagaaggaagcacgctgtcttcagatctcatgaagctttgtggtgaagtgaaacctaagaacaaggcccgaaggagaaccaccactcagatggaattgctgtatgcagatagcagtgaactagcttcagacactagtacaggagatgcctccttgcctggccctctcacacctgttgcagaagggcaagagattggaatgaatacagagacaagtggtacttctgctagggaaaaagagctctctcccccacctggcttaccttctaagataggcagcatttccaggcagtcatctctatcagaaaaaaaaattccagagccttctcctgtaacaaggagaaaggcatatgagaaagcagaaaaatcaaaggccaaggaacaaaagcactcagattctggaacttcagaggctagtctttcacctccttcttccccaccaagccggccccgtaatgaactgaatgtttttaatcgtcttactgtttctcagggaaacacatcagttcagcaggataagtctgatgaaagtgactcctctctctcggaggtacacagatcctccagaaggggcataatcaacccatttcctgcttcaaaaggaatcagagcttttccacttcagtgtattcacatagctgaagggcatacaaaagctgtgctctgtgtggattctactgatgatctcctcttcactggatcaaaagatcgtacttgtaaagtatggaatctggtgactgggcaggaaataatgtcactggggggtcatcccaacaatgtcgtgtctgtaaaatactgtaattataccagtttggtcttcactgtatcaacatcttatattaaggtgtgggatatcagagattcagcaaagtgcattcgaacactaacgtcttcaggtcaagttactcttggagatgcttgttctgcaagtaccagtcgaacagtagctattccttctggagagaaccagatcaatcaaattgccctaaacccaactggcaccttcctctatgctgcttctggaaatgctgtcaggatgtgggatcttaaaaggtttcagtctacaggaaagttaacaggacacctaggccctgttatgtgccttactgtggatcagatttccagtggacaagatctaatcatcactggctccaaggatcattacatcaaaatgtttgatgttacagaaggagctcttgggactgtgagtcccacccacaattttgaaccccctcattatgatggcatagaagcactaaccattcaaggggataacctatttagtgggtctagagataatggaatcaagaaatgggacttaactcaaaaagaccttcttcagcaagttccaaatgcacataaggattgggtctgtgccctgggagtggtgccagaccacccagttttgctcagtggctgcagagggggcattttgaaagtctggaacatggatacttttatgccagtgggagagatgaagggtcatgatagtcctatcaatgccatatgtgttaattccacccacatttttactgcagctgatgatcgaactgtgagaatttggaaggctcgcaatttgcaagatggtcagatctctgacacaggagatctgggggaagatattgccagtaattaaaca

SEQ ID NO: 15389 - DNA, 6601 bp, Homo sapiens
  source 1..6601: mol_type = unassigned DNA
gaggagcccggagcgccctggcgggcgtggagtccccagcctggccgctgggaggccgcgtccccaccggagggggcagggcgcactcacccggccgccctgaggccgctggcggcctgttggcttctccacaggcgcgctcgccgttcaagcgcgctttgtccccgccccagatcctggggggtgagcggtggagaaggggcgggcgcccgcgagccgtgaatcacctcctcctcttgctgcctcagcgccgccgccacctttccattcagtcgcccaacatggctggagcgcggcggaggtgagccggccgcccgcccgcagacgccccagcctactgcgcccgagtcccgcggccccagtggcgcctcagctctgcggtgccgaggcccaacggctcgatcgctgcccgccgccagcatgttgggcgccccggacgagagctccgtgcgggtggctgtcagaataagaccacagcttgccaaagagaagattgaaggatgccatatttgtacatctgtcacaccaggagagcctcaggtcttcctagggaaagataaggcttttacttttgactatgtatttgacattgactcccagcaagagcagatctacattcaatgtatagaaaaactaattgaaggttgctttgaaggatacaatgctacagtttttgcttatggacaaactggagctggtaaaacatacacaatgggaacaggatttgatgttaacattgttgaggaagaactgggtattatttctcgagctgttaaacacctttttaagagtattgaagaaaaaaaacacatagcaattaaaaatgggcttcctgctccagattttaaagtgaatgcccaattcttagagctctataatgaagaggtccttgacttatttgataccactcgtgatattgatgcaaaaagtaaaaaatcaaatataagaattcatgaagattcaactggaggaatttatactgtgggcgttacaacacgtactgtgaatacagaatcagagatgatgcagtgtttgaagttgggtgctttatcccggacaactgccagtacccagatgaatgttcagagctctcgttcacatgccatttttaccattcatgtgtgtcaaaccagagtgtgtccccaaatagatgctgacaatgcaactgataataaaattatttctgaatcagcacagatgaatgaatttgaaaccctgactgcaaagttccattttgttgatctcgcaggatctgaaagactgaagcgtactggagctacaggcgagagggcaaaagaaggcatttctatcaactgtggacttttggcacttggcaatgtaataagtgccttgggagacaagagcaagagggccacacatgtcccctatagagattccaagctaacaagactactacaggattccctcgggggtaatagccaaacaatcatgatagcatgtgtcagcccttcagacagagactttatggaaacgttaaacaccctgaaatacgccaatcgagctagaaatatcaagaataaggtgatggtcaatcaggacagagctagtcagcaaatcaatgcacttcgtagtgaaatcacacgacttcagatggagctcatggagtacaaaacaggtaaaagaataattgacgaagagggtgtggaaagcatcaatgacatgtttcatgagaatgctatgctacagactgaaaataataacctgcgtgtaagaattaaagccatgcaagagacggttgatgcattgaggtccagaattacacagcttgttagtgatcaggccaaccatgttcttgccagagcaggtgaaggaaatgaggagattagtaatatgattcatagttatataaaagaaatcgaagatctcagggcaaaattattagaaagtgaagcagtgaatgagaaccttcgaaaaaacttgacaagagccacagcaagagcgccatatttcagcggatcatcaactttttctcctaccatactatcctcagacaaagaaaccattgaaattatagacctagcaaaaaaagatttagagaagttgaaaagaaaagaaaagaggaagaaaaaaagtgtggctggtaaagaggataatacagacactgaccaagagaagaaagaagaaaagggtgtttcggaaagagaaaacaatgaattagaagtggaagaaagtcaagaagtgagtgatcatgaggatgaagaagaggaggaggaggaggaggaagatgacattgatgggggtgaaagttctgatgaatcagattctgaatcagatgaaaaagccaattatcaagcagacttggcaaacattacttgtgaaattgcaattaagcaaaagctgattgatgaactagaaaacagccagaaaagactgcagactctgaaaaagcagtatgaagagaagctaatgatgctgcaacataaaattcgggatactcagcttgaaagagaccaggtgcttcaaaacttaggctcggtagaatcttactcagaagaaaaagcaaaaaaagttaggtctgaatatgaaaagaaactccaagccatgaacaaagaactgcagagacttcaagcagctcaaaaagaacatgcaaggttgcttaaaaatcagtctcagtatgaaaagcaattgaagaaattgcagcaggatgtgatggaaatgaaaaaaacaaaggttcgcctaatgaaacaaatgaaagaagaacaagagaaagccagactgactgagtctagaagaaacagagagattgctcagttgaaaaaggatcaacgtaaaagagatcatcaacttagacttctggaagcccaaaaaagaaaccaagaagtggttctacgtcgcaaaactgaagaggttacggctcttcgtcggcaagtaagacccatgtcagataaagtggctgggaaagttactcggaagctgagttcatctgatgcacctgctcaggacacaggttccagtgcagctgctgtcgaaacagatgcatcaaggacaggagcccagcagaaaatgagaattcctgtggcgagagtccaggccttaccaacgccggcaacaaatggaaacaggaaaaaatatcagaggaaaggattgactggccgagtgtttatttccaagacagctcgcatgaagtggcagctccttgagcgcagggtcacagacatcatcatgcagaagatgaccatttccaacatggaggcagatatgaatagactcctcaagcaacgggaggaactcacaaaaagacgagagaaactttcaaaaagaagggagaagatagtcaaggagaatggagagggagataaaaatgtggctaatatcaatgaagagatggagtcactgactgctaatatcgattacatcaatgacagtatttctgattgtcaggccaacataatgcagatggaagaagcaaaggaagaaggtgagacattggatgttactgcagtcattaatgcctgcacccttacagaagcccgatacctgctagatcacttcctgtcaatgggcatcaataagggtcttcaggctgcccagaaagaggctcaaattaaagtactggaaggtcgactcaaacaaacagaaataaccagtgctacccaaaaccagctcttattccatatgttgaaagagaaggcagaattaaatcctgagctagatgctttactaggccatgctttacaagatctagatagcgtaccattagaaaatgtagaggatagtactgatgaggatgctcctttaaacagcccaggatcagaaggaagcacgctgtcttcagatctcatgaagctttgtggtgaagtgaaacctaagaacaaggcccgaaggagaaccaccactcagatggaattgctgtatgcagatagcagtgaactagcttcagacactagtacaggagatgcctccttgcctggccctctcacacctgttgcagaagggcaagagattggaatgaatacagagacaagtggtacttctgctagggaaaaagagctctctcccccacctggcttaccttctaagataggcagcatttccaggcagtcatctctatcagaaaaaaaaattccagagccttctcctgtaacaaggagaaaggcatatgagaaagcagaaaaatcaaaggccaaggaacaaaagcactcagattctggaacttcagaggctagtctttcacctccttcttccccaccaagccggccccgtaatgaactgaatgtttttaatcgtcttactgtttctcagggaaacacatcagttcagcaggataagtctgatgaaagtgactcctctctctcggaggtacacagatcctccagaaggggcataatcaacccatttcctgcttcaaaaggaatcagagcttttccacttcagtgtattcacatagctgaagggcatacaaaagctgtgctctgtgtggattctactgatgatctcctcttcactggatcaaaagatcgtacttgtaaagtatggaatctggtgactgggcaggaaataatgtcactggggggtcatcccaacaatgtcgtgtctgtaaaatactgtaattataccagtttggtcttcactgtatcaacatcttatattaaggtgtgggatatcagagattcagcaaagtgcattcgaacactaacgtcttcaggtcaagttactcttggagatgcttgttctgcaagtaccagtcgaacagtagctattccttctggagagaaccagatcaatcaaattgccctaaacccaactggcaccttcctctatgctgcttctggaaatgctgtcaggatgtgggatcttaaaaggtttcagtctacaggaaagttaacaggacacctaggccctgttatgtgccttactgtggatcagatttccagtggacaagatctaatcatcactggctccaaggatcattacatcaaaatgtttgatgttacagaaggagctcttgggactgtgagtcccacccacaattttgaaccccctcattatgatggcatagaagcactaaccattcaaggggataacctatttagtgggtctagagataatggaatcaagaaatgggacttaactcaaaaagaccttcttcagcaagttccaaatgcacataaggattgggtctgtgccctgggagtggtgccagaccacccagttttgctcagtggctgcagagggggcattttgaaagtctggaacatggatacttttatgccagtgggagagatgaagggtcatgatagtcctatcaatgccatatgtgttaattccacccacatttttactgcagctgatgatcgaactgtgagaatttggaaggctcgcaatttgcaagatggtcagatctctgacacaggagatctgggggaagatattgccagtaattaaacatgaatgaagataggttgtaaactgaatgctgtgataatactctgtattctttatggaaaatgttgtcctgtacttactaggcaaaacgtatgaatcggattaactggaaaatatatctgaattcaactgctgactataaatggtattctaataaaattgtgtactatcctgtgtgcttagttttaagatcaaccaatagatatatatcctacaattgatatattgctttattcacacttttattgtggctgaatttttgtgcctatctataaaacacactttcaaattatttgaattaccaagacgtctgcttttgtgacagtcagaaaacacacctggaatacgatgcagcccaccattaactcattcatgtagtttattcaagtgatttatgtatttaaactaaatattgaaaatgttagtcaaattgtggtttgcttgtcaggtatttatatcagtctgtagtggattcccaaatttcaaagctcttttaatgtaatggacaaaaataagatatgagaatattattgatgaattttcataaggtggaattgatcttaatctactaacagagaagggtagacagtttgtgttaaatgttggcatttacttgtattgaccaaagttttgcagctctactatattctgtgctcaggactaaaatgctgttaatttttttttttttttccagtgctgtgcatatattctgtgatgggaaacattgttgatgtcctaacagaaatatattttgatctattttcctatggagttgtttctattatgaccatttaattttgtttttatttaatagtagtatttccttcccttttatctaattttttatatgctgctaaatatattttaaatatactatgtttgcgaaccttggtagctatgatgagagctattatcatctgtggtgggaaaagctatgtaaataggtagattgtatagagagactatcttgtgttgtgcctgtatgaatttttaaaagttgttgactggattttgcaaaaggatgtataatatttctgtctgctcagaatattaatttgtaaattctgcaagtttaatttttatgtagatggtataacatttgaaaatattgtcttatgtgattttttcccctgaaaatatttgcttgtaaatgaaaacttagctagggcttaaataaacatgttgctatgaaatt

SEQ ID NO: 15390 - DNA, 6643 bp, Homo sapiens
  source 1..6643: mol_type = unassigned DNA
gaggagcccggagcgccctggcgggcgtggagtccccagcctggccgctgggaggccgcgtccccaccggagggggcagggcgcactcacccggccgccctgaggccgctggcggcctgttggcttctccacaggcgcgctcgccgttcaagcgcgctttgtccccgccccagatcctggggggtgagcggtggagaaggggcgggcgcccgcgagccgtgaatcacctcctcctcttgctgcctcagcgccgccgccacctttccattcagtcgcccaacatggctggagcgcggcggaggtgagccggccgcccgcccgcagacgccccagcctactgcgcccgagtcccgcggccccagtggcgcctcagctctgcggtgccgaggcccaacggctcgatcgctgcccgccgccagcatgttgggcgccccggacgagagctccgtgcgggtggctgtcagaataagaccacagcttgccaaagagaagattgaaggatgccatatttgtacatctgtcacaccaggagagcctcaggtcttcctagggaaagataaggcttttacttttgactatgtatttgacattgactcccagcaagagcagatctacattcaatgtatagaaaaactaattgaaggttgctttgaaggatacaatgctacagtttttgcttatggacaaactggagctggtaaaacatacacaatgggaacaggatttgatgttaacattgttgaggaagaactgggtattatttctcgagctgttaaacacctttttaagagtattgaagaaaaaaaacacatagcaattaaaaatgggcttcctgctccagattttaaagtgaatgcccaattcttagagctctataatgaagaggtccttgacttatttgataccactcgtgatattgatgcaaaaagtaaaaaatcaaatataagaattcatgaagattcaactggaggaatttatactgtgggcgttacaacacgtactgtgaatacagaatcagagatgatgcagtgtttgaagttgggtgctttatcccggacaactgccagtacccagatgaatgttcagagctctcgttcacatgccatttttaccattcatgtgtgtcaaaccagagtgtgtccccaaatagatgctgacaatgcaactgataataaaattatttctgaatcagcacagatgaatgaatttgaaaccctgactgcaaagttccattttgttgatctcgcaggatctgaaagactgaagcgtactggagctacaggcgagagggcaaaagaaggcatttctatcaactgtggacttttggcacttggcaatgtaataagtgccttgggagacaagagcaagagggccacacatgtcccctatagagattccaagctaacaagactactacaggattccctcgggggtaatagccaaacaatcatgatagcatgtgtcagcccttcagacagagactttatggaaacgttaaacaccctgaaatacgccaatcgagctagaaatatcaagaataaggtgatggtcaatcaggacagagctagtcagcaaatcaatgcacttcgtagtgaaatcacacgacttcagatggagctcatggagtacaaaacaggtaaaagaataattgacgaagagggtgtggaaagcatcaatgacatgtttcatgagaatgctatgctacagactgaaaataataacctgcgtgtaagaattaaagccatgcaagagacggttgatgcattgaggtccagaattacacagcttgttagtgatcaggccaaccatgttcttgccagagcaggtgaaggaaatgaggagattagtaatatgattcatagttatataaaagaaatcgaagatctcagggcaaaattattagaaagtgaagcagtgaatgagaaccttcgaaaaaacttgacaagagccacagcaagagcgccatatttcagcggatcatcaactttttctcctaccatactatcctcagacaaagaaaccattgaaattatagacctagcaaaaaaagatttagagaagttgaaaagaaaagaaaagaggaagaaaaaaaggctacagaaacttgaggaaagcaatcgagaagaaagaagtgtggctggtaaagaggataatacagacactgaccaagagaagaaagaagaaaagggtgtttcggaaagagaaaacaatgaattagaagtggaagaaagtcaagaagtgagtgatcatgaggatgaagaagaggaggaggaggaggaggaagatgacattgatgggggtgaaagttctgatgaatcagattctgaatcagatgaaaaagccaattatcaagcagacttggcaaacattacttgtgaaattgcaattaagcaaaagctgattgatgaactagaaaacagccagaaaagactgcagactctgaaaaagcagtatgaagagaagctaatgatgctgcaacataaaattcgggatactcagcttgaaagagaccaggtgcttcaaaacttaggctcggtagaatcttactcagaagaaaaagcaaaaaaagttaggtctgaatatgaaaagaaactccaagccatgaacaaagaactgcagagacttcaagcagctcaaaaagaacatgcaaggttgcttaaaaatcagtctcagtatgaaaagcaattgaagaaattgcagcaggatgtgatggaaatgaaaaaaacaaaggttcgcctaatgaaacaaatgaaagaagaacaagagaaagccagactgactgagtctagaagaaacagagagattgctcagttgaaaaaggatcaacgtaaaagagatcatcaacttagacttctggaagcccaaaaaagaaaccaagaagtggttctacgtcgcaaaactgaagaggttacggctcttcgtcggcaagtaagacccatgtcagataaagtggctgggaaagttactcggaagctgagttcatctgatgcacctgctcaggacacaggttccagtgcagctgctgtcgaaacagatgcatcaaggacaggagcccagcagaaaatgagaattcctgtggcgagagtccaggccttaccaacgccggcaacaaatggaaacaggaaaaaatatcagaggaaaggattgactggccgagtgtttatttccaagacagctcgcatgaagtggcagctccttgagcgcagggtcacagacatcatcatgcagaagatgaccatttccaacatggaggcagatatgaatagactcctcaagcaacgggaggaactcacaaaaagacgagagaaactttcaaaaagaagggagaagatagtcaaggagaatggagagggagataaaaatgtggctaatatcaatgaagagatggagtcactgactgctaatatcgattacatcaatgacagtatttctgattgtcaggccaacataatgcagatggaagaagcaaaggaagaaggtgagacattggatgttactgcagtcattaatgcctgcacccttacagaagcccgatacctgctagatcacttcctgtcaatgggcatcaataagggtcttcaggctgcccagaaagaggctcaaattaaagtactggaaggtcgactcaaacaaacagaaataaccagtgctacccaaaaccagctcttattccatatgttgaaagagaaggcagaattaaatcctgagctagatgctttactaggccatgctttacaagattttaaacatttttttgtagaaaatgtagaggatagtactgatgaggatgctcctttaaacagcccaggatcagaaggaagcacgctgtcttcagatctcatgaagctttgtggtgaagtgaaacctaagaacaaggcccgaaggagaaccaccactcagatggaattgctgtatgcagatagcagtgaactagcttcagacactagtacaggagatgcctccttgcctggccctctcacacctgttgcagaagggcaagagattggaatgaatacagagacaagtggtacttctgctagggaaaaagagctctctcccccacctggcttaccttctaagataggcagcatttccaggcagtcatctctatcagaaaaaaaaattccagagccttctcctgtaacaaggagaaaggcatatgagaaagcagaaaaatcaaaggccaaggaacaaaagcactcagattctggaacttcagaggctagtctttcacctccttcttccccaccaagccggccccgtaatgaactgaatgtttttaatcgtcttactgtttctcagggaaacacatcagttcagcaggataagtctgatgaaagtgactcctctctctcggaggtacacagaaattctaaccttaggggcataatcaacccatttcctgcttcaaaaggaatcagagcttttccacttcagtgtattcacatagctgaagggcatacaaaagctgtgctctgtgtggattctactgatgatctcctcttcactggatcaaaagatcgtacttgtaaagtatggaatctggtgactgggcaggaaataatgtcactggggggtcatcccaacaatgtcgtgtctgtaaaatactgtaattataccagtttggtcttcactgtatcaacatcttatattaaggtgtgggatatcagagattcagcaaagtgcattcgaacactaacgtcttcaggtcaagttactcttggagatgcttgttctgcaagtaccagtcgaacagtagctattccttctggagagaaccagatcaatcaaattgccctaaacccaactggcaccttcctctatgctgcttctggaaatgctgtcaggatgtgggatcttaaaaggtttcagtctacaggaaagttaacaggacacctaggccctgttatgtgccttactgtggatcagatttccagtggacaagatctaatcatcactggctccaaggatcattacatcaaaatgtttgatgttacagaaggagctcttgggactgtgagtcccacccacaattttgaaccccctcattatgatggcatagaagcactaaccattcaaggggataacctatttagtgggtctagagataatggaatcaagaaatgggacttaactcaaaaagaccttcttcagcaagttccaaatgcacataaggattgggtctgtgccctgggagtggtgccagaccacccagttttgctcagtggctgcagagggggcattttgaaagtctggaacatggatacttttatgccagtgggagagatgaagggtcatgatagtcctatcaatgccatatgtgttaattccacccacatttttactgcagctgatgatcgaactgtgagaatttggaaggctcgcaatttgcaagatggtcagatctctgacacaggagatctgggggaagatattgccagtaattaaacatgaatgaagataggttgtaaactgaatgctgtgataatactctgtattctttatggaaaatgttgtcctgtacttactaggcaaaacgtatgaatcggattaactggaaaatatatctgaattcaactgctgactataaatggtattctaataaaattgtgtactatcctgtgtgcttagttttaagatcaaccaatagatatatatcctacaattgatatattgctttattcacacttttattgtggctgaatttttgtgcctatctataaaacacactttcaaattatttgaattaccaagacgtctgcttttgtgacagtcagaaaacacacctggaatacgatgcagcccaccattaactcattcatgtagtttattcaagtgatttatgtatttaaactaaatattgaaaatgttagtcaaattgtggtttgcttgtcaggtatttatatcagtctgtagtggattcccaaatttcaaagctcttttaatgtaatggacaaaaataagatatgagaatattattgatgaattttcataaggtggaattgatcttaatctactaacagagaagggtagacagtttgtgttaaatgttggcatttacttgtattgaccaaagttttgcagctctactatattctgtgctcaggactaaaatgctgttaatttttttttttttttccagtgctgtgcatatattctgtgatgggaaacattgttgatgtcctaacagaaatatattttgatctattttcctatggagttgtttctattatgaccatttaattttgtttttatttaatagtagtatttccttcccttttatctaattttttatatgctgctaaatatattttaaatatactatgtttgcgaaccttggtagctatgatgagagctattatcatctgtggtgggaaaagctatgtaaataggtagattgtatagagagactatcttgtgttgtgcctgtatgaatttttaaaagttgttgactggattttgcaaaaggatgtataatatttctgtctgctcagaatattaatttgtaaattctgcaagtttaatttttatgtagatggtataacatttgaaaatattgtcttatgtgattttttcccctgaaaatatttgcttgtaaatgaaaacttagctagggcttaaataaacatgttgctatgaaatt

SEQ ID NO: 15391 - DNA, 4866 bp, Homo sapiens
  source 1..4866: mol_type = unassigned DNA
atgttgggcgccccggacgagagctccgtgcgggtggctgtcagaataagaccacagcttgccaaagagaagattgaaggatgccatatttgtacatctgtcacaccaggagagcctcaggtcttcctagggaaagataaggcttttacttttgactatgtatttgacattgactcccagcaagagcagatctacattcaatgtatagaaaaactaattgaaggttgctttgaaggatacaatgctacagtttttgcttatggacaaactggagctggtaaaacatacacaatgggaacaggatttgatgttaacattgttgaggaagaactgggtattatttctcgagctgttaaacacctttttaagagtattgaagaaaaaaaacacatagcaattaaaaatgggcttcctgctccagattttaaagtgaatgcccaattcttagagctctataatgaagaggtccttgacttatttgataccactcgtgatattgatgcaaaaagtaaaaaatcaaatataagaattcatgaagattcaactggaggaatttatactgtgggcgttacaacacgtactgtgaatacagaatcagagatgatgcagtgtttgaagttgggtgctttatcccggacaactgccagtacccagatgaatgttcagagctctcgttcacatgccatttttaccattcatgtgtgtcaaaccagagtgtgtccccaaatagatgctgacaatgcaactgataataaaattatttctgaatcagcacagatgaatgaatttgaaaccctgactgcaaagttccattttgttgatctcgcaggatctgaaagactgaagcgtactggagctacaggcgagagggcaaaagaaggcatttctatcaactgtggacttttggcacttggcaatgtaataagtgccttgggagacaagagcaagagggccacacatgtcccctatagagattccaagctaacaagactactacaggattccctcgggggtaatagccaaacaatcatgatagcatgtgtcagcccttcagacagagactttatggaaacgttaaacaccctgaaatacgccaatcgagctagaaatatcaagaataaggtgatggtcaatcaggacagagctagtcagcaaatcaatgcacttcgtagtgaaatcacacgacttcagatggagctcatggagtacaaaacaggtaaaagaataattgacgaagagggtgtggaaagcatcaatgacatgtttcatgagaatgctatgctacagactgaaaataataacctgcgtgtaagaattaaagccatgcaagagacggttgatgcattgaggtccagaattacacagcttgttagtgatcaggccaaccatgttcttgccagagcaggtgaaggaaatgaggagattagtaatatgattcatagttatataaaagaaatcgaagatctcagggcaaaattattagaaagtgaagcagtgaatgagaaccttcgaaaaaacttgacaagagccacagcaagagcgccatatttcagcggatcatcaactttttctcctaccatactatcctcagacaaagaaaccattgaaattatagacctagcaaaaaaagatttagagaagttgaaaagaaaagaaaagaggaagaaaaaaagtgtggctggtaaagaggataatacagacactgaccaagagaagaaagaagaaaagggtgtttcggaaagagaaaacaatgaattagaagtggaagaaagtcaagaagtgagtgatcatgaggatgaagaagaggaggaggaggaggaggaagatgacattgatgggggtgaaagttctgatgaatcagattctgaatcagatgaaaaagccaattatcaagcagacttggcaaacattacttgtgaaattgcaattaagcaaaagctgattgatgaactagaaaacagccagaaaagactgcagactctgaaaaagcagtatgaagagaagctaatgatgctgcaacataaaattcgggatactcagcttgaaagagaccaggtgcttcaaaacttaggctcggtagaatcttactcagaagaaaaagcaaaaaaagttaggtctgaatatgaaaagaaactccaagccatgaacaaagaactgcagagacttcaagcagctcaaaaagaacatgcaaggttgcttaaaaatcagtctcagtatgaaaagcaattgaagaaattgcagcaggatgtgatggaaatgaaaaaaacaaaggttcgcctaatgaaacaaatgaaagaagaacaagagaaagccagactgactgagtctagaagaaacagagagattgctcagttgaaaaaggatcaacgtaaaagagatgttacggctcttcgtcggcaagtaagacccatgtcagataaagtggctgggaaagttactcggaagctgagttcatctgatgcacctgctcaggacacaggttccagtgcagctgctgtcgaaacagatgcatcaaggacaggagcccagcagaaaatgagaattcctgtggcgagagtccaggccttaccaacgccggcaacaaatggaaacaggaaaaaatatcagaggaaaggattgactggccgagtgtttatttccaagacagctcgcatgaagtggcagctccttgagcgcagggtcacagacatcatcatgcagaagatgaccatttccaacatggaggcagatatgaatagactcctcaagcaacgggaggaactcacaaaaagacgagagaaactttcaaaaagaagggagaagatagtcaaggagaatggagagggagataaaaatgtggctaatatcaatgaagagatggagtcactgactgctaatatcgattacatcaatgacagtatttctgattgtcaggccaacataatgcagatggaagaagcaaaggaagaaggtgagacattggatgttactgcagtcattaatgcctgcacccttacagaagcccgatacctgctagatcacttcctgtcaatgggcatcaataagggtcttcaggctgcccagaaagaggctcaaattaaagtactggaaggtcgactcaaacaaacagaaataaccagtgctacccaaaaccagctcttattccatatgttgaaagagaaggcagaattaaatcctgagctagatgctttactaggccatgctttacaagatctagatagcgtaccattagaaaatgtagaggatagtactgatgaggatgctcctttaaacagcccaggatcagaaggaagcacgctgtcttcagatctcatgaagctttgtggtgaagtgaaacctaagaacaaggcccgaaggagaaccaccactcagatggaattgctgtatgcagatagcagtgaactagcttcagacactagtacaggagatgcctccttgcctggccctctcacacctgttgcagaagggcaagagattggaatgaatacagagacaagtggtacttctgctagggaaaaagagctctctcccccacctggcttaccttctaagataggcagcatttccaggcagtcatctctatcagaaaaaaaaattccagagccttctcctgtaacaaggagaaaggcatatgagaaagcagaaaaatcaaaggccaaggaacaaaagcactcagattctggaacttcagaggctagtctttcacctccttcttccccaccaagccggccccgtaatgaactgaatgtttttaatcgtcttactgtttctcagggaaacacatcagttcagcaggataagggcataatcaacccatttcctgcttcaaaaggaatcagagcttttccacttcagtgtattcacatagctgaagggcatacaaaagctgtgctctgtgtggattctactgatgatctcctcttcactggatcaaaagatcgtacttgtaaagtatggaatctggtgactgggcaggaaataatgtcactggggggtcatcccaacaatgtcgtgtctgtaaaatactgtaattataccagtttggtcttcactgtatcaacatcttatattaaggtgtgggatatcagagattcagcaaagtgcattcgaacactaacgtcttcaggtcaagttactcttggagatgcttgttctgcaagtaccagtcgaacagtagctattccttctggagagaaccagatcaatcaaattgccctaaacccaactggcaccttcctctatgctgcttctggaaatgctgtcaggatgtgggatcttaaaaggtttcagtctacaggaaagttaacaggacacctaggccctgttatgtgccttactgtggatcagatttccagtggacaagatctaatcatcactggctccaaggatcattacatcaaaatgtttgatgttacagaaggagctcttgggactgtgagtcccacccacaattttgaaccccctcattatgatggcatagaagcactaaccattcaaggggataacctatttagtgggtctagagataatggaatcaagaaatgggacttaactcaaaaagaccttcttcagcaagttccaaatgcacataaggattgggtctgtgccctgggagtggtgccagaccacccagttttgctcagtggctgcagagggggcattttgaaagtctggaacatggatacttttatgccagtgggagagatgaagggtcatgatagtcctatcaatgccatatgtgttaattccacccacatttttactgcagctgatgatcgaactgtgagaatttggaaggctcgcaatttgcaagatggtcagatctctgacacaggagatctgggggaagatattgccagtaattaa

SEQ ID NO: 15392 - DNA, 5040 bp, Homo sapiens
  source 1..5040: mol_type = unassigned DNA
agcctactgcgcccgagtcccgcggccccagtggcgcctcagctctgcggtgccgaggcccaacggctcgatcgctgcccgccgccagcatgttgggcgccccggacgagagctccgtgcgggtggctgtcagaataagaccacagcttgccaaagagaagattgaaggatgccatatttgtacatctgtcacaccaggagagcctcaggtcttcctagggaaagataaggcttttacttttgactatgtatttgacattgactcccagcaagagcagatctacattcaatgtatagaaaaactaattgaaggttgctttgaaggatacaatgctacagtttttgcttatggacaaactggagctggtaaaacatacacaatgggaacaggatttgatgttaacattgttgaggaagaactgggtattatttctcgagctgttaaacacctttttaagagtattgaagaaaaaaaacacatagcaattaaaaatgggcttcctgctccagattttaaagtgaatgcccaattcttagagctctataatgaagaggtccttgacttatttgataccactcgtgatattgatgcaaaaagtaaaaaatcaaatataagaattcatgaagattcaactggaggaatttatactgtgggcgttacaacacgtactgtgaatacagaatcagagatgatgcagtgtttgaagttgggtgctttatcccggacaactgccagtacccagatgaatgttcagagctctcgttcacatgccatttttaccattcatgtgtgtcaaaccagagtgtgtccccaaatagatgctgacaatgcaactgataataaaattatttctgaatcagcacagatgaatgaatttgaaaccctgactgcaaagttccattttgttgatctcgcaggatctgaaagactgaagcgtactggagctacaggcgagagggcaaaagaaggcatttctatcaactgtggacttttggcacttggcaatgtaataagtgccttgggagacaagagcaagagggccacacatgtcccctatagagattccaagctaacaagactactacaggattccctcgggggtaatagccaaacaatcatgatagcatgtgtcagcccttcagacagagactttatggaaacgttaaacaccctgaaatacgccaatcgagctagaaatatcaagaataaggtgatggtcaatcaggacagagctagtcagcaaatcaatgcacttcgtagtgaaatcacacgacttcagatggagctcatggagtacaaaacaggtaaaagaataattgacgaagagggtgtggaaagcatcaatgacatgtttcatgagaatgctatgctacagactgaaaataataacctgcgtgtaagaattaaagccatgcaagagacggttgatgcattgaggtccagaattacacagcttgttagtgatcaggccaaccatgttcttgccagagcaggtgaaggaaatgaggagattagtaatatgattcatagttatataaaagaaatcgaagatctcagggcaaaattattagaaagtgaagcagtgaatgagaaccttcgaaaaaacttgacaagagccacagcaagagcgccatatttcagcggatcatcaactttttctcctaccatactatcctcagacaaagaaaccattgaaattatagacctagcaaaaaaagatttagagaagttgaaaagaaaagaaaagaggaagaaaaaaagtgtggctggtaaagaggataatacagacactgaccaagagaagaaagaagaaaagggtgtttcggaaagagaaaacaatgaattagaagtggaagaaagtcaagaagtgagtgatcatgaggatgaagaagaggaggaggaggaggaggaagatgacattgatgggggtgaaagttctgatgaatcagattctgaatcagatgaaaaagccaattatcaagcagacttggcaaacattacttgtgaaattgcaattaagcaaaagctgattgatgaactagaaaacagccagaaaagactgcagactctgaaaaagcagtatgaagagaagctaatgatgctgcaacataaaattcgggatactcagcttgaaagagaccaggtgcttcaaaacttaggctcggtagaatcttactcagaagaaaaagcaaaaaaagttaggtctgaatatgaaaagaaactccaagccatgaacaaagaactgcagagacttcaagcagctcaaaaagaacatgcaaggttgcttaaaaatcagtctcagtatgaaaagcaattgaagaaattgcagcaggatgtgatggaaatgaaaaaaacaaaggttcgcctaatgaaacaaatgaaagaagaacaagagaaagccagactgactgagtctagaagaaacagagagattgctcagttgaaaaaggatcaacgtaaaagagatcatcaacttagacttctggaagcccaaaaaagaaaccaagaagtggttctacgtcgcaaaactgaagaggttacggctcttcgtcggcaagtaagacccatgtcagataaagtggctgggaaagttactcggaagctgagttcatctgatgcacctgctcaggacacaggttccagtgcagctgctgtcgaaacagatgcatcaaggacaggagcccagcagaaaatgagaattcctgtggcgagagtccaggccttaccaacgccggcaacaaatggaaacaggaaaaaatatcagaggaaaggattgactggccgagtgtttatttccaagacagctcgcatgaagtggcagctccttgagcgcagggtcacagacatcatcatgcagaagatgaccatttccaacatggaggcagatatgaatagactcctcaagcaacgggaggaactcacaaaaagacgagagaaactttcaaaaagaagggagaagatagtcaaggagaatggagagggagataaaaatgtggctaatatcaatgaagagatggagtcactgactgctaatatcgattacatcaatgacagtatttctgattgtcaggccaacataatgcagatggaagaagcaaaggaagaaggtgagacattggatgttactgcagtcattaatgcctgcacccttacagaagcccgatacctgctagatcacttcctgtcaatgggcatcaataagggtcttcaggctgcccagaaagaggctcaaattaaagtactggaaggtcgactcaaacaaacagaaataaccagtgctacccaaaaccagctcttattccatatgttgaaagagaaggcagaattaaatcctgagctagatgctttactaggccatgctttacaagaaaatgtagaggatagtactgatgaggatgctcctttaaacagcccaggatcagaaggaagcacgctgtcttcagatctcatgaagctttgtggtgaagtgaaacctaagaacaaggcccgaaggagaaccaccactcagatggaattgctgtatgcagatagcagtgaactagcttcagacactagtacaggagatgcctccttgcctggccctctcacacctgttgcagaagggcaagagattggaatgaatacagagacaagtggtacttctgctagggaaaaagagctctctcccccacctggcttaccttctaagataggcagcatttccaggcagtcatctctatcagaaaaaaaaattccagagccttctcctgtaacaaggagaaaggcatatgagaaagcagaaaaatcaaaggccaaggaacaaaagcactcagattctggaacttcagaggctagtctttcacctccttcttccccaccaagccggccccgtaatgaactgaatgtttttaatcgtcttactgtttctcagggaaacacatcagttcagcaggataagggcataatcaacccatttcctgcttcaaaaggaatcagagcttttccacttcagtgtattcacatagctgaagggcatacaaaagctgtgctctgtgtggattctactgatgatctcctcttcactggatcaaaagatcgtacttgtaaagtatggaatctggtgactgggcaggaaataatgtcactggggggtcatcccaacaatgtcgtgtctgtaaaatactgtaattataccagtttggtcttcactgtatcaacatcttatattaaggtgtgggatatcagagattcagcaaagtgcattcgaacactaacgtcttcaggtcaagttactcttggagatgcttgttctgcaagtaccagtcgaacagtagctattccttctggagagaaccagatcaatcaaattgccctaaacccaactggcaccttcctctatgctgcttctggaaatgctgtcaggatgtgggatcttaaaaggtttcagtctacaggaaagttaacaggacacctaggccctgttatgtgccttactgtggatcagatttccagtggacaagatctaatcatcactggctccaaggatcattacatcaaaatgtttgatgttacagaaggagctcttgggactgtgagtcccacccacaattttgaaccccctcattatgatggcatagaagcactaaccattcaaggggataacctatttagtgggtctagagataatggaatcaagaaatgggacttaactcaaaaagaccttcttcagcaagttccaaatgcacataaggattgggtctgtgccctgggagtggtgccagaccacccagttttgctcagtggctgcagagggggcattttgaaagtctggaacatggatacttttatgccagtgggagagatgaagggtcatgatagtcctatcaatgccatatgtgttaattccacccacatttttactgcagctgatgatcgaactgtgagaatttggaaggctcgcaatttgcaagatggtcagatctctgacacaggagatctgggggaagatattgccagtaattaaacatgaatgaagataggttgtaaactgaatgctgtga

SEQ ID NO: 15393 - DNA, 6400 bp, Homo sapiens
  source 1..6400: mol_type = unassigned DNA
gaggagcccggagcgccctggcgggcgtggagtccccagcctggccgctgggaggccgcgtccccaccggagggggcagggcgcactcacccggccgccctgaggccgctggcggcctgttggcttctccacaggcgcgctcgccgttcaagcgcgctttgtccccgccccagatcctggggggtgagcggtggagaaggggcgggcgcccgcgagccgtgaatcacctcctcctcttgctgcctcagcgccgccgccacctttccattcagtcgcccaacatggctggagcgcggcggaggtgagccggccgcccgcccgcagacgccccagcctactgcgcccgagtcccgcggccccagtggcgcctcagctctgcggtgccgaggcccaacggctcgatcgctgcccgccgccagcatgttgggcgccccggacgagagctccgtgcgggtggctgtcagaataagaccacagcttgccaaagagaagattgaaggatgccatatttgtacatctgtcacaccaggagagcctcaggtcttcctagggaaagataaggcttttacttttgactatgtatttgacattgactcccagcaagagcagatctacattcaatgtatagaaaaactaattgaaggttgctttgaaggatacaatgctacagtttttgcttatggacaaactggagctggtaaaacatacacaatgggaacaggatttgatgttaacattgttgaggaagaactgggtattatttctcgagctgttaaacacctttttaagagtattgaagaaaaaaaacacatagcaattaaaaatgggcttcctgctccagattttaaagtgaatgcccaattcttagagctctataatgaagaggtccttgacttatttgataccactcgtgatattgatgcaaaaagtaaaaaatcaaatataagaattcatgaagattcaactggaggaatttatactgtgggcgttacaacacgtactgtgaatacagaatcagagatgatgcagtgtttgaagttgggtgctttatcccggacaactgccagtacccagatgaatgttcagagctctcgttcacatgccatttttaccattcatgtgtgtcaaaccagagtgtgtccccaaatagatgctgacaatgcaactgataataaaattatttctgaatcagcacagatgaatgaatttgaaaccctgactgcaaagttccattttgttgatctcgcaggatctgaaagactgaagcgtactggagctacaggcgagagggcaaaagaaggcatttctatcaactgtggacttttggcacttggcaatgtaataagtgccttgggagacaagagcaagagggccacacatgtcccctatagagattccaagctaacaagactactacaggattccctcgggggtaatagccaaacaatcatgatagcatgtgtcagcccttcagacagagactttatggaaacgttaaacaccctgaaatacgccaatcgagctagaaatatcaagaataaggtgatggtcaatcaggacagagctagtcagcaaatcaatgcacttcgtagtgaaatcacacgacttcagatggagctcatggagtacaaaacaggtaaaagaataattgacgaagagggtgtggaaagcatcaatgacatgtttcatgagaatgctatgctacagactgaaaataataacctgcgtgtaagaattaaagccatgcaagagacggttgatgcattgaggtccagaattacacagcttgttagtgatcaggccaaccatgttcttgccagagcaggtgaaggaaatgaggagattagtaatatgattcatagttatataaaagaaatcgaagatctcagggcaaaattattagaaagtgaagcagtgaatgagaaccttcgaaaaaacttgacaagagccacagcaagagcgccatatttcagcggatcatcaactttttctcctaccatactatcctcagacaaagaaaccattgaaattatagacctagcaaaaaaagatttagagaagttgaaaagaaaagaaaagaggaagaaaaaaagtgtggctggtaaagaggataatacagacactgaccaagagaagaaagaagaaaagggtgtttcggaaagagaaaacaatgaattagaagtggaagaaagtcaagaagtgagtgatcatgaggatgaagaagaggaggaggaggaggaggaagatgacattgatgggggtgaaagttctgatgaatcagattctgaatcagatgaaaaagccaattatcaagcagacttggcaaacattacttgtgaaattgcaattaagcaaaagctgattgatgaactagaaaacagccagaaaagactgcagactctgaaaaagcagtatgaagagaagctaatgatgctgcaacataaaattcgggatactcagcttgaaagagaccaggtgcttcaaaacttaggctcggtagaatcttactcagaagaaaaagcaaaaaaagttaggtctgaatatgaaaagaaactccaagccatgaacaaagaactgcagagacttcaagcagctcaaaaagaacatgcaaggttgcttaaaaatcagtctcagtatgaaaagcaattgaagaaattgcagcaggatgtgatggaaatgaaaaaaacaaaggttcgcctaatgaaacaaatgaaagaagaacaagagaaagccagactgactgagtctagaagaaacagagagattgctcagttgaaaaaggatcaacgtaaaagagatcatcaacttagacttctggaagcccaaaaaagaaaccaagaagtggttctacgtcgcaaaactgaagaggttacggctcttcgtcggcaagtaagacccatgtcagataaagtggctgggaaagttactcggaagctgagttcatctgatgcacctgctcaggacacaggttccagtgcagctgctgtcgaaacagatgcatcaaggacaggagcccagcagaaaatgagaattcctgtggcgagagtccaggccttaccaacgccggcaacaaatggaaacaggaaaaaatatcagaggaaaggattgactggccgagtgtttatttccaagacagctcgcatgaagtggcagctccttgagcgcagggtcacagacatcatcatgcagaagatgaccatttccaacatggaggcagatatgaatagactcctcaagcaacgggaggaactcacaaaaagacgagagaaactttcaaaaagaagggagaagatagtcaaggagaatggagagggagataaaaatgtggctaatatcaatgaagagatggagtcactgactgctaatatcgattacatcaatgacagtatttctgattgtcaggccaacataatgcagatggaagaagcaaaggaagaaggtgagacattggatgttactgcagtcattaatgcctgcacccttacagaagcccgatacctgctagatcacttcctgtcaatgggcatcaataagggtcttcaggctgcccagaaagaggctcaaattaaagtactggaaggtcgactcaaacaaacagaaataaccagtgctacccaaaaccagctcttattccatatgttgaaagagaaggcagaattaaatcctgagctagatgctttactaggccatgctttacaagaaaatgtagaggatagtactgatgaggatgctcctttaaacagcccaggatcagaaggaagcacgctgtcttcagatctcatgaagctttgtggtgaagtgaaacctaagaacaaggcccgaaggagaaccaccactcagatggaattgctgtatgcagatagcagtgaactagcttcagacactagtacaggagatgcctccttgcctggccctctcacacctgttgcagaagggcaagagattggaatgaatacagagacaagtggtacttctgctagggaaaaagagctctctcccccacctggcttaccttctaagataggcagcatttccaggcagtcatctctatcagaaaaaaaaattccagagccttctcctgtaacaaggagaaaggcatatgagaaagcagaaaaatcaaaggccaaggaacaaaagcagggcataatcaacccatttcctgcttcaaaaggaatcagagcttttccacttcagtgtattcacatagctgaagggcatacaaaagctgtgctctgtgtggattctactgatgatctcctcttcactggatcaaaagatcgtacttgtaaagtatggaatctggtgactgggcaggaaataatgtcactggggggtcatcccaacaatgtcgtgtctgtaaaatactgtaattataccagtttggtcttcactgtatcaacatcttatattaaggtgtgggatatcagagattcagcaaagtgcattcgaacactaacgtcttcaggtcaagttactcttggagatgcttgttctgcaagtaccagtcgaacagtagctattccttctggagagaaccagatcaatcaaattgccctaaacccaactggcaccttcctctatgctgcttctggaaatgctgtcaggatgtgggatcttaaaaggtttcagtctacaggaaagttaacaggacacctaggccctgttatgtgccttactgtggatcagatttccagtggacaagatctaatcatcactggctccaaggatcattacatcaaaatgtttgatgttacagaaggagctcttgggactgtgagtcccacccacaattttgaaccccctcattatgatggcatagaagcactaaccattcaaggggataacctatttagtgggtctagagataatggaatcaagaaatgggacttaactcaaaaagaccttcttcagcaagttccaaatgcacataaggattgggtctgtgccctgggagtggtgccagaccacccagttttgctcagtggctgcagagggggcattttgaaagtctggaacatggatacttttatgccagtgggagagatgaagggtcatgatagtcctatcaatgccatatgtgttaattccacccacatttttactgcagctgatgatcgaactgtgagaatttggaaggctcgcaatttgcaagatggtcagatctctgacacaggagatctgggggaagatattgccagtaattaaacatgaatgaagataggttgtaaactgaatgctgtgataatactctgtattctttatggaaaatgttgtcctgtacttactaggcaaaacgtatgaatcggattaactggaaaatatatctgaattcaactgctgactataaatggtattctaataaaattgtgtactatcctgtgtgcttagttttaagatcaaccaatagatatatatcctacaattgatatattgctttattcacacttttattgtggctgaatttttgtgcctatctataaaacacactttcaaattatttgaattaccaagacgtctgcttttgtgacagtcagaaaacacacctggaatacgatgcagcccaccattaactcattcatgtagtttattcaagtgatttatgtatttaaactaaatattgaaaatgttagtcaaattgtggtttgcttgtcaggtatttatatcagtctgtagtggattcccaaatttcaaagctcttttaatgtaatggacaaaaataagatatgagaatattattgatgaattttcataaggtggaattgatcttaatctactaacagagaagggtagacagtttgtgttaaatgttggcatttacttgtattgaccaaagttttgcagctctactatattctgtgctcaggactaaaatgctgttaatttttttttttttttccagtgctgtgcatatattctgtgatgggaaacattgttgatgtcctaacagaaatatattttgatctattttcctatggagttgtttctattatgaccatttaattttgtttttatttaatagtagtatttccttcccttttatctaattttttatatgctgctaaatatattttaaatatactatgtttgcgaaccttggtagctatgatgagagctattatcatctgtggtgggaaaagctatgtaaataggtagattgtatagagagactatcttgtgttgtgcctgtatgaatttttaaaagttgttgactggattttgcaaaaggatgtataatatttctgtctgctcagaatattaatttgtaaattctgcaagtttaatttttatgtagatggtataacatttgaaaatattgtcttatgtgattttttcccctgaaaatatttgcttgtaaatgaaaacttagctagggcttaaataaacatgttgctatgaaatt

SEQ ID NO: 15394 - DNA, 9895 bp, Homo sapiens
  source 1..9895: mol_type = unassigned DNA
gggaggtggctgccgggtgggaggtgtgtgcgcgtgtgccgcgccgtagggagcggcgggtcgcgccgccggctgtcagctagctccgcgccgccgcccgatggcgcgaggaggcgcgcgggcccagccccggggggccggccgcgggtgagcccctcggcctgccgcccgcgagcatgtcacctccagccgccgccgccgcagcctccgccagccgcgcccgcgcccccgcctcccgcagccgcagccgctgcctcgggcattggcccccagacccccgcctctgatccacgcccagaccctagctccagagggccatggccggccagggggactgctgcgtcaaggtggccgtcaggatccggccccagctgtcgaaggagaagattgagggctgtcacatctgtacctctgttaccccgggagagccccaggtcctgctggggaaggacaaggccttcacctatgactttgtcttcgacctggacacctggcaagaacagatctattccacctgtgtgagcaagctcatcgagggctgcttcgagggctataatgccacggtgctggcctatgggcagacgggggccgggaagacgtacaccatgggcactggctttgacatggcaacgtcggaggaggagcagggcatcatcccgagggccatcgcacacctctttgggggcattgccgagcgcaagcgccgggcacaggagcagggcgtggctggacctgagttcaaagtcagcgcccagtttctggagctctacaacgaggagatccttgacctgtttgacagcacccgtgaccctgacacccgccaccgcaggtccaacatcaagatccacgaggacgcaaacggtggcatctacaccactggcgtcacttctcgcctcatccactcccaggaggagctgatccagtgcctgaagcagggggccctgtcccgcaccacagccagcacccagatgaacgtgcagagctcacgctcccacgccatcttcaccatccacctgtgccagatgcgcatgtgcacccagcccgacctggtgaatgaggcggtgactgggcttcctgatggtacacctccctcgagtgagtatgagacactcactgctaagtttcactttgtggacctggccggctcagagcggctgaagcggacaggggctactggcgagcgggccaaggagggcatctccatcaactgtggcctgctggccttgggcaatgtgatcagcgccttaggggaccagagcaagaaggtggtgcacgttccctacagggactccaagctcactcggctcctccaggattcgctggggggcaacagccagaccatcatgatcgcctgtgtgagcccctcagaccgagatttcatggagaccctcaacacactcaaatatgccaatcgggcccgcaacatcaagaacaaggtggtagtgaaccaggacaagaccagccagcaaatcagtgcactgcgggctgagattgctcggctgcagatggagctgatggagtataaggcgggcaagcgagtgataggagaggatggcgctgagggctatagtgatctgttccgagagaatgccatgctacagaaggagaatggggccctgcggctgcgggtgaaagccatgcaggaggccatcgatgccatcaacaaccgcgtcacccagctcatgagccaggaggccaacctgctgctagccaaggccggcgatggcaatgaggccattggtgcgctgatccagaactacatccgggagatcgaggagctacggactaagcttctagagagtgaagccatgaacgagtccctgcgccgcagcctctcacgggcctcggctaggagcccctactccctgggtgcttctccagccgccccggccttcgggggcagccctgccagctccatggaggatgcctcggaggtgatccgcagggccaagcaggacctggagcggctaaagaagaaggaggtcaggcagcggaggaagagccccgagaaggaagccttcaaaaagagggcaaaactccaacaggagaacagcgaggagacggatgagaacgaggcggaggaggaggaggaagagcgagacgagagtggctgtgaggaggaggaagggcgcgaggatgaagatgaggactcgggcagtgaagagagcctggtggactcagactcagaccccgaggagaaggaggtgaacttccaggcggacctggccgacctgacttgtgagatcgaaatcaagcagaagctgatcgacgagctggagaacagccagcggcggttgcagacgctcaagcaccagtatgaggaaaagctgattctgctgcagaacaagatccgagacacacagctggagcgcgaccgtgtgctgcagaacctcagcaccatggagtgctatactgaggagaaggccaacaagatcaaggcagactatgagaagaggctgcgggagatgaaccgggacctgcagaagctgcaggccgcccagaaagagcacgcccggctgcttaagaaccagtcgcgctacgagagggagctgaagaagctacaggccgaggtggctgagatgaagaaggccaaggtggccctgatgaagcagatgcgtgaggagcaacagcggcggcggctagtggagaccaagaggaaccgggagatcgcacagctcaagaaggagcagcggcgacaggagtttcagatccgagctctggagtcccagaagcggcagcaggagatggtcctgaggaggaagacccaggaggtttctgcactgaggcgcctggccaagcccatgtctgagcgggtggcagggcgtgcaggactaaagccacccatgctggactctggggctgaggtgtcggccagcactacctcatctgaggctgaatcaggggcccgctctgtctccagcatcgtgcgccagtggaaccgcaaaatcaaccacttcttgggggaccatcctgcgcccactgtcaatggcacccgtcctgcccgaaagaagttccagaagaagggggccagccagagcttcagtaaggcggcaaggctcaagtggcagtccctggagcgacggatcattgacatcgtcatgcagagaatgaccattgtcaacctggaggctgacatggagcggctcatcaagaaaagggaggagctgttcctcctgcaggaggcactgcggaggaagcgggagcggctgcaggctgagagccccgaggaagagaaggggctgcaggagctggctgaggagatcgaggtgctggcagccaacattgactacatcaatgacggcatcaccgactgccaggccaccatcgtgcagctggaggagaccaaggaggagctggactccacagacacatccgtggtcatcagctcctgctccctggctgaagcccgcctcctgctagacaacttcctcaaggcatccattgacaaggggctgcaagtggcacaaaaggaagcccagatccggctgttggagggccgactgaggcagacggatatggcaggctcctcccagaaccatctgctcctggacgccctgcgtgagaaggctgaagctcaccccgagctgcaggccctcatctacaatgtgcagcaggagaatggctacgccagcacagatgaggagatctcagagttctctgagggcagcttctcccagtcattcaccatgaaaggctccaccagccatgacgatttcaagttcaagagcgagcccaaactgtctgcccaaatgaaagctgtgtcggctgagtgcctgggccccccactggatatctccaccaagaacatcaccaagtccctggcctccctcgttgagatcaaagaggacggagtgggcttctctgtccgagacccctattaccgggacagggtctcgcgcaccgtcagtctgcctacccggggcagcactttccctaggcaatctcgagccacagagacgtccccgctgacgagaaggaagtcctacgaccgagggcagcccattaggtccacagatgtgggattcacacccccatcatcccctcccactcggccccgcaatgaccgcaatgtcttctctcgtctcaccagtaatcagagccaggggtcagcgctggacaagggcatcatctccccggttggaggagccaagggtgcacggacggccccactgcagtgtgtctccatggccgaaggccacaccaagcccatcctctgcctggatgccacagatgagttgctattcacagggtccaaagaccgaagctgcaagatgtggaacttggttacgggacaggagatcgcagctctaaagggccaccccaacaacgtggtctccatcaagtactgcagccactcggggcttgtgttctccgtgtccacctcctacatcaaggtgtgggacatccgggactcagccaagtgcattcggactctcacgtcctcgggccaggtgatctcaggggatgcctgtgccgccacatccacccgtgccatcaccagtgctcagggcgagcatcagatcaaccagatcgccctcagcccttcgggcaccatgctgtacgccgcctcgggcaatgccgtccgcatctgggagcttagcaggttccagcctgtcggcaagctgactggccacatcggccctgtgatgtgcctgacggtcacccagacggccagccagcatgacctcgtggtgactggctccaaggaccactacgttaagatgttcgagctgggcgagtgtgtgacgggcaccatcggccccactcacaacttcgagcccccgcactacgatggcatcgagtgtctcgccatccagggagacatcctgttcagtggctcccgagataacggcatcaagaagtgggacctagaccagcaggagctcatccagcaaatccccaatgcgcacaaggactgggtgtgcgccctggccttcatcccgggccgccccatgctgctcagcgcctgccgtgcgggtgtcatcaaggtctggaacgtggacaacttcacacccatcggtgagatcaagggccacgacagtcccatcaatgccatctgcaccaatgccaagcatatcttcacagcctccagtgactgccgggtaaagttgtggaattacgtccctggactcaccccctgccttcctcgccgagtcctggccataaagggccgcgccaccaccctgccctgaccctccccaactctccctgtctcctctttcattcttcccctctttccttttccctctctttccccacttcgatctgagctgcttcttaacggtatgagattattttactccttcttcttcctttcccttcctgtcctgcctggcctagagaggtgccctgcctgtccctcctgcacccaccgtccttttccaagcatgaacagtgggacaggccccaggagatgggtgccagggagcagaagggggagccttcaggcctggacaaaacgaaacacccccccaaaaaaagaaaacccatgacaaagctcccctgggggcctctgagtgcacaggcctctccatctgcccagcaccccaccacctgcagtccacctccccgtaagccatgcttgcctcccagccccaaccacatttggggagtttggggaatccagttcatcctctacttttgggggcagccagccaagcccactgcaagagctgaccggcacccctccactttgtcctccaccccagtgacctgacggtgaagttctggagtgtccggcggttaccccacagcggcccaccctaggagtgaggtcagagggatgcccccggaccctcgaccccagcagcctggacaccatggaagggaagctgtgacccggccgatggggccagctgctctggggacagagggcgtggccccctctcctgccctcctccctctcccttggccttcccacaggacactgttccctcatccctcccctgcctctcaggagcctctgggtgagagagaggctggggaggaaattaagctgtgaagccaaagggcattatcccttcttgttcccctcctggcagtcgtggccacattgtctcctgctgaaccggctctgcccctttctcaggcctttggcccagtggtggagccctgtggggaggtgcagcagcctggccccatcccacccttccgaggagctggcctccccgcttctcccagcccagcctctagagccactgcacctgcctctgagcccaaaaagataagtcctcaggtagctaaggaaaccaggtgtgggcggctgggccttgcagctaacccttaaccctctggcaacccgcagatagccccaactggccccaacagttccctggggtcccttttggatggggccaaggtggagctgctagaaagattcctttggggagatggtcagaaatacttcagttatttattattttgttatttttattttttgctgttgcctcctggaaacggacttgaagtttcttcccctatattctttccctcagctcttgggggccagaaatcccaaagggagtccgctgccccggccctccagggccgcctcctctgtttgctttgcagaggagggaactgctccttcgactctgcagctcaggcctgtccccgacacagcccccagggagtcttctagctacccctggcctctaggccgcctgacgctcagtgccttcctccgttccggggcctggcacccgtgccgggcagccttacaccagccatgcccgcggcaccacatgtgtcttctcactcgcgaggtcttgtgcccagcgcccccgggaaggcgggggcgctcaccccacagcccaggccccggggttctgccccacagtcctgcgtgggccacgtaggaagcagcatgggggctgtgtctgctgggaggtggcttggatggggaggacagcccggcaccctgacccccgcccctccccagccctgcagtcccccactgggccggggagtctctccagcttctctctctctggttattcaggagacacattttcggccttaaaactggcatggagcgcaggccctcccttgcagaaaattatcaaggaagagggagttggcagagtttctctgccccggggctggggacgcggagctccggggaaattgttaaatcagtgttctggcgccccctgttgggggaactctggaattacaggagtgggccttgggggggactgagctccatccctctcccccgccccacccccacccaaagttgcccaccctgtttttccgttgcatcgctggtcttgtgcttcccgcttcagtctgggagccaagagccagccccacctcccttcagaggacgcagtgacttttggactttccagaggtggttctgtgtttctgcccttggctcctctccgtcttgggctggggcacttggagccctctccatgtggcgcccagtgttggggggaggcaggctccagtggaggctgagtgaggcctggtcccttccccgtgccctcctcggagctgccacagaggctaagacggctgtcctgctggtgctggccctgctggatgtggtattgaagtctggggcagctgatagcaggaaggagacccccttggatgctggtctcctgggacctgaacagtctgtcagcaatggctggaaatccttcttcctctggccaccccgggggtgccgggcaacccccttagctctaagatgtggccacaaatctcttcccactcctccccgccaacctgaacagaaagttttgaccttgcaacctgtaagaaagaatccgtccgcatgactgtttacaagcgatagaaacacgtaagactctgtccccttgagctcccacccccgggccggggatgccccacctggggtgactgcactgtagctgcaaggcgtgttcttgcacgaagtgtgatcttatggccctgcgagaggtgctcatcatcatgcccattttctgctgtttctgatgggtcagctacctcacggcggggccagctctgctgtcctggcaagtgtcattgactctctaaacttgaagtccttcaggagccctgagcccaacatccatgagacaccccgagttgtgcttcatgagagttggattctctgcccactctttcagggatgtccaaggtccatgttagggggcaggcccccagctccactcactgcacaagcaccctaaatgttggaagcacaaaatggttgtgatttgagcacaatggcagggtcccgcaggcagacttgacaggcccaggcccgggaggatccccccacgttggctctgtccaaagtgagattgggggtgcctgtgtctgggacagggggctgcccttgctcagaccaggccttggctcatggcttgtcctaattctgggactcgtcatcttacttcttgcccttctgtgcccatcttaagactggaggctgagccttgtcaggcccagccacatctttacgccatgggaccaggagtaaagcgctctctaaaccccgcaccccaaatctctaaacgcctgagttcaggctgagtcctagccctagtgagcctgaagagcttggactgattcccagtctcctgggtcaagccccactttgtgctttcgaagcttatgagcgggttccctggatagaaggagtcttccatccccactgcccttgggcctcttcagcatagtcctgtgccagggccctgtcctcactatcagtcagttcagtatttgctttcacgtgagtggcggactcttctgaagcagccagaactctcaaaggcagcgcatggagttgccttgcgagatttccaaggaaggaggaaagattaacaggcggagcctggcacacccaagcctttgaggtggtcagagtgccaccttcagccccttgggaagggacagcggtgggtctgggagtggcctcaccctggattcagcctaggaatctcttcaccctcagctgtccagccctgctgcctgtctggggatgtgtggcctgggcagagggcagtttaaagcacaaaaccacatggggaaaacacaaggttgcggggactttctcatgtgcctgatgtggtggagggagacaccagcaggtggctgcagtgacgttagggaacataacacttctttgccctgctagctctcagctctggggggcatcccccgatgtggtctgggctgggagcaggcatatcccctggttgttgcctgtgcctggtctgttcaccatcgtgtttgtgtgggcagagcctgccctgcaggagcagtgactttcttcccactgtgtgtcccggacctgtggtatgtgtccctttgccatcccaaacaggcaactgcttgctgctctccttgcttggcatagcctcctggtcagtggccaatgccccacaggccttcctgggcctggccctcctctcctgactcccagatccttccctgccctcttgtgtgcaaggacagattttgcagggaaagttctgtttcttctttgatacctttgttctgtcccctgccccatccccagcactcatgatcttgaagcccctatcacactctagttcagtcctgtgaaccatgtcctgagggccttgcagggaagtaggaaatagaaactcctccacaaagagccgaggatcagagaagacccctgagatgaatcagggccctgccctgcccaccaactcttttctagcaatcatgtcctgcccaggctgcaggcttcattaggctcctgctgtcctccatgatgtgactagcacaaggtgtatatatgttttgtacctctgccgatggctgtacatagtgtatgaaagttatttaagccccatgttgtacatttctgttcctagattggatgtgtgtgttctaagaagttgtcataaataaaacctgaatgacc

SEQ ID NO: 15395 - DNA, 5389 bp, Homo sapiens
  source 1..5389: mol_type = unassigned DNA
gcccagaccctagctccagagggccatggccggccagggggactgctgcgtcaaggtggccgtcaggatccggccccagctgtcgaaggagaagattgagggctgtcacatctgtacctctgttaccccgggagagccccaggtcctgctggggaaggacaaggccttcacctatgactttgtcttcgacctggacacctggcaagaacagatctattccacctgtgtgagcaagctcatcgagggctgcttcgagggctataatgccacggtgctggcctatgggcagacgggggccgggaagacgtacaccatgggcactggctttgacatggcaacgtcggaggaggagcagggcatcatcccgagggccatcgcacacctctttgggggcattgccgagcgcaagcgccgggcacaggagcagggcgtggctggacctgagttcaaagtcagcgcccagtttctggagctctacaacgaggagatccttgacctgtttgacagcacccgtgaccctgacacccgccaccgcaggtccaacatcaagatccacgaggacgcaaacggtggcatctacaccactggcgtcacttctcgcctcatccactcccaggaggagctgatccagtgcctgaagcagggggccctgtcccgcaccacagccagcacccagatgaacgtgcagagctcacgctcccacgccatcttcaccatccacctgtgccagatgcgcatgtgcacccagcccgacctggtgaatgaggcggtgactgggcttcctgatggtacacctccctcgagtgagtatgagacactcactgctaagtttcactttgtggacctggccggctcagagcggctgaagcggacaggggctactggcgagcgggccaaggagggcatctccatcaactgtggcctgctggccttgggcaatgtgatcagcgccttaggggaccagagcaagaaggtggtgcacgttccctacagggactccaagctcactcggctcctccaggattcgctggggggcaacagccagaccatcatgatcgcctgtgtgagcccctcagaccgagatttcatggagaccctcaacacactcaaatatgccaatcgggcccgcaacatcaagaacaaggtggtagtgaaccaggacaagaccagccagcaaatcagtgcactgcgggctgagattgctcggctgcagatggagctgatggagtataaggcgggcaagcgagtgataggagaggatggcgctgagggctatagtgatctgttccgagagaatgccatgctacagaaggagaatggggccctgcggctgcgggtgaaagccatgcaggaggccatcgatgccatcaacaaccgcgtcacccagctcatgagccaggaggccaacctgctgctagccaaggccggcgatggcaatgaggccattggtgcgctgatccagaactacatccgggagatcgaggagctacggactaagcttctagagagtgaagccatgaacgagtccctgcgccgcagcctctcacgggcctcggctaggagcccctactccctgggtgcttctccagccgccccggccttcgggggcagccctgccagctccatggaggatgcctcggaggtgatccgcagggccaagcaggacctggagcggctaaagaagaaggaggtcaggcagcggaggaagagccccgagaaggaagccttcaaaaagagggcaaaactccaacaggagaacagcgaggagacggatgagaacgaggcggaggaggaggaggaagagcgagacgagagtggctgtgaggaggaggaagggcgcgaggatgaagatgaggactcgggcagtgaagagagcctggtggactcagactcagaccccgaggagaaggaggtgaacttccaggcggacctggccgacctgacttgtgagatcgaaatcaagcagaagctgatcgacgagctggagaacagccagcggcggttgcagacgctcaagcaccagtatgaggaaaagctgattctgctgcagaacaagatccgagacacacagctggagcgcgaccgtgtgctgcagaacctcagcaccatggagtgctatactgaggagaaggccaacaagatcaaggcagactatgagaagaggctgcgggagatgaaccgggacctgcagaagctgcaggccgcccagaaagagcacgcccggctgcttaagaaccagtcgcgctacgagagggagctgaagaagctacaggccgaggtggctgagatgaagaaggccaaggtggccctgatgaagcagatgcgtgaggagcaacagcggcggcggctagtggagaccaagaggaaccgggagatcgcacagctcaagaaggagcagcggcgacaggagtttcagatccgagctctggagtcccagaagcggcagcaggagatggtcctgaggaggaagacccaggaggtttctgcactgaggcgcctggccaagcccatgtctgagcgggtggcagggcgtgcaggactaaagccacccatgctggactctggggctgaggtgtcggccagcactacctcatctgaggctgaatcaggggcccgctctgtctccagcatcgtgcgccagtggaaccgcaaaatcaaccacttcttgggggaccatcctgcgcccactgtcaatggcacccgtcctgcccgaaagaagttccagaagaagggggccagccagagcttcagtaaggcggcaaggctcaagtggcagtccctggagcgacggatcattgacatcgtcatgcagagaatgaccattgtcaacctggaggctgacatggagcggctcatcaagaaaagggaggagctgttcctcctgcaggaggcactgcggaggaagcgggagcggctgcaggctgagagccccgaggaagagaaggggctgcaggagctggctgaggagatcgaggtgctggcagccaacattgactacatcaatgacggcatcaccgactgccaggccaccatcgtgcagctggaggagaccaaggaggagctggactccacagacacatccgtggtcatcagctcctgctccctggctgaagcccgcctcctgctagacaacttcctcaaggcatccattgacaaggggctgcaagtggcacaaaaggaagcccagatccggctgttggagggccgactgaggcagacggatatggcaggctcctcccagaaccatctgctcctggacgccctgcgtgagaaggctgaagctcaccccgagctgcaggccctcatctacaatgtgcagcaggagaatggctacgccagcacagatgaggagatctcagagttctctgagggcagcttctcccagtcattcaccatgaaaggctccaccagccatgacgatttcaagttcaagagcgagcccaaactgtctgcccaaatgaaagctgtgtcggctgagtgcctgggccccccactggatatctccaccaagaacatcaccaagtccctggcctccctcgttgagatcaaagaggacggagtgggcttctctgtccgagacccctattaccgggacagggtctcgcgcaccgtcagtctgcctacccggggcagcactttccctaggcaatctcgagccacagagacgtccccgctgacgagaaggaagtcctacgaccgagggcagcccattaggtccacagatgtgggattcacacccccatcatcccctcccactcggccccgcaatgaccgcaatgtcttctctcgtctcaccagtaatcagagccaggggtcagcgctggacaagggcatcatctccccggttggaggagccaagggtgcacggacggccccactgcagtgtgtctccatggccgaaggccacaccaagcccatcctctgcctggatgccacagatgagttgctattcacagggtccaaagaccgaagctgcaagatgtggaacttggttacgggacaggagatcgcagctctaaagggccaccccaacaacgtggtctccatcaagtactgcagccactcggggcttgtgttctccgtgtccacctcctacatcaaggtgtgggacatccgggactcagccaagtgcattcggactctcacgtcctcgggccaggtgatctcaggggatgcctgtgccgccacatccacccgtgccatcaccagtgctcagggcgagcatcagatcaaccagatcgccctcagcccttcgggcaccatgctgtacgccgcctcgggcaatgccgtccgcatctgggagcttagcaggttccagcctgtcggcaagctgactggccacatcggccctgtgatgtgcctgacggtcacccagacggccagccagcatgacctcgtggtgactggctccaaggaccactacgttaagatgttcgagctgggcgagtgtgtgacgggcaccatcggccccactcacaacttcgagcccccgcactacgatggcatcgagtgtctcgccatccagggagacatcctgttcagtggctcccgagataacggcatcaagaagtgggacctagaccagcaggagctcatccagcaaatccccaatgcgcacaaggactgggtgtgcgccctggccttcatcccgggccgccccatgctgctcagcgcctgccgtgcgggtgtcatcaaggtctggaacgtggacaacttcacacccatcggtgagatcaagggccacgacagtcccatcaatgccatctgcaccaatgccaagcatatcttcacagcctccagtgacctgacggtgaagttctggagtgtccggcggttaccccacagcggcccaccctaggagtgaggtcagagggatgcccccggaccctcgaccccagcagcctggacaccatggaagggaagctgtgacccggccgatggggccagctgctctggggacagagggcgtggccccctctcctgccctcctccctctcccttggccttcccacaggacactgttccctcatccctcccctgcctctcaggagcctctgggtgagagagaggctggggaggaaattaagctgtgaagccaaagggcattatcccttcttgttcccctcctggcagtcgtggccacattgtctcctgctgaaccggctctgcccctttctcaggcctttggcccagtggtggagccctgtggggaggtgcagcagcctggccccatcccacccttccgaggagctggcctccccgcttctcccagcccagcctctagagccactgcacctgcctctgagcccaaaaagataagtcctcaggtagctaaggaaaccaggtgtgggcggctgggccttgcagctaacccttaaccctctggcaa

SEQ ID NO: 15396 - DNA, 5519 bp, Homo sapiens
  source 1..5519: mol_type = unassigned DNA
gggaggtggctgccgggtgggaggtgtgtgcgcgtgtgccgcgccgtagggagcggcgggtcgcgccgccggctgtcagctagctccgcgccgccgcccgatggcgcgaggaggcgcgcgggcccagccccggggggccggccgcgggtgagcccctcggcctgccgcccgcgagcatgtcacctccagccgccgccgccgcagcctccgccagccgcgcccgcgcccccgcctcccgcagccgcagccgctgcctcgggcattggcccccagacccccgcctctgatccacgcccagaccctagctccagagggccatggccggccagggggactgctgcgtcaaggtggccgtcaggatccggccccagctgtcgaaggagaagattgagggctgtcacatctgtacctctgttaccccgggagagccccaggtcctgctggggaaggacaaggccttcacctatgactttgtcttcgacctggacacctggcaagaacagatctattccacctgtgtgagcaagctcatcgagggctgcttcgagggctataatgccacggtgctggcctatgggcagacgggggccgggaagacgtacaccatgggcactggctttgacatggcaacgtcggaggaggagcagggcatcatcccgagggccatcgcacacctctttgggggcattgccgagcgcaagcgccgggcacaggagcagggcgtggctggacctgagttcaaagtcagcgcccagtttctggagctctacaacgaggagatccttgacctgtttgacagcacccgtgaccctgacacccgccaccgcaggtccaacatcaagatccacgaggacgcaaacggtggcatctacaccactggcgtcacttctcgcctcatccactcccaggaggagctgatccagtgcctgaagcagggggccctgtcccgcaccacagccagcacccagatgaacgtgcagagctcacgctcccacgccatcttcaccatccacctgtgccagatgcgcatgtgcacccagcccgacctggtgaatgaggcggtgactgggcttcctgatggtacacctccctcgagtgagtatgagacactcactgctaagtttcactttgtggacctggccggctcagagcggctgaagcggacaggggctactggcgagcgggccaaggagggcatctccatcaactgtggcctgctggccttgggcaatgtgatcagcgccttaggggaccagagcaagaaggtggtgcacgttccctacagggactccaagctcactcggctcctccaggattcgctggggggcaacagccagaccatcatgatcgcctgtgtgagcccctcagaccgagatttcatggagaccctcaacacactcaaatatgccaatcgggcccgcaacatcaagaacaaggtggtagtgaaccaggacaagaccagccagcaaatcagtgcactgcgggctgagattgctcggctgcagatggagctgatggagtataaggcgggcaagcgagtgataggagaggatggcgctgagggctatagtgatctgttccgagagaatgccatgctacagaaggagaatggggccctgcggctgcgggtgaaagccatgcaggaggccatcgatgccatcaacaaccgcgtcacccagctcatgagccaggaggccaacctgctgctagccaaggccggcgatggcaatgaggccattggtgcgctgatccagaactacatccgggagatcgaggagctacggactaagcttctagagagtgaagccatgaacgagtccctgcgccgcagcctctcacgggcctcggctaggagcccctactccctgggtgcttctccagccgccccggccttcgggggcagccctgccagctccatggaggatgcctcggaggtgatccgcagggccaagcaggacctggagcggctaaagaagaaggaggtcaggcagcggaggaagagccccgagaaggaagccttcaaaaagagggcaaaactccaacaggagaacagcgaggagacggatgagaacgaggcggaggaggaggaggaagagcgagacgagagtggctgtgaggaggaggaagggcgcgaggatgaagatgaggactcgggcagtgaagagagcctggtggactcagactcagaccccgaggagaaggaggtgaacttccaggcggacctggccgacctgacttgtgagatcgaaatcaagcagaagctgatcgacgagctggagaacagccagcggcggttgcagacgctcaagcaccagtatgaggaaaagctgattctgctgcagaacaagatccgagacacacagctggagcgcgaccgtgtgctgcagaacctcagcaccatggagtgctatactgaggagaaggccaacaagatcaaggcagactatgagaagaggctgcgggagatgaaccgggacctgcagaagctgcaggccgcccagaaagagcacgcccggctgcttaagaaccagtcgcgctacgagagggagctgaagaagctacaggccgaggtggctgagatgaagaaggccaaggtggccctgatgaagcagatgcgtgaggagcaacagcggcggcggctagtggagaccaagaggaaccgggagatcgcacagctcaagaaggagcagcggcgacaggagtttcagatccgagctctggagtcccagaagcggcagcaggagatggtcctgaggaggaagacccaggaggtttctgcactgaggcgcctggccaagcccatgtctgagcgggtggcagggcgtgcaggactaaagccacccatgctggactctggggctgaggtgtcggccagcactacctcatctgaggctgaatcaggggcccgctctgtctccagcatcgtgcgccagtggaaccgcaaaatcaaccacttcttgggggaccatcctgcgcccactgtcaatggcacccgtcctgcccgaaagaagttccagaagaagggggccagccagagcttcagtaaggcggcaaggctcaagtggcagtccctggagcgacggatcattgacatcgtcatgcagagaatgaccattgtcaacctggaggctgacatggagcggctcatcaagaaaagggaggagctgttcctcctgcaggaggcactgcggaggaagcgggagcggctgcaggctgagagccccgaggaagagaaggggctgcaggagctggctgaggagatcgaggtgctggcagccaacattgactacatcaatgacggcatcaccgactgccaggccaccatcgtgcagctggaggagaccaaggaggagctggactccacagacacatccgtggtcatcagctcctgctccctggctgaagcccgcctcctgctagacaacttcctcaaggcatccattgacaaggggctgcaagtggcacaaaaggaagcccagatccggctgttggagggccgactgaggcagacggatatggcaggctcctcccagaaccatctgctcctggacgccctgcgtgagaaggctgaagctcaccccgagctgcaggccctcatctacaatgtgcagcaggagaatggctacgccagcacagatgaggagatctcagagttctctgagggcagcttctcccagtcattcaccatgaaaggctccaccagccatgacgatttcaagttcaagagcgagcccaaactgtctgcccaaatgaaagctgtgtcggctgagtgcctgggccccccactggatatctccaccaagaacatcaccaagtccctggcctccctcgttgagatcaaagaggacggagtgggcttctctgtccgagacccctattaccgggacagggtctcgcgcaccgtcagtctgcctacccggggcagcactttccctaggcaatctcgagccacagagacgtccccgctgacgagaaggaagtcctacgaccgagggcagcccattaggtccacagatgtgggattcacacccccatcatcccctcccactcggccccgcaatgaccgcaatgtcttctctcgtctcaccagtaatcagagccaggggtcagcgctggacaagtctgatgacagcgactcctctttgtcggaggtcctgaggggcatcatctccccggttggaggagccaagggtgcacggacggccccactgcagtgtgtctccatggccgaaggccacaccaagcccatcctctgcctggatgccacagatgagttgctattcacagggtccaaagaccgaagctgcaagatgtggaacttggttacgggacaggagatcgcagctctaaagggccaccccaacaacgtggtctccatcaagtactgcagccactcggggcttgtgttctccgtgtccacctcctacatcaaggtgtgggacatccgggactcagccaagtgcattcggactctcacgtcctcgggccaggtgatctcaggggatgcctgtgccgccacatccacccgtgccatcaccagtgctcagggcgagcatcagatcaaccagatcgccctcagcccttcgggcaccatgctgtacgccgcctcgggcaatgccgtccgcatctgggagcttagcaggttccagcctgtcggcaagctgactggccacatcggccctgtgatgtgcctgacggtcacccagacggccagccagcatgacctcgtggtgactggctccaaggaccactacgttaagatgttcgagctgggcgagtgtgtgacgggcaccatcggccccactcacaacttcgagcccccgcactacgatggcatcgagtgtctcgccatccagggagacatcctgttcagtggctcccgagataacggcatcaagaagtgggacctagaccagcaggagctcatccagcaaatccccaatgcgcacaaggactgggtgtgcgccctggccttcatcccgggccgccccatgctgctcagcgcctgccgtgcgggtgtcatcaaggtctggaacgtggacaacttcacacccatcggtgagatcaagggccacgacagtcccatcaatgccatctgcaccaatgccaagcatatcttcacagcctccagtgactgccgggtaaagttgtggaattacgtccctggactcaccccctgccttcctcgccgagtcctggccataaagggccgcgccaccaccctgccctgaccctccccaactctccctgtctcctctttcattcttcccctctttccttttccctctctttccccacttcgatctgagctgcttcttaacggtatgagattattttactccttcttcttcctttcccttcctgtcctgcctggcctagagaggtgccctgcctgtccctcctgcacccaccgtccttttccaagcatgaacagtgggacaggccccaggagatgggtgccagggagcagaagggggagccttcaggcctggacaaaacgaaacacccccccaaaaaaa

SEQ ID NO: 15397 - DNA, 5428 bp, Homo sapiens
  source 1..5428: mol_type = unassigned DNA
gcccagaccctagctccagagggccatggccggccagggggactgctgcgtcaaggtggccgtcaggatccggccccagctgtcgaaggagaagattgagggctgtcacatctgtacctctgttaccccgggagagccccaggtcctgctggggaaggacaaggccttcacctatgactttgtcttcgacctggacacctggcaagaacagatctattccacctgtgtgagcaagctcatcgagggctgcttcgagggctataatgccacggtgctggcctatgggcagacgggggccgggaagacgtacaccatgggcactggctttgacatggcaacgtcggaggaggagcagggcatcatcccgagggccatcgcacacctctttgggggcattgccgagcgcaagcgccgggcacaggagcagggcgtggctggacctgagttcaaagtcagcgcccagtttctggagctctacaacgaggagatccttgacctgtttgacagcacccgtgaccctgacacccgccaccgcaggtccaacatcaagatccacgaggacgcaaacggtggcatctacaccactggcgtcacttctcgcctcatccactcccaggaggagctgatccagtgcctgaagcagggggccctgtcccgcaccacagccagcacccagatgaacgtgcagagctcacgctcccacgccatcttcaccatccacctgtgccagatgcgcatgtgcacccagcccgacctggtgaatgaggcggtgactgggcttcctgatggtacacctccctcgagtgagtatgagacactcactgctaagtttcactttgtggacctggccggctcagagcggctgaagcggacaggggctactggcgagcgggccaaggagggcatctccatcaactgtggcctgctggccttgggcaatgtgatcagcgccttaggggaccagagcaagaaggtggtgcacgttccctacagggactccaagctcactcggctcctccaggattcgctggggggcaacagccagaccatcatgatcgcctgtgtgagcccctcagaccgagatttcatggagaccctcaacacactcaaatatgccaatcgggcccgcaacatcaagaacaaggtggtagtgaaccaggacaagaccagccagcaaatcagtgcactgcgggctgagattgctcggctgcagatggagctgatggagtataaggcgggcaagcgagtgataggagaggatggcgctgagggctatagtgatctgttccgagagaatgccatgctacagaaggagaatggggccctgcggctgcgggtgaaagccatgcaggaggccatcgatgccatcaacaaccgcgtcacccagctcatgagccaggaggccaacctgctgctagccaaggccggcgatggcaatgaggccattggtgcgctgatccagaactacatccgggagatcgaggagctacggactaagcttctagagagtgaagccatgaacgagtccctgcgccgcagcctctcacgggcctcggctaggagcccctactccctgggtgcttctccagccgccccggccttcgggggcagccctgccagctccatggaggatgcctcggaggtgatccgcagggccaagcaggacctggagcggctaaagaagaaggaggtcaggcagcggaggaagagccccgagaaggaagccttcaaaaagagggcaaaactccaacaggagaacagcgaggagacggatgagaacgaggcggaggaggaggaggaagagcgagacgagagtggctgtgaggaggaggaagggcgcgaggatgaagatgaggactcgggcagtgaagagagcctggtggactcagactcagaccccgaggagaaggaggtgaacttccaggcggacctggccgacctgacttgtgagatcgaaatcaagcagaagctgatcgacgagctggagaacagccagcggcggttgcagacgctcaagcaccagtatgaggaaaagctgattctgctgcagaacaagatccgagacacacagctggagcgcgaccgtgtgctgcagaacctcagcaccatggagtgctatactgaggagaaggccaacaagatcaaggcagactatgagaagaggctgcgggagatgaaccgggacctgcagaagctgcaggccgcccagaaagagcacgcccggctgcttaagaaccagtcgcgctacgagagggagctgaagaagctacaggccgaggtggctgagatgaagaaggccaaggtggccctgatgaagcagatgcgtgaggagcaacagcggcggcggctagtggagaccaagaggaaccgggagatcgcacagctcaagaaggagcagcggcgacaggagtttcagatccgagctctggagtcccagaagcggcagcaggagatggtcctgaggaggaagacccaggaggtttctgcactgaggcgcctggccaagcccatgtctgagcgggtggcagggcgtgcaggactaaagccacccatgctggactctggggctgaggtgtcggccagcactacctcatctgaggctgaatcaggggcccgctctgtctccagcatcgtgcgccagtggaaccgcaaaatcaaccacttcttgggggaccatcctgcgcccactgtcaatggcacccgtcctgcccgaaagaagttccagaagaagggggccagccagagcttcagtaaggcggcaaggctcaagtggcagtccctggagcgacggatcattgacatcgtcatgcagagaatgaccattgtcaacctggaggctgacatggagcggctcatcaagaaaagggaggagctgttcctcctgcaggaggcactgcggaggaagcgggagcggctgcaggctgagagccccgaggaagagaaggggctgcaggagctggctgaggagatcgaggtgctggcagccaacattgactacatcaatgacggcatcaccgactgccaggccaccatcgtgcagctggaggagaccaaggaggagctggactccacagacacatccgtggtcatcagctcctgctccctggctgaagcccgcctcctgctagacaacttcctcaaggcatccattgacaaggggctgcaagtggcacaaaaggaagcccagatccggctgttggagggccgactgaggcagacggatatggcaggctcctcccagaaccatctgctcctggacgccctgcgtgagaaggctgaagctcaccccgagctgcaggccctcatctacaatgtgcagcaggagaatggctacgccagcacagatgaggagatctcagagttctctgagggcagcttctcccagtcattcaccatgaaaggctccaccagccatgacgatttcaagttcaagagcgagcccaaactgtctgcccaaatgaaagctgtgtcggctgagtgcctgggccccccactggatatctccaccaagaacatcaccaagtccctggcctccctcgttgagatcaaagaggacggagtgggcttctctgtccgagacccctattaccgggacagggtctcgcgcaccgtcagtctgcctacccggggcagcactttccctaggcaatctcgagccacagagacgtccccgctgacgagaaggaagtcctacgaccgagggcagcccattaggtccacagatgtgggattcacacccccatcatcccctcccactcggccccgcaatgaccgcaatgtcttctctcgtctcaccagtaatcagagccaggggtcagcgctggacaagtctgatgacagcgactcctctttgtcggaggtcctgaggggcatcatctccccggttggaggagccaagggtgcacggacggccccactgcagtgtgtctccatggccgaaggccacaccaagcccatcctctgcctggatgccacagatgagttgctattcacagggtccaaagaccgaagctgcaagatgtggaacttggttacgggacaggagatcgcagctctaaagggccaccccaacaacgtggtctccatcaagtactgcagccactcggggcttgtgttctccgtgtccacctcctacatcaaggtgtgggacatccgggactcagccaagtgcattcggactctcacgtcctcgggccaggtgatctcaggggatgcctgtgccgccacatccacccgtgccatcaccagtgctcagggcgagcatcagatcaaccagatcgccctcagcccttcgggcaccatgctgtacgccgcctcgggcaatgccgtccgcatctgggagcttagcaggttccagcctgtcggcaagctgactggccacatcggccctgtgatgtgcctgacggtcacccagacggccagccagcatgacctcgtggtgactggctccaaggaccactacgttaagatgttcgagctgggcgagtgtgtgacgggcaccatcggccccactcacaacttcgagcccccgcactacgatggcatcgagtgtctcgccatccagggagacatcctgttcagtggctcccgagataacggcatcaagaagtgggacctagaccagcaggagctcatccagcaaatccccaatgcgcacaaggactgggtgtgcgccctggccttcatcccgggccgccccatgctgctcagcgcctgccgtgcgggtgtcatcaaggtctggaacgtggacaacttcacacccatcggtgagatcaagggccacgacagtcccatcaatgccatctgcaccaatgccaagcatatcttcacagcctccagtgacctgacggtgaagttctggagtgtccggcggttaccccacagcggcccaccctaggagtgaggtcagagggatgcccccggaccctcgaccccagcagcctggacaccatggaagggaagctgtgacccggccgatggggccagctgctctggggacagagggcgtggccccctctcctgccctcctccctctcccttggccttcccacaggacactgttccctcatccctcccctgcctctcaggagcctctgggtgagagagaggctggggaggaaattaagctgtgaagccaaagggcattatcccttcttgttcccctcctggcagtcgtggccacattgtctcctgctgaaccggctctgcccctttctcaggcctttggcccagtggtggagccctgtggggaggtgcagcagcctggccccatcccacccttccgaggagctggcctccccgcttctcccagcccagcctctagagccactgcacctgcctctgagcccaaaaagataagtcctcaggtagctaaggaaaccaggtgtgggcggctgggccttgcagctaacccttaaccctctggcaa

SEQ ID NO: 15398 - DNA, 5004 bp, Homo sapiens
  source 1..5004: mol_type = unassigned DNA
atggccggccagggggactgctgcgtcaaggtggccgtcaggatccggccccagctgtcgaaggagaagattgagggctgtcacatctgtacctctgttaccccgggagagccccaggtcctgctggggaaggacaaggccttcacctatgactttgtcttcgacctggacacctggcaagaacagatctattccacctgtgtgagcaagctcatcgagggctgcttcgagggctataatgccacggtgctggcctatgggcagacgggggccgggaagacgtacaccatgggcactggctttgacatggcaacgtcggaggaggagcagggcatcatcccgagggccatcgcacacctctttgggggcattgccgagcgcaagcgccgggcacaggagcagggcgtggctggacctgagttcaaagtcagcgcccagtttctggagctctacaacgaggagatccttgacctgtttgacagcacccgtgaccctgacacccgccaccgcaggtccaacatcaagatccacgaggacgcaaacggtggcatctacaccactggcgtcacttctcgcctcatccactcccaggaggagctgatccagtgcctgaagcagggggccctgtcccgcaccacagccagcacccagatgaacgtgcagagctcacgctcccacgccatcttcaccatccacctgtgccagatgcgcatgtgcacccagcccgacctggtgaatgaggcggtgactgggcttcctgatggtacacctccctcgagtgagtatgagacactcactgctaagtttcactttgtggacctggccggctcagagcggctgaagcggacaggggctactggcgagcgggccaaggagggcatctccatcaactgtggcctgctggccttgggcaatgtgatcagcgccttaggggaccagagcaagaaggtggtgcacgttccctacagggactccaagctcactcggctcctccaggattcgctggggggcaacagccagaccatcatgatcgcctgtgtgagcccctcagaccgagatttcatggagaccctcaacacactcaaatatgccaatcgggcccgcaacatcaagaacaaggtggtagtgaaccaggacaagaccagccagcaaatcagtgcactgcgggctgagattgctcggctgcagatggagctgatggagtataaggcgggcaagcgagtgataggagaggatggcgctgagggctatagtgatctgttccgagagaatgccatgctacagaaggagaatggggccctgcggctgcgggtgaaagccatgcaggaggccatcgatgccatcaacaaccgcgtcacccagctcatgagccaggaggccaacctgctgctagccaaggccggcgatggcaatgaggccattggtgcgctgatccagaactacatccgggagatcgaggagctacggactaagcttctagagagtgaagccatgaacgagtccctgcgccgcagcctctcacgggcctcggctaggagcccctactccctgggtgcttctccagccgccccggccttcgggggcagccctgccagctccatggaggatgcctcggaggtgatccgcagggccaagcaggacctggagcggctaaagaagaaggaggtcaggcagcggaggaagagccccgagaaggaagccttcaaaaagagggcaaaactccaacaggagaacagcgaggagacggatgagaacgaggcggaggaggaggaggaagagcgagacgagagtggctgtgaggaggaggaagggcgcgaggatgaagatgaggactcgggcagtgaagagagcctggtggactcagactcagaccccgaggagaaggaggtgaacttccaggcggacctggccgacctgacttgtgagatcgaaatcaagcagaagctgatcgacgagctggagaacagccagcggcggttgcagacgctcaagcaccagtatgaggaaaagctgattctgctgcagaacaagatccgagacacacagctggagcgcgaccgtgtgctgcagaacctcagcaccatggagtgctatactgaggagaaggccaacaagatcaaggcagactatgagaagaggctgcgggagatgaaccgggacctgcagaagctgcaggccgcccagaaagagcacgcccggctgcttaagaaccagtcgcgctacgagagggagctgaagaagctacaggccgaggtggctgagatgaagaaggccaaggtggccctgatgaagcagatgcgtgaggagcaacagcggcggcggctagtggagaccaagaggaaccgggagatcgcacagctcaagaaggagcagcggcgacaggagtttcagatccgagctctggagtcccagaagcggcagcaggagatggtcctgaggaggaagacccaggaggtttctgcactgaggcgcctggccaagcccatgtctgagcgggtggcagggcgtgcaggactaaagccacccatgctggactctggggctgaggtgtcggccagcactacctcatctgaggctgaatcaggggcccgctctgtctccagcatcgtgcgccagtggaaccgcaaaatcaaccacttcttgggggaccatcctgcgcccactgtcaatggcacccgtcctgcccgaaagaagttccagaagaagggggccagccagagcttcagtaaggcggcaaggctcaagtggcagtccctggagcgacggatcattgacatcgtcatgcagagaatgaccattgtcaacctggaggctgacatggagcggctcatcaagaaaagggaggagctgttcctcctgcaggaggcactgcggaggaagcgggagcggctgcaggctgagagccccgaggaagagaaggggctgcaggagctggctgaggagatcgaggtgctggcagccaacattgactacatcaatgacggcatcaccgactgccaggccaccatcgtgcagctggaggagaccaaggaggagctggactccacagacacatccgtggtcatcagctcctgctccctggctgaagcccgcctcctgctagacaacttcctcaaggcatccattgacaaggggctgcaagtggcacaaaaggaagcccagatccggctgttggagggccgactgaggcagacggatatggcaggctcctcccagaaccatctgctcctggacgccctgcgtgagaaggctgaagctcaccccgagctgcaggccctcatctacaatgtgcagcaggagaatggctacgccagcacagatgaggagatctcagagttctctgagggcagcttctcccagtcattcaccatgaaaggctccaccagccatgacgatttcaagttcaagagcgagcccaaactgtctgcccaaatgaaagctgtgtcggctgagtgcctgggccccccactggatatctccaccaagaacatcaccaagtccctggcctccctcgttgagatcaaagaggacggagtgggcttctctgtccgagacccctattaccgggacagggtctcgcgcaccgtcagtctgcctacccggggcagcactttccctaggcaatctcgagccacagagacgtccccgctgacgagaaggaagtcctacgaccgagggcagcccattaggtccacagatgtgggattcacacccccatcatcccctcccactcggccccgcaatgaccgcaatgtcttctctcgtctcaccagtaatcagagccaggggtcagcgctggacaagtctgatgacagcgactcctctttgtcggaggtcctgaggggcatcatctccccggttggaggagccaagggtgcacggacggccccactgcagtgtgtctccatggccgaaggccacaccaagcccatcctctgcctggatgccacagatgagttgctattcacagggtccaaagaccgaagctgcaagatgtggaacttggttacgggacaggagatcgcagctctaaagggccaccccaacaacgtggtctccatcaagtactgcagccactcggggcttgtgttctccgtgtccacctcctacatcaaggtgtgggacatccgggactcagccaagtgcattcggactctcacgtcctcgggccaggtgatctcaggggatgcctgtgccgccacatccacccgtgccatcaccagtgctcagggcgagcatcagatcaaccagatcgccctcagcccttcgggcaccatgctgtacgccgcctcgggcaatgccgtccgcatctgggagcttagcaggttccagcctgtcggcaagctgactggccacatcggccctgtgatgtgcctgacggtcacccagacggccagccagcatgacctcgtggtgactggctccaaggaccactacgttaagatgttcgagctgggcgagtgtgtgacgggcaccatcggccccactcacaacttcgagcccccgcactacgatggcatcgagtgtctcgccatccagggagacatcctgttcagtggctcccgagataacggcatcaagaagtgggacctagaccagcaggagctcatccagcaaatccccaatgcgcacaaggactgggtgtgcgccctggccttcatcccgggccgccccatgctgctcagcgcctgccgtgcgggtgtcatcaaggtctggaacgtggacaacttcacacccatcggtgagatcaagggccacgacagtcccatcaatgccatctgcaccaatgccaagcatatcttcacagcctccagtgactgccgggtaaagttgtggaattacgtccctggactcaccccctgccttcctcgccgagtcctggccataaagggccgcgccaccacctgccctgaccctccccaactctccctgtctcctctttcattcttcccctctttccttttccctctctttccccacttcgatctgagctgcttcttaacg

SEQ ID NO: 15399 - DNA, 2113 bp, Homo sapiens
  source 1..2113: mol_type = unassigned DNA
ggaattcgaatgggagaggcgggcccaaggagggagtggaatggccgcgggcggctcgacgcagcagaggcgacgcgagatggcggcagcttcagcggcggcgatctcaggagctggtcgctgtcggctaagcaagattggagctactcgtcgtccacctccagctcgcgtaagggtggctgtgcgactgcggccatttgtggatggaacagcgggagcaagtgatcccccctgtgtgcggggcatggacagctgctctctagagattgctaactggaggaaccaccaggagactctcaaataccagtttgatgccttctatggggagaggagtactcagcaggacatctatgcaggttcagtgcagcccatcctaaggcacttgctggaagggcagaatgccagtgtgcttgcctatggacccacaggagctgggaagacgcacacaatgctgggcagcccagagcaacctggggtgatcccgcgggctctcatggacctcctgcagctcacaagggaggagggtgccgagggccggccatgggccctttctgtcaccatgtcttacctagagatctaccaggagaaggtattagacctcctggaccctgcttcgggagacctggtaatccgagaagactgccgggggaatatcctgattccgggtctctcccagaagcccatcagtagctttgctgattttgagcggcacttcctgccagccagtcgaaatcggactgtaggagccacccggctcaaccagcgctcctcccgcagtcatgctgtgctcctggtcaaggtggaccagcgggaacgtttggccccatttcgccagcgagagggaaaactctacctgattgacttggctgggtcagaggacaaccggcgcacaggcaacaagggccttcggctaaaagagagtggagccatcaacacctccctgtttgtcctgggcaaagtggtagatgcgctgaatcagggcctccctcgtgtaccttatcgggacagcaagctcactcgcctattgcaggactctctgggtggctcagcccacagtatccttattgccaacattgcccctgagagacgcttctacctagacacagtctccgcactcaactttgctgccaggtccaaggaggtgatcaatcggccttttaccaatgagagcctgcagcctcatgccttgggacctgttaagctgtctcagaaagaattgcttggtccaccagaggcaaagagagcccgaggccctgaggaagaggagatcgggagccctgagcccatggcagctccagcctctgcctcccagaaactcagccccctacagaagctaagcagcatggacccggccatgctggagcgcctcctcagcttggaccgtctgcttgcctcccaggggagccagggggcccctctgttgagtaccccaaagcgagagcggatggtgctaatgaagacagtggaagagaaggacctagagattgagaggcttaagacgaagcaaaaagaactggaggccaagatgttggcccagaaggctgaggaaaaggagaaccattgtcccacaatgctccggcccctttcacatcgcacagtcacaggggcaaagcccctgaaaaaggctgtggtgatgcccctacagctaattcaggagcaggcagcatccccaaatgccgagatccacatcctgaagaataaaggccggaagagaaagctggagtccctggatgccctagagcctgaggagaaggctgaggactgctgggagctacagatcagcccggagctactggctcatgggcgccaaaaaatactggatctgctgaacgaaggctcagcccgagatctccgcagtcttcagcgcattggcccgaagaaggcccagctaatcgtgggctggcgggagctccacggccccttcagccaggtggaggacctggaacgcgtggagggcataacggggaaacagatggagtccttcctgaaggcaaacatcctgggtctcgccgccggccagcgctgtggcgcctcctgaccgtcgtctcctcactccgccttttcaaatttttgtataaccccgtgttgtgtaaatacagtttttgctccggtg

SEQ ID NO: 15400 - DNA, 1709 bp, Homo sapiens
  source 1..1709: mol_type = unassigned DNA
gtggaatggccgcgggcggctcgacgcagcagaggcgacgcgagatggcggcagcttcagcggcggcgatctcaggagctggtcgctgtcggctaagcaagattggagctactcgtcgtccacctccagctcgcgtaagggtggctgtgcgactgcggccatttgtggatggaacagcgggagcaagtgatcccccctgtgtgcggggcatggacagctgctctctagagattgctaactggaggaaccaccaggagactctcaaataccagtttgatgccttctatggggagaggagtactcagcaggacatctatgcaggttcagtgcagcccatcctaaggcacttgctggaagggcagaatgccagtgtgcttgcctatggacccacaggagctgggaagacgcacacaatgctgggcagcccagagcaacctggggtgatcccgcgggctctcatggacctcctgcagctcacaagggaggagggtgccgagggccggccatgggccctttctgtcaccatgtcttacctagagatctaccaggagaaggtattagacctcctggaccctgcttcgggagacctggtaatccgagaagactgccgggggaatatcctgattccgggtctctcccagaagcccatcagtagctttgctgattttgagcggcacttcctgccagccagtcgaaatcggactgtaggagccacccggctcaaccagcgctcctcccgcagtcatgctgtgctcctggtcaaggtggaccagcgggaacgtttggccccatttcgccagcgagagggaaaactctacctgattgacttggctgggtcagaggacaaccggcgcacaggcaacaagggccttcggctaaaagagagtggagccatcaacacctccctgtttgtcctgggcaaagtggtagatgcgctgaatcagggcctccctcgtgtaccttatcgggacagcaagctcactcgcctattgcaggactctctgggtggctcagcccacagtatccttattgccaacattgcccctgagagacgcttctacctagacacagtctccgcactcaactttgctgccaggtccaaggaggtgatcaatcggccttttaccaatgagagcctgcagcctcatgccttgggacctgttaagctgtctcagaaagaattgcttggtccaccagaggcaaagagagcccgaggccctgaggaagaggagatcgggagccctgagcccatggcagctccagcctctgcctcccagaaactcagccccctacagaagctaagcagcatggacccggccatgctggagcgcctcctcagcttggaccgtctgcttgcctcccaggggagccagggggcccctctgttgagtaccccaaagcgagagcggatggtgctaatgaagacagtggaagagaaggacctagagattgagaggcttaagacgaagcaaaaagaactggaggccaagatgttggcccagaaggctgaggaaaaggagaaccattgtcccacaatgctccggcccctttcacatcgcacagtcacaggggcaaagcccctgaaaaaggctgtggtgatgcccctacagctaattcaggagcaggcagcatccccaaatgccgagatccacatcctgaagaataaaggccggaagagaaagggtgctaatattaccactgggtactga

SEQ ID NO: 15401 - DNA, 2495 bp, Homo sapiens
  source 1..2495: mol_type = unassigned DNA
gagtgtggggtcgcgagccggtcgccccgcctggctcctgccttctccctgtttcctgctctccccttgggtcagtagactcgggtctccggtccaggctcttggcttgaaccccgcgcactttttctttgtgagcttcggtttcttcgtctgtgaaacgggggtcatggcctcatccctggagatcacctgaataagcaagagaagagtggcggacgctctagccacgaggacgagaagaagggagccggaggcgtgtattgggaagggttctgtgtgggacatggtgtttgggtgcagagacatccctgagagatgcaagaggacgggctgaggaacagacccggctgctgctgggtttgagttggcagcgtaagatgctctgcgattacaggaaaacgaaataaaagactaaaatttcctttcactctagcatggaagtgaatgctattttagggttggaaaggctgttaggacacccaaaatcttgtatgagctggtcgctgtcggctaagcaagattggagctactcgtcgtccacctccagctcgcgtaagggtggctgtgcgactgcggccatttgtggatggaacagcgggagcaagtgatcccccctgtgtgcggggcatggacagctgctctctagagattgctaactggaggaaccaccaggagactctcaaataccagtttgatgccttctatggggagaggagtactcagcaggacatctatgcaggttcagtgcagcccatcctaaggcacttgctggaagggcagaatgccagtgtgcttgcctatggacccacaggagctgggaagacgcacacaatgctgggcagcccagagcaacctggggtgatcccgcgggctctcatggacctcctgcagctcacaagggaggagggtgccgagggccggccatgggccctttctgtcaccatgtcttacctagagatctaccaggagaaggtattagacctcctggaccctgcttcgggagacctggtaatccgagaagactgccgggggaatatcctgattccgggtctctcccagaagcccatcagtagctttgctgattttgagcggcacttcctgccagccagtcgaaatcggactgtaggagccacccggctcaaccagcgctcctcccgcagtcatgctgtgctcctggtcaaggtggaccagcgggaacgtttggccccatttcgccagcgagagggaaaactctacctgattgacttggctgggtcagaggacaaccggcgcacaggcaacaagggccttcggctaaaagagagtggagccatcaacacctccctgtttgtcctgggcaaagtggtagatgcgctgaatcagggcctccctcgtgtaccttatcgggacagcaagctcactcgcctattgcaggactctctgggtggctcagcccacagtatccttattgccaacattgcccctgagagacgcttctacctagacacagtctccgcactcaactttgctgccaggtccaaggaggtgatcaatcggccttttaccaatgagagcctgcagcctcatgccttgggacctgttaagctgtctcagaaagaattgcttggtccaccagaggcaaagagagcccgaggccctgaggaagaggagatcgggagccctgagcccatggcagctccagcctctgcctcccagaaactcagccccctacagaagctaagcagcatggacccggccatgctggagcgcctcctcagcttggaccgtctgcttgcctcccaggggagccagggggcccctctgttgagtaccccaaagcgagagcggatggtgctaatgaagacagtggaagagaaggacctagagattgagaggcttaagacgaagcaaaaagaactggaggccaagatgttggcccagaaggctgaggaaaaggagaaccattgtcccacaatgctccggcccctttcacatcgcacagtcacaggggcaaagcccctgaaaaaggctgtggtgatgcccctacagctaattcaggagcaggcagcatccccaaatgccgagatccacatcctgaagaataaaggccggaagagaaagctggagtccctggatgccctagagcctgaggagaaggctgaggactgctgggagctacagatcagcccggagctactggctcatgggcgccaaaaaatactggatctgctgaacgaaggctcagcccgagatctccgcagtcttcagcgcattggcccgaagaaggcccagctaatcgtgggctggcgggagctccacggccccttcagccaggtggaggacctggaacgcgtggagggcataacggggaaacagatggagtccttcctgaaggcaaacatcctgggtctcgccgccggccagcgctgtggcgcctcctgaccgtcgtctcctcactccgccttttcaaatttttgtataaccccgtgttgtgtaaatacagtttttgctccggt

SEQ ID NO: 15402 - DNA, 2505 bp, Homo sapiens
  source 1..2505: mol_type = unassigned DNA
gggaattcgaatgggagaggcgggcccaaggagggagtggaatggccgcgggcggctcgacgcagcagaggcgacgcgagatggcggcagcttcagcggcggcgatctcaggtacttgagcccggcctgggcaaggcgggtaccgacgtctggagtttagtgggagttatgtgtcggagtgtggtccaggctctgcgggttgtcgcggagaggcggccatggcgcaggggcggggagagggggacggtgagagtgtggggtcgcgagccggtcgccccgcctggctcctgccttctccctgtttcctgctctccccttgggtcagtagactcgggtctccggtccaggctcttggcttgaaccccgcgcactttttctttgtgagcttcggtttcttcgtctgtgaaacgggggtcatggcctcatccctggagatcacctgaataagcaagagaagagtggcggacgctctagccacgaggacgagaagaagggagccggaggagctggtcgctgtcggctaagcaagattggagctactcgtcgtccacctccagctcgcgtaagggtggctgtgcgactgcggccatttgtggatggaacagcgggagcaagtgatcccccctgtgtgcggggcatggacagctgctctctagagattgctaactggaggaaccaccaggagactctcaaataccagtttgatgccttctatggggagaggagtactcagcaggacatctatgcaggttcagtgcagcccatcctaaggcacttgctggaagggcagaatgccagtgtgcttgcctatggacccacaggagctgggaagacgcacacaatgctgggcagcccagagcaacctggggtgatcccgcgggctctcatggacctcctgcagctcacaagggaggagggtgccgagggccggccatgggccctttctgtcaccatgtcttacctagagatctaccaggagaaggtattagacctcctggaccctgcttcgggagacctggtaatccgagaagactgccgggggaatatcctgattccgggtctctcccagaagcccatcagtagctttgctgattttgagcggcacttcctgccagccagtcgaaatcggactgtaggagccacccggctcaaccagcgctcctcccgcagtcatgctgtgctcctggtcaaggtggaccagcgggaacgtttggccccatttcgccagcgagagggaaaactctacctgattgacttggctgggtcagaggacaaccggcgcacaggcaacaagggccttcggctaaaagagagtggagccatcaacacctccctgtttgtcctgggcaaagtggtagatgcgctgaatcagggcctccctcgtgtaccttatcgggacagcaagctcactcgcctattgcaggactctctgggtggctcagcccacagtatccttattgccaacattgcccctgagagacgcttctacctagacacagtctccgcactcaactttgctgccaggtccaaggaggtgatcaatcggccttttaccaatgagagcctgcagcctcatgccttgggacctgttaagctgtctcagaaagaattgcttggtccaccagaggcaaagagagcccgaggccctgaggaagaggagatcgggagccctgagcccatggcagctccagcctctgcctcccagaaactcagccccctacagaagctaagcagcatggacccggccatgctggagcgcctcctcagcttggaccgtctgcttgcctcccaggggagccagggggcccctctgttgagtaccccaaagcgagagcggatggtgctaatgaagacagtggaagagaaggacctagagattgagaggcttaagacgaagcaaaaagaactggaggccaagatgttggcccagaaggctgaggaaaaggagaaccattgtcccacaatgctccggcccctttcacatcgcacagtcacaggggcaaagcccctgaaaaaggctgtggtgatgcccctacagctaattcaggagcaggcagcatccccaaatgccgagatccacatcctgaagaataaaggccggaagagaaagctggagtccctggatgccctagagcctgaggagaaggctgaggactgctgggagctacagatcagcccggagctactggctcatgggcgccaaaaaatactggatctgctgaacgaaggctcagcccgagatctccgcagtcttcagcgcattggcccgaagaaggcccagctaatcgtgggctggcgggagctccacggccccttcagccaggtggaggacctggaacgcgtggagggcataacggggaaacagatggagtccttcctgaaggcaaacatcctgggtctcgccgccggccagcgctgtggcgcctcctgaccgtcgtctcctcactccgccttttcaaatttttgtataaccccgtgttgtgtaaatacagtttttgctccggt

SEQ ID NO: 15403 - DNA, 3610 bp, Homo sapiens
  source 1..3610: mol_type = unassigned DNA
gcagagcaccgcgccttagccgcgaagttctagttcttgctgccggtcctaacgtcccgcagtcttcgccagccagccgtcccgcatgcgcgtttgggcggcgtggagcctgctgccatgaagtcagcgagagctaagacaccccggaaacctaccgtgaaaaaagggtcccaaacgaaccttaaagacccagttggggtatactgtagggtgcgcccactgggctttcctgatcaagagtgttgcatagaagtgatcaataatacaactgttcagcttcatactcctgagggctacagactcaaccgaaatggagactataaggagactcagtattcatttaaacaagtatttggcactcacaccacccagaaggaactctttgatgttgtggctaatcccttggtcaatgacctcattcatggcaaaaatggtcttctttttacatatggtgtgacgggaagtggaaaaactcacacaatgactggttctccaggggaaggagggctgcttcctcgttgtttggacatgatctttaacagtatagggtcatttcaagctaaacgatatgttttcaaatctaatgataggaatagtatggatatacagtgtgaggttgatgccttattagaacgtcagaaaagagaagctatgcccaatccaaagacttcttctagcaaacgacaagtagatccagagtttgcagatatgataactgtacaagaattctgcaaagcagaagaggttgatgaagatagtgtctatggtgtatttgtctcttatattgaaatatataataattacatatatgatctattggaagaggtgccgtttgatcccataaaacccaaacctccacaatctaaattgcttcgtgaagataagaaccataacatgtatgttgcaggatgtacagaagttgaagtgaaatctactgaggaggcttttgaagttttctggagaggccagaaaaagagacgtattgctaatacccatttgaatcgtgagtccagccgttcccatagcgtgttcaacattaaattagttcaggctcccttggatgcagatggagacaatgtcttacaggaaaaagaacaaatcactataagtcagttgtccttggtagatcttgctggaagtgaaagaactaaccggaccagagcagaagggaacagattacgtgaagctggtaatattaatcagtcactaatgacgctaagaacatgtatggatgtcctaagagagaaccaaatgtatggaactaacaagatggttccatatcgagattcaaagttaacccatctgttcaagaactactttgatggggaaggaaaagtgcggatgatcgtgtgtgtgaaccccaaggctgaagattatgaagaaaacttgcaagtcatgagatttgcggaagtgactcaagaagttgaagtagcaagacctgtagacaaggcaatatgtggtttaacgcctgggaggagatacagaaaccagcctcgaggtccagttggaaatgaaccattggttactgacgtggttttgcagagttttccacctttgccatcatgcgaaattttggatatcaacgatgagcagacacttccaaggctgattgaagccttagagaaacgacataacttacgacaaatgatgattgatgagtttaacaaacaatctaatgcttttaaagctttgttacaagaatttgacaatgctgttttaagtaaagaaaaccacatgcaagggaaactaaatgaaaaggagaagatgatctcaggacagaaattggaaatagaacgactggaaaagaaaaacaaaactttagaatataagattgagattttagagaaaacaactactatctatgaggaagataaacgcaatttgcaacaggaacttgaaactcagaaccagaaacttcagcgacagttttctgacaaacgcagattagaagccaggttgcaaggcatggtgacagaaacgacaatgaagtgggagaaagaatgtgagcgtagagtggcagccaaacagctggagatgcagaataaactctgggttaaagatgaaaagctgaaacaactgaaggctattgttaccgaacctaaaactgagaagccagagagaccctctcgggagcgagatcgagaaaaagttactcaaagatctgtttctccatcacctgtgcctctttctagtaactatattgctcagatttccaacggccagcaactcatgagccagccacagctacataggcgctctaactcttgcagcagcatttctgtagcttcctgtatttcggaatgggagcagaaaattcctacgtacaacacacctctcaaagtcacatctattgcaaggcgtaggcagcaggagccaggacaaagcaaaacttgtatcgtgtcagacagaaggcgagggatgtactggactgaaggcagggaggtggttcctacattcagaaatgagatagaaatagaagaggatcattgcggcaggttactctttcaacctgatcagaacgcaccaccaattcgtctccgacacagacgatcacgctctgcaggagacagatgggtagatcataagcccgcctctaacatgcaaactgaaacagtcatgcagccacatgtccctcatgccatcacagtatctgttgcaaatgaaaaggcactagctaagtgtgagaagtacatgctgacccaccaggaactagcctccgatggggagattgaaactaaactaattaagggtgatatttataaaacaaggggtggtggacaatctgttcagtttactgatattgagactttaaagcaagaatcaccaaatggtagtcgaaaacgaagatcttccacagtagcacctgcccaaccagatggtgcagagtctgaatggaccgatgtagaaacaaggtgttctgtggctgtggagatgagagcaggatcccagctgggacctggatatcagcatcacgcacaacccaagcgcaaaaagccatgaactgacagtcccagtactgaaagaacattttcatttgtgtggatgatttctcgaaagccatgccagaagcagtcttccaggtcatcttgtagaactccagctttgttgaaaatcacggacctcagctacatcatacactgacccagagcaaagctttccctatggttccaaagacaactagtattcaacaaaccttgtatagtatatgttttgccatatttaatattaatagcagaggaagactccttttttcatcactgtatgaattttttataatgtttttttaaaatatatttcatgtatacttataaactaattcacacaagtgtttgtcttagatgattaaggaagactatatctagatcatgtctgattttttattgtgacttctccagccctggtctgaatttcttaaggttttataaacaaatgctgctatttattagctgcaagaatgcactttagaactatttgacaattcagactttcaaaataaagatgtaaatgactggccaataataaccattttaggaaggtgttttgaattctgtatgtatatattcactttctgacatttagatatgccaaaagaattaaaatcaaaagcact

SEQ ID NO: 15404 - DNA, 2181 bp, Homo sapiens
  source 1..2181: mol_type = unassigned DNA
ttgaacttttctttttttagacgacaagtagatccagagtttgcagatatgataactgtacaagaattctgcaaagcagaagaggttgatgaagatagtgtctatggtgtatttgtctcttatattgaaatatataataattacatatatgatctattggaagaggtgccgtttgatcccataaaacccaagtggaacagttgcagcacacccatgaggaacacagattttgtacctccacaatctaaattgcttcgtgaagataagaaccataacatgtatgttgcaggatgtacagaagttgaagtgaaatctactgaggaggcttttgaagttttctggagaggccagaaaaagagacgtattgctaatacccatttgaatcgtgagtccagccgttcccatagcgtgttcaacattaaattagttcaggctcccttggatgcagatggagacaatgtcttacaggaaaaagaacaaatcactataagtcagttgtccttggtagatcttgctggaagtgaaagaactaaccggaccagagcagaagggaacagattacgtgaagctggtaatattaatcagtcactaatgacgctaagaacatgtatggatgtcctaagagagaaccaaatgtatggaactaacaagatggttccatatcgagattcaaagttaacccatctgttcaagaactactttgatggggaaggaaaagtgcggatgatcgtgtgtgtgaaccccaaggctgaagattatgaagaaaacttgcaagtcatgagatttgcggaagtgactcaagaagttgaagtagcaagacctgtagacaaggcaatatgtggtttaacgcctgggaggagatacagaaaccagcctcgaggtccagttggaaatgaaccattggttactgacgtggttttgcagagttttccacctttgccatcatgcgaaattttggatatcaacgatgagcagacacttccaaggctgattgaagccttagagaaacgacataacttacgacaaatgatgattgatgagtttaacaaacaatctaatgcttttaaagctttgttacaagaatttgacaatgctgttttaagtaaagaaaaccacatgcaagggaaactaaatgaaaaggagaagatgatctcaggacagaaattggaaatagaacgactggaaaagaaaaacaaaactttagaatataagattgagattttagagaaaacaactactatctatgaggaagataaacgcaatttgcaacaggaacttgaaactcagaaccagaaacttcagcgacagttttctgacaaacgcagattagaagccaggttgcaaggcatggtgacagaaacgacaatgaagtgggagaaagaatgtgagcgtagagtggcagccaaacagctggagatgcagaataaactctgggttaaagatgaaaagctgaaacaactgaaggctattgttaccgaacctaaaactgagaagccagagagaccctctcgggagcgagatcgagaaaaagttactcaaagatctgtttctccatcacctgtgcctttactctttcaacctgatcagaacgcaccaccaattcgtctccgacacagacgatcacgctctgcaggagacagatgggtagatcataagcccgcctctaacatgcaaactgaaacagtcatgcagccacatgtccctcatgccatcacagtatctgttgcaaatgaaaaggcactagctaagtgtgagaagtacatgctgacccaccaggaactagcctccgatggggagattgaaactaaactaattaagggtgatatttataaaacaaggggtggtggacaatctgttcagtttactgatattgagactttaaagcaagaatcaccaaatggtagtcgaaaacgaagatcttccacagtagcacctgcccaaccagatggtgcagagtctgaatggaccgatgtagaaacaaggtgttctgtggctgtggagatgagagcaggatcccagctgggacctggatatcagcatcacgcacaacccaagcgcaaaaagccatgaactgacagtcccagtactgaaagaacattttcatttgtgtggatgatttctcgaaagccatgccagaagcagtcttccaggtcatcttgtagaactccagctttgttgaaa

SEQ ID NO: 15405 - DNA, 2296 bp, Homo sapiens
  source 1..2296: mol_type = unassigned DNA
aaacgatcctcctgcctcagcccccctagtagctgggattagaggcacacgccaccatgcccggctaatttgtatttttagtagagacggggtttcaccatgttggccaggctggtcttgagttcctgatctcagacgacaagtagatccagagtttgcagatatgataactgtacaagaattctgcaaagcagaagaggttgatgaagatagtgtctatggtgtatttgtctcttatattgaaatatataataattacatatatgatctattggaagaggtgccgtttgatcccataaaacccaagtggaacagttgcagcacacccatgaggaacacagattttgtacctccacaatctaaattgcttcgtgaagataagaaccataacatgtatgttgcaggatgtacagaagttgaagtgaaatctactgaggaggcttttgaagttttctggagaggccagaaaaagagacgtattgctaatacccatttgaatcgtgagtccagccgttcccatagcgtgttcaacattaaattagttcaggctcccttggatgcagatggagacaatgtcttacaggaaaaagaacaaatcactataagtcagttgtccttggtagatcttgctggaagtgaaagaactaaccggaccagagcagaagggaacagattacgtgaagctggtaatattaatcagtcactaatgacgctaagaacatgtatggatgtcctaagagagaaccaaatgtatggaactaacaagatggttccatatcgagattcaaagttaacccatctgttcaagaactactttgatggggaaggaaaagtgcggatgatcgtgtgtgtgaaccccaaggctgaagattatgaagaaaacttgcaagtcatgagatttgcggaagtgactcaagaagttgaagtagcaagacctgtagacaaggcaatatgtggtttaacgcctgggaggagatacagaaaccagcctcgaggtccagttggaaatgaaccattggttactgacgtggttttgcagagttttccacctttgccatcatgcgaaattttggatatcaacgatgagcagacacttccaaggctgattgaagccttagagaaacgacataacttacgacaaatgatgattgatgagtttaacaaacaatctaatgcttttaaagctttgttacaagaatttgacaatgctgttttaagtaaagaaaaccacatgcaagggaaactaaatgaaaaggagaagatgatctcaggacagaaattggaaatagaacgactggaaaagaaaaacaaaactttagaatataagattgagattttagagaaaacaactactatctatgaggaagataaacgcaatttgcaacaggaacttgaaactcagaaccagaaacttcagcgacagttttctgacaaacgcagattagaagccaggttgcaaggcatggtgacagaaacgacaatgaagtgggagaaagaatgtgagcgtagagtggcagccaaacagctggagatgcagaataaactctgggttaaagatgaaaagctgaaacaactgaaggctattgttaccgaacctaaaactgagaagccagagagaccctctcgggagcgagatcgagaaaaagttactcaaagatctgtttctccatcacctgtgcctttactctttcaacctgatcagaacgcaccaccaattcgtctccgacacagacgatcacgctctgcaggagacagatgggtagatcataagcccgcctctaacatgcaaactgaaacagtcatgcagccacatgtccctcatgccatcacagtatctgttgcaaatgaaaaggcactagctaagtgtgagaagtacatgctgacccaccaggaactagcctccgatggggagattgaaactaaactaattaagggtgatatttataaaacaaggggtggtggacaatctgttcagtttactgatattgagactttaaagcaagaatcaccaaatggtagtcgaaaacgaagatcttccacagtagcacctgcccaaccagatggtgcagagtctgaatggaccgatgtagaaacaaggtgttctgtggctgtggagatgagagcaggatcccagctgggacctggatatcagcatcacgcacaacccaagcgcaaaaagccatgaactgacagtcccagtactgaaagaacattttcatttgtgtggatgatttctcgaaagccatgccagaagcagtcttccaggtcatcttgtagaactccagctttgttgaaa

SEQ ID NO: 15406 - DNA, 3409 bp, Homo sapiens
  source 1..3409: mol_type = unassigned DNA
ttccgcggaggtcctgcctctccctgcggacgggcgctgattggcccgtttgaaatgcgccaggcgggagctcacctgggctcttagcgtcgccgccggcttcgcagagcaccgcgccttagccgcgaagttctagttcttgctgccggtcctaacgtcccgcagtcttcgccagccagccgtcccgcatgcgcgtttgggcggcgtggagcctgctgccatgaagtcagcgagagctaagacaccccggaaacctaccgtgaaaaaagggtcccaaacgaaccttaaagacccagttggggtatactgtagggtgcgcccactgggctttcctgatcaagagtgttgcatagaagtgatcaataatacaactgttcagcttcatactcctgagggctacagactcaaccgaaatggagactataaggagactcagtattcatttaaacaagtatttggcactcacaccacccagaaggaactctttgatgttgtggctaatcccttggtcaatgacctcattcatggcaaaaatggtcttctttttacatatggtgtgacgggaagtggaaaaactcacacaatgactggttctccaggggaaggagggctgcttcctcgttgtttggacatgatctttaacagtatagggtcatttcaagctaaacgatatgttttcaaatctaatgataggaatagtatggatatacagtgtgaggttgatgccttattagaacgtcagaaaagagaagctatgcccaatccaaagacttcttctagcaaacgacaagtagatccagagtttgcagatatgataactgtacaagaattctgcaaagcagaagaggttgatgaagatagtgtctatggtgtatttgtctcttatattgaaatatataataattacatatatgatctattggaagaggtgccgtttgatcccataaaacccaaacctccacaatctaaattgcttcgtgaagataagaaccataacatgtatgttgcaggatgtacagaagttgaagtgaaatctactgaggaggcttttgaagttttctggagaggccagaaaaagagacgtattgctaatacccatttgaatcgtgagtccagccgttcccatagcgtgttcaacattaaattagttcaggctcccttggatgcagatggagacaatgtcttacaggaaaaagaacaaatcactataagtcagttgtccttggtagatcttgctggaagtgaaagaactaaccggaccagagcagaagggaacagattacgtgaagctggtaatattaatcagtcactaatgacgctaagaacatgtatggatgtcctaagagagaaccaaatgtatggaactaacaagatggttccatatcgagattcaaagttaacccatctgttcaagaactactttgatggggaaggaaaagtgcggatgatcgtgtgtgtgaaccccaaggctgaagattatgaagaaaacttgcaagtcatgagatttgcggaagtgactcaagaagttgaagtagcaagacctgtagacaaggcaatatgtggtttaacgcctgggaggagatacagaaaccagcctcgaggtccagttggaaatgaaccattggttactgacgtggttttgcagagttttccacctttgccatcatgcgaaattttggatatcaacgatgagcagacacttccaaggctgattgaagccttagagaaacgacataacttacgacaaatgatgattgatgagtttaacaaacaatctaatgcttttaaagctttgttacaagaatttgacaatgctgttttaagtaaagaaaaccacatgcaagggaaactaaatgaaaaggagaagatgatctcaggacagaaattggaaatagaacgactggaaaagaaaaacaaaactttagaatataagattgagattttagagaaaacaactactatctatgaggaagataaacgcaatttgcaacaggaacttgaaactcagaaccagaaacttcagcgacagttttctgacaaacgcagattagaagccaggttgcaaggcatggtgacagaaacgacaatgaagtgggagaaagaatgtgagcgtagagtggcagccaaacagctggagatgcagaataaactctgggttaaagatgaaaagctgaaacaactgaaggctattgttaccgaacctaaaactgagaagccagagagaccctctcgggagcgagatcgagaaaaagttactcaaagatctgtttctccatcacctgtgcctttactctttcaacctgatcagaacgcaccaccaattcgtctccgacacagacgatcacgctctgcaggagacagatgggtagatcataagcccgcctctaacatgcaaactgaaacagtcatgcagccacatgtccctcatgccatcacagtatctgttgcaaatgaaaaggcactagctaagtgtgagaagtacatgctgacccaccaggaactagcctccgatggggagattgaaactaaactaattaagggtgatatttataaaacaaggggtggtggacaatctgttcagtttactgatattgagactttaaagcaagaatcaccaaatggtagtcgaaaacgaagatcttccacagtagcacctgcccaaccagatggtgcagagtctgaatggaccgatgtagaaacaaggtgttctgtggctgtggagatgagagcaggatcccagctgggacctggatatcagcatcacgcacaacccaagcgcaaaaagccatgaactgacagtcccagtactgaaagaacattttcatttgtgtggatgatttctcgaaagccatgccagaagcagtcttccaggtcatcttgtagaactccagctttgttgaaaatcacggacctcagctacatcatacactgacccagagcaaagctttccctatggttccaaagacaactagtattcaacaaaccttgtatagtatatgttttgccatatttaatattaatagcagaggaagactccttttttcatcactgtatgaattttttataatgtttttttaaaatatatttcatgtatacttataaactaattcacacaagtgtttgtcttagatgattaaggaagactatatctagatcatgtctgattttttattgtgacttctccagccctggtctgaatttcttaaggttttataaacaaatgctgctatttattagctgcaagaatgcactttagaactatttgacaattcagactttcaaaataaagatgtaaatgactggccaataataaccattttaggaaggtgttttgaattctgtatgtatatattcactttctgacatttagatatgccaaaagaattaaaatcaaaagcactaagaaata

SEQ ID NO: 15407 - DNA, 3493 bp, Homo sapiens
  source 1..3493: mol_type = unassigned DNA
caggagagctaagacaccccggaaacctaccgtgaaaaaagggtcccaaacgaaccttaaagacccagttggggtatactgtagggtgcgcccactgggctttcctgatcaagagtgttgcatagaagtgatcaataatacaactgttcagcttcatactcctgagggctacagactcaaccgaaatggagactataaggagactcagtattcatttaaacaagtatttggcactcacaccacccagaaggaactctttgatgttgtggctaatcccttggtcaatgacctcattcatggcaaaaatggtcttctttttacatatggtgtgacgggaagtggaaaaactcacacaatgactggttctccaggggaaggagggctgcttcctcgttgtttggacatgatctttaacagtatagggtcatttcaagctaaacgatatgttttcaaatctaatgataggaatagtatggatatacagtgtgaggttgatgccttattagaacgtcagaaaagagaagctatgcccaatccaaagacttcttctagcaaacgacaagtagatccagagtttgcagatatgataactgtacaagaattctgcaaagcagaagaggttgatgaagatagtgtctatggtgtatttgtctcttatattgaaatatataataattacatatatgatctattggaagaggtgccgtttgatcccataaaacccaaacctccacaatctaaattgcttcgtgaagataagaaccataacatgtatgttgcaggatgtacagaagttgaagtgaaatctactgaggaggcttttgaagttttctggagaggccagaaaaagagacgtattgctaatacccatttgaatcgtgagtccagccgttcccatagcgtgttcaacattaaattagttcaggctcccttggatgcagatggagacaatgtcttacaggaaaaagaacaaatcactataagtcagttgtccttggtagatcttgctggaagtgaaagaactaaccggaccagagcagaagggaacagattacgtgaagctggtaatattaatcagtcactaatgacgctaagaacatgtatggatgtcctaagagagaaccaaatgtatggaactaacaagatggttccatatcgagattcaaagttaacccatctgttcaagaactactttgatggggaaggaaaagtgcggatgatcgtgtgtgtgaaccccaaggctgaagattatgaagaaaacttgcaagtcatgagatttgcggaagtgactcaagaagttgaagtagcaagacctgtagacaaggcaatatgtggtttaacgcctgggaggagatacagaaaccagcctcgaggtccagttggaaatgaaccattggttactgacgtggttttgcagagttttccacctttgccatcatgcgaaattttggatatcaacgatgagcagacacttccaaggctgattgaagccttagagaaacgacataacttacgacaaatgatgattgatgagtttaacaaacaatctaatgcttttaaagctttgttacaagaatttgacaatgctgttttaagtaaagaaaaccacatgcaagggaaactaaatgaaaaggagaagatgatctcaggacagaaattggaaatagaacgactggaaaagaaaaacaaaactttagaatataagattgagattttagagaaaacaactactatctatgaggaagataaacgcaatttgcaacaggaacttgaaactcagaaccagaaacttcagcgacagttttctgacaaacgcagattagaagccaggttgcaaggcatggtgacagaaacgacaatgaagtgggagaaagaatgtgagcgtagagtggcagccaaacagctggagatgcagaataaactctgggttaaagatgaaaagctgaaacaactgaaggctattgttaccgaacctaaaactgagaagccagagagaccctctcgggagcgagatcgagaaaaagttactcaaagatctgtttctccatcacctgtgcctctttctagtaactatattgctcagatttccaacggccagcaactcatgagccagccacagctacataggcgctctaactcttgcagcagcatttctgtagcttcctgtatttcggaatgggagcagaaaattcctacgtacaacacacctctcaaagtcacatctattgcaaggcgtaggcagcaggagccaggacaaagcaaaacttgtatcgtgtcagacagaaggcgagggatgtactggactgaaggcagggaggtggttcctacattcagaaatgagatagaaatagaagaggatcattgcggcaggttactctttcaacctgatcagaacgcaccaccaattcgtctccgacacagacgatcacgctctgcaggagacagatgggtagatcataagcccgcctctaacatgcaaactgaaacagtcatgcagccacatgtccctcatgccatcacagtatctgttgcaaatgaaaaggcactagctaagtgtgagaagtacatgctgacccaccaggaactagcctccgatggggagattgaaactaaactaattaagggtgatatttataaaacaaggggtggtggacaatctgttcagtttactgatattgagactttaaagcaagaatcaccaaatggtagtcgaaaacgaagatcttccacagtagcacctgcccaaccagatggtgcagagtctgaatggaccgatgtagaaacaaggtgttctgtggctgtggagatgagagcaggatcccagctgggacctggatatcagcatcacgcacaacccaagcgcaaaaagccatgaactgacagtcccagtactgaaagaacattttcatttgtgtggatgatttctcgaaagccatgccagaagcagtcttccaggtcatcttgtagaactccagctttgttgaaaatcacggacctcagctacatcatacactgacccagagcaaagctttccctatggttccaaagacaactagtattcaacaaaccttgtatagtatatgttttgccatatttaatattaatagcagaggaagactccttttttcatcactgtatgaattttttataatgtttttttaaaatatatttcatgtatacttataaactaattcacacaagtgtttgtcttagatgattaaggaagactatatctagatcatgtctgattttttattgtgacttctccagccctggtctgaatttcttaaggttttataaacaaatgctgctatttattagctgcaagaatgcactttagaactatttgacaattcagactttcaaaataaagatgtaaatgactggccaataataaccattttaggaaggtgttttgaattctgtatgtatatattcactttctgacatttagatatgccaaaagaattaaaatcaaaagcactaagaaata

SEQ ID NO: 15408 - DNA, 5824 bp, Homo sapiens
  source 1..5824: mol_type = unassigned DNA
gacgggactgttaggttgcgggctttggggctcactcccgacggcattgtcttctcctcttctcagacagggcagaccgaggagtttggaccgagagtttatagaaacctattcaccaaaatggcatcctggttatatgaatgtctttgtgaagctgaacttgcacagtattattctcatttcactgcccttggccttcagaaaatagatgaattagccaagattacaatgaaggactactccaaattaggagtccatgacatgaacgaccgcaaacgtctcttccaacttatcaaaattattaagattatgcaagaagaagataaagcagtcagtatcccagagcgtcatcttcagacaagcagcctgcgcatcaaatctcaggaattaagatctggccctcgcagacagctgaattttgattctcctgctgacaataaagacagaaatgccagcaatgatgggtttgaaatgtgcagtttatcagatttctctgcaaatgaacagaagtccacttacctaaaagtgctagaacacatgctaccagatgattcccagtaccatacaaaaacaggaattctgaatgccacagctggtgattcctatgtgcaaacagaaatcagcacttcactcttttcaccaaattacctttctgcaatactgggggattgtgatattcccattattcaaagaatctctcatgtttcagggtataactatggaatccctcattcttgtatcagacagaacacttcagagaaacagaatccttggactgagatggagaaaatcagagtttgtgttcgaaaacgccccctgggcatgagggaggtacgtcgtggagaaattaatattattactgtagaagacaaagaaactctacttgtgcatgagaagaaagaagcagttgacctcactcaatatattctgcaggtgatcttaaagggcagcaaggagcgcagcactggggccactggagttaatgcagactcctcccgctcccatgccgtcatccaaattcagatcaaagattcagccaagaggacatttggcaggatctcttttattgacttggctggcagtgaaagagcagcagatgcaagggactcagatagacagacaaagatggaaggtgcagaaataaatcagagtctactggctctgaaggaatgtatccgagcactggatcaggaacacacccatactcccttcaggcaaagcaaactaactcaggtcctgaaggactctttcatcggcaatgccaaaacctgcatgatcgccaacatctcaccaagccacgtggccactgaacacactctcaacaccttgcgctatgctgaccgggtcaaagaactaaagaaaggcattaagtgttgcacttcagttaccagtcgaaatcggacatctggaaactcctctccaaaacgaattcagagctcccctggggctttgtcagaggacaaatgttctcccaaaaaagtcaagctgggatttcagcagtcactcacagtggcagcccctggttccacgagagggaaggtccatcctctgaccagccacccacccaacattccttttacttctgcacctaaggtctctggtaaaaggggtggctccagagggagtccttcacaagagtgggtcattcatgctagccctgtgaaaggaactgtgcgctctggacatgtggccaaaaaaaagccagaagagtcagcaccattgtgctctgagaaaaatcgaatgggcaacaaaactgtccttgggtgggaaagcagggcctcaggcccaggagaaggcctagtgcgtggtaagctgtccaccaagtgcaagaaagtgcagacagtgcagccagtacagaagcagcttgtgtctcgagttgagctctcctttggcaacgcccaccacagggctgagtacagtcaagacagccagaggggcacgcctgctaggcctgcctctgaagcttggacaaacatcccgccacatcagaaggagagggaggaacatctgcgtttctatcaccagcagttccaacagccacctctcctccaacagaagttaaaataccaaccactgaaaaggtctttacgccagtacaggcccccagagggtcagctcacgaatgagactccgcctctgttccactcttactctgaaaaccatgatggagcccaagtagaggaacttgatgacagtgatttcagtgaagattctttttcacacatctctagtcagagggccacaaagcaaaggaacaccctggagaatagcgaagactcattcttcctgcaccagacgtggggacagggtcctgagaagcaggtggcagaaagacagcagagtctgttttctagccccaggacaggtgacaagaaagatctaactaaaagctgggtggactccagggaccccataaaccacagaagagcagcactcgatcacagctgcagcccaagtaaggggcccgtggactggagcagagagaactctacttcctcagggccttctcccagagacagcctggcagagaagccatactgttcacaggtagatttcatatatagacaggaaagaggtggaggctcttcctttgatctcagaaaggatgcctcccaaagtgaggtttctggggagaatgagggcaacttgccatccccagaggaagatggtttcactatctcattgtcccacgttgcagttcctggatccccagaccaaagagacacagtcaccacacctctgagagaagtcagtgcagacggcccaatccaggtgaccagcactgtgaaaaacggtcatgctgtcccaggagaggatcctagggggcagttaggcacgcatgctgaatatgcttctggactcatgtctcccctcaccatgtccctcctggagaacccagacaacgaagggtctcctccctcggagcagctggtccaggatggggctacgcacagtctagtggcagagagcacagggggcccagttgtgagccacacagtgccatctggtgatcaagaggcagccttgccagtgtcttcagcaactaggcacctgtggctgtcctcatctccccctgataataagcctggtggtgatcttccagctctgtccccatcacccatccgtcagcacccagctgacaagctgcccagcagggaggcagacctaggagaggcctgccagagcagagagactgtacttttctcccacgaacacatgggtagtgagcagtatgatgctgatgcagaggagacggggctggatggctcctggggtttcccaggaaagcccttcaccaccatacatatgggggtaccccattctggacctacactcaccccacgaacaggaagtagtgatgtggctgaccagctctgggcccaggagagaaaacatcctacaaggcttggttggcaggagtttggtttgtccacagaccccatcaagttgccctgcaacagtgaaaatgtcacatggctcaaacccaggccgatctcaaggtgcttagcaaggccaagttctcccttggttcccagctgctctcccaagactgcagggacactccgtcagcccaccctggagcaagcgcagcaggtggtcatccgagcacaccaggaacagctggatgaaatggctgagctcggcttcaaggaggagacgctgatgagccagctggcttctaatgattttgaagattttgtgacccagctggatgaaatcatggttctgaaatccaagtgtatccagagtctgaggagccagctgcagctctatctcacctgccacgggcccaccgcagcccctgagggaacagtgccgtcttagagccagaccctgtgccgagatggtgggggccctgcaggagtctgtgctgggctctcaggctggaggagcctctgccaggtcctccctgcacacaccagaacccacacgctggtcctgcctatgctagcgtcaccccagccccacgtggcttcagataggtcccagcttctccctcagggacaggcccctgtccctcagttccatgcacaggagtgcctccaagggtgggccaggccgaagaacctaatgcctttcccttgtgcctagagaatatgattaactaaccccttgcctgtgggaatatatttgggtctaataaccctgaagtttctaagtttggggatcagaggatggggtggtcagtggtagcctagaggtcagaggtcacaagacagagaagacaacatgctgagaccagaggcttcaccagctgaattctgtgcctaacttagaagactaaacactggcccaaacttaaccattggtgctagggggacaggggtggggtgagctctgccccatcagcccttggagattgatttggggatttagaggcgtttttgaaaatgtaaatagcataaaccttgacttgatgtgtcactgacagcagcagatgtgagacaggccttatatttacagctcccttcccttcctgcaatccagtgttgaggcagaagagggtgcctgtgtcacacatcaatttttctcctgacttttgctcgggtgaaaggcctctgtacaatgcccgatactctcatgcttccatggcagctcctggctcctatctgggacacctcactacccagccccctcatggaatagtccatctcctagcctggccttcatccagttcaccctgcccagccaccctgcctctcaggggtctgtgttgggaaccttggcagttgaacagagtgctctgttcaacagtctgaggcctctgaaacagaattcacacacaaaccttcagccaagttctgcctgctgtgtatctttttagcaggaagcagctcaggacagggaagacaaagtagcctccaggtgccaattactttaaagccactctgggtcaaatggagattcatgagtcacggccttggcccgaacgcccattactatgtgagcctttatttccttcagataaaggataactttttacggttttaaaaggagggcttaattaaaaggccaagaagagggttaaatggctctcttgagacactagcagcctggtccagtcaccctttgtcagcctgacagtgcctcatctgaccgccagggggcatccttattggtgcttcccggctgcagggcactgcggcccctccctcacatgatcactaaaaaccttcaaagacccagtctagccaaaagctcaagtgggacaatggcacagtattaaggtcaaggacaaaaacttacttactttaggaatgaaccctattctatcatcatatacaacagcaccactgagagctggtgaaacagtttaaatcccatcctctgcttgtggcaaatgatgcataaatgcctgctgctcacagtaaaagggcttcttcctcttttactgggtgatccccctgaaggcccagcctatcccaactccacagtcaggaaggcctacgtccttggtccacagacggagctgggccaggtttaaaagactcagtctaggcttgcctttgcaaaccaaaaacgaggacaggtctgaagtgggaagaaagctccgaaatagaaaacggttaggtcctattctatccccagcaaatctaagcaagaaatctctttatacaccacatggcccccccactcccataaaacagccttggtaataaagaagttatcacaccaagacataccttttagatttttattagtagttctctctgaagaatcaaaatagttagttagcaaattattttagattcaagactgtatatcctttgtatttagatctttaatgatgtacaacataatacaaaacaaaccagagagactg

SEQ ID NO: 15409 - DNA, 6226 bp, Homo sapiens
  source 1..6226: mol_type = unassigned DNA
gacgggactgttaggttgcgggctttggggctcactcccgacggcattgtcttctcctcttctcagacagggcagaccgaggagtttggaccgagagtttatagaaacctattcaccaaaatggcatcctggttatatgaatgtctttgtgaagctgaacttgcacagtattattctcatttcactgcccttggccttcagaaaatagatgaattagccaagattacaatgaaggactactccaaattaggagtccatgacatgaacgaccgcaaacgtctcttccaacttatcaaaattattaagattatgcaagaagaagataaagcagtcagtatcccagagcgtcatcttcagacaagcagcctgcgcatcaaatctcaggaattaagatctggccctcgcagacagctgaattttgattctcctgctgacaataaagacagaaatgccagcaatgatgggtttgaaatgtgcagtttatcagatttctctgcaaatgaacagaagtccacttacctaaaagtgctagaacacatgctaccagatgattcccagtaccatacaaaaacaggaattctgaatgccacagctggtgattcctatgtgcaaacagaaatcagcacttcactcttttcaccaaattacctttctgcaatactgggggattgtgatattcccattattcaaagaatctctcatgtttcagggtataactatggaatccctcattcttgtatcagacagaacacttcagagaaacagaatccttggactgagatggagaaaatcagagtttgtgttcgaaaacgccccctgggcatgagggaggtacgtcgtggagaaattaatattattactgtagaagacaaagaaactctacttgtgcatgagaagaaagaagcagttgacctcactcaatatattctgcagcatgttttttattttgatgaagtctttggtgaggcgtgcaccaatcaggatgtatacatgaagactactcacccacttattcagcatattttcaatggaggcaatgccacttgctttgcttatggacagacaggtgctggaaagacctacaccatgataggaactcatgagaacccaggattgtatgctctagctgccaaagatatcttcaggcaactagaagtgtcccagccaagaaagcacctctttgtgtggatcagcttctatgaaatttactgtggacagctttatgacctcctaaatagaagaaaaaggctctttgcaagagaagatagcaagcacatggtgcagatagtgggactgcaagagcttcaggtggacagtgtggagctcctcttagaggtgatcttaaagggcagcaaggagcgcagcactggggccactggagttaatgcagactcctcccgctcccatgccgtcatccaaattcagatcaaagattcagccaagaggacatttggcaggatctcttttattgacttggctggcagtgaaagagcagcagatgcaagggactcagatagacagacaaagatggaaggtgcagaaataaatcagagtctactggctctgaaggaatgtatccgagcactggatcaggaacacacccatactcccttcaggcaaagcaaactaactcaggtcctgaaggactctttcatcggcaatgccaaaacctgcatgatcgccaacatctcaccaagccacgtggccactgaacacactctcaacaccttgcgctatgctgaccgggtcaaagaactaaagaaaggcattaagtgttgcacttcagttaccagtcgaaatcggacatctggaaactcctctccaaaacgaattcagagctcccctggggctttgtcagaggacaaatgttctcccaaaaaagtcaagctgggatttcagcagtcactcacagtggcagcccctggttccacgagagggaaggtccatcctctgaccagccacccacccaacattccttttacttctgcacctaaggtctctggtaaaaggggtggctccagagggagtccttcacaagagtgggtcattcatgctagccctgtgaaaggaactgtgcgctctggacatgtggccaaaaaaaagccagaagagtcagcaccattgtgctctgagaaaaatcgaatgggcaacaaaactgtccttgggtgggaaagcagggcctcaggcccaggagaaggcctagtgcgtggtaagctgtccaccaagtgcaagaaagtgcagacagtgcagccagtacagaagcagcttgtgtctcgagttgagctctcctttggcaacgcccaccacagggctgagtacagtcaagacagccagaggggcacgcctgctaggcctgcctctgaagcttggacaaacatcccgccacatcagaaggagagggaggaacatctgcgtttctatcaccagcagttccaacagccacctctcctccaacagaagttaaaataccaaccactgaaaaggtctttacgccagtacaggcccccagagggtcagctcacgaatgagactccgcctctgttccactcttactctgaaaaccatgatggagcccaagtagaggaacttgatgacagtgatttcagtgaagattctttttcacacatctctagtcagagggccacaaagcaaaggaacaccctggagaatagcgaagactcattcttcctgcaccagacgtggggacagggtcctgagaagcaggtggcagaaagacagcagagtctgttttctagccccaggacaggtgacaagaaagatctaactaaaagctgggtggactccagggaccccataaaccacagaagagcagcactcgatcacagctgcagcccaagtaaggggcccgtggactggagcagagagaactctacttcctcagggccttctcccagagacagcctggcagagaagccatactgttcacaggtagatttcatatatagacaggaaagaggtggaggctcttcctttgatctcagaaaggatgcctcccaaagtgaggtttctggggagaatgagggcaacttgccatccccagaggaagatggtttcactatctcattgtcccacgttgcagttcctggatccccagaccaaagagacacagtcaccacacctctgagagaagtcagtgcagacggcccaatccaggtgaccagcactgtgaaaaacggtcatgctgtcccaggagaggatcctagggggcagttaggcacgcatgctgaatatgcttctggactcatgtctcccctcaccatgtccctcctggagaacccagacaacgaagggtctcctccctcggagcagctggtccaggatggggctacgcacagtctagtggcagagagcacagggggcccagttgtgagccacacagtgccatctggtgatcaagaggcagccttgccagtgtcttcagcaactaggcacctgtggctgtcctcatctccccctgataataagcctggtggtgatcttccagctctgtccccatcacccatccgtcagcacccagctgacaagctgcccagcagggaggcagacctaggagaggcctgccagagcagagagactgtacttttctcccacgaacacatgggtagtgagcagtatgatgctgatgcagaggagacggggctggatggctcctggggtttcccaggaaagcccttcaccaccatacatatgggggtaccccattctggacctacactcaccccacgaacaggaagtagtgatgtggctgaccagctctgggcccaggagagaaaacatcctacaaggcttggttggcaggagtttggtttgtccacagaccccatcaagttgccctgcaacagtgaaaatgtcacatggctcaaacccaggccgatctcaaggtgcttagcaaggccaagttctcccttggttcccagctgctctcccaagactgcagggacactccgtcagcccaccctggagcaagcgcagcaggtggtcatccgagcacaccaggaacagctggatgaaatggctgagctcggcttcaaggaggagacgctgatgagccagctggcttctaatgattttgaagattttgtgacccagctggatgaaatcatggttctgaaatccaagtgtatccagagtctgaggagccagctgcagctctatctcacctgccacgggcccaccgcagcccctgagggaacagtgccgtcttagagccagaccctgtgccgagatggtgggggccctgcaggagtctgtgctgggctctcaggctggaggagcctctgccaggtcctccctgcacacaccagaacccacacgctggtcctgcctatgctagcgtcaccccagccccacgtggcttcagataggtcccagcttctccctcagggacaggcccctgtccctcagttccatgcacaggagtgcctccaagggtgggccaggccgaagaacctaatgcctttcccttgtgcctagagaatatgattaactaaccccttgcctgtgggaatatatttgggtctaataaccctgaagtttctaagtttggggatcagaggatggggtggtcagtggtagcctagaggtcagaggtcacaagacagagaagacaacatgctgagaccagaggcttcaccagctgaattctgtgcctaacttagaagactaaacactggcccaaacttaaccattggtgctagggggacaggggtggggtgagctctgccccatcagcccttggagattgatttggggatttagaggcgtttttgaaaatgtaaatagcataaaccttgacttgatgtgtcactgacagcagcagatgtgagacaggccttatatttacagctcccttcccttcctgcaatccagtgttgaggcagaagagggtgcctgtgtcacacatcaatttttctcctgacttttgctcgggtgaaaggcctctgtacaatgcccgatactctcatgcttccatggcagctcctggctcctatctgggacacctcactacccagccccctcatggaatagtccatctcctagcctggccttcatccagttcaccctgcccagccaccctgcctctcaggggtctgtgttgggaaccttggcagttgaacagagtgctctgttcaacagtctgaggcctctgaaacagaattcacacacaaaccttcagccaagttctgcctgctgtgtatctttttagcaggaagcagctcaggacagggaagacaaagtagcctccaggtgccaattactttaaagccactctgggtcaaatggagattcatgagtcacggccttggcccgaacgcccattactatgtgagcctttatttccttcagataaaggataactttttacggttttaaaaggagggcttaattaaaaggccaagaagagggttaaatggctctcttgagacactagcagcctggtccagtcaccctttgtcagcctgacagtgcctcatctgaccgccagggggcatccttattggtgcttcccggctgcagggcactgcggcccctccctcacatgatcactaaaaaccttcaaagacccagtctagccaaaagctcaagtgggacaatggcacagtattaaggtcaaggacaaaaacttacttactttaggaatgaaccctattctatcatcatatacaacagcaccactgagagctggtgaaacagtttaaatcccatcctctgcttgtggcaaatgatgcataaatgcctgctgctcacagtaaaagggcttcttcctcttttactgggtgatccccctgaaggcccagcctatcccaactccacagtcaggaaggcctacgtccttggtccacagacggagctgggccaggtttaaaagactcagtctaggcttgcctttgcaaaccaaaaacgaggacaggtctgaagtgggaagaaagctccgaaatagaaaacggttaggtcctattctatccccagcaaatctaagcaagaaatctctttatacaccacatggcccccccactcccataaaacagccttggtaataaagaagttatcacaccaagacataccttttagatttttattagtagttctctctgaagaatcaaaatagttagttagcaaattattttagattcaagactgtatatcctttgtatttagatctttaatgatgtacaacataatacaaaacaaaccagagagactg

SEQ ID NO: 15410 - DNA, 6295 bp, Homo sapiens
  source 1..6295: mol_type = unassigned DNA
cccctgttcattattcatgggaaacagttgtgcagcatgccttgacattaagttgagcatctaaaattagtcctgctacaatcagttgttgggaacaaggtttcaatagttgtggcatgtgttaagtagacattgcaaggttggaaggaactccctagaaataaagtttatagaaacctattcaccaaaatggcatcctggttatatgaatgtctttgtgaagctgaacttgcacagtattattctcatttcactgcccttggccttcagaaaatagatgaattagccaagattacaatgaaggactactccaaattaggagtccatgacatgaacgaccgcaaacgtctcttccaacttatcaaaattattaagattatgcaagaagaagataaagcagtcagtatcccagagcgtcatcttcagacaagcagcctgcgcatcaaatctcaggaattaagatctggccctcgcagacagctgaattttgattctcctgctgacaataaagacagaaatgccagcaatgatgggtttgaaatgtgcagtttatcagatttctctgcaaatgaacagaagtccacttacctaaaagtgctagaacacatgctaccagatgattcccagtaccatacaaaaacaggaattctgaatgccacagctggtgattcctatgtgcaaacagaaatcagcacttcactcttttcaccaaattacctttctgcaatactgggggattgtgatattcccattattcaaagaatctctcatgtttcagggtataactatggaatccctcattcttgtatcagacagaacacttcagagaaacagaatccttggactgagatggagaaaatcagagtttgtgttcgaaaacgccccctgggcatgagggaggtacgtcgtggagaaattaatattattactgtagaagacaaagaaactctacttgtgcatgagaagaaagaagcagttgacctcactcaatatattctgcagcatgttttttattttgatgaagtctttggtgaggcgtgcaccaatcaggatgtatacatgaagactactcacccacttattcagcatattttcaatggaggcaatgccacttgctttgcttatggacagacaggtgctggaaagacctacaccatgataggaactcatgagaacccaggattgtatgctctagctgccaaagatatcttcaggcaactagaagtgtcccagccaagaaagcacctctttgtgtggatcagcttctatgaaatttactgtggacagctttatgacctcctaaatagaagaaaaaggctctttgcaagagaagatagcaagcacatggtgcagatagtgggactgcaagagcttcaggtggacagtgtggagctcctcttagaggtgatcttaaagggcagcaaggagcgcagcactggggccactggagttaatgcagactcctcccgctcccatgccgtcatccaaattcagatcaaagattcagccaagaggacatttggcaggatctcttttattgacttggctggcagtgaaagagcagcagatgcaagggactcagatagacagacaaagatggaaggtgcagaaataaatcagagtctactggctctgaaggaatgtatccgagcactggatcaggaacacacccatactcccttcaggcaaagcaaactaactcaggtcctgaaggactctttcatcggcaatgccaaaacctgcatgatcgccaacatctcaccaagccacgtggccactgaacacactctcaacaccttgcgctatgctgaccgggtcaaagaactaaagaaaggcattaagtgttgcacttcagttaccagtcgaaatcggacatctggaaactcctctccaaaacgaattcagagctcccctggggctttgtcagaggacaaatgttctcccaaaaaagtcaagctgggatttcagcagtcactcacagtggcagcccctggttccacgagagggaaggtccatcctctgaccagccacccacccaacattccttttacttctgcacctaaggtctctggtaaaaggggtggctccagagggagtccttcacaagagtgggtcattcatgctagccctgtgaaaggaactgtgcgctctggacatgtggccaaaaaaaagccagaagagtcagcaccattgtgctctgagaaaaatcgaatgggcaacaaaactgtccttgggtgggaaagcagggcctcaggcccaggagaaggcctagtgcgtggtaagctgtccaccaagtgcaagaaagtgcagacagtgcagccagtacagaagcagcttgtgtctcgagttgagctctcctttggcaacgcccaccacagggctgagtacagtcaagacagccagaggggcacgcctgctaggcctgcctctgaagcttggacaaacatcccgccacatcagaaggagagggaggaacatctgcgtttctatcaccagcagttccaacagccacctctcctccaacagaagttaaaataccaaccactgaaaaggtctttacgccagtacaggcccccagagggtcagctcacgaatgagactccgcctctgttccactcttactctgaaaaccatgatggagcccaagtagaggaacttgatgacagtgatttcagtgaagattctttttcacacatctctagtcagagggccacaaagcaaaggaacaccctggagaatagcgaagactcattcttcctgcaccagacgtggggacagggtcctgagaagcaggtggcagaaagacagcagagtctgttttctagccccaggacaggtgacaagaaagatctaactaaaagctgggtggactccagggaccccataaaccacagaagagcagcactcgatcacagctgcagcccaagtaaggggcccgtggactggagcagagagaactctacttcctcagggccttctcccagagacagcctggcagagaagccatactgttcacaggtagatttcatatatagacaggaaagaggtggaggctcttcctttgatctcagaaaggatgcctcccaaagtgaggtttctggggagaatgagggcaacttgccatccccagaggaagatggtttcactatctcattgtcccacgttgcagttcctggatccccagaccaaagagacacagtcaccacacctctgagagaagtcagtgcagacggcccaatccaggtgaccagcactgtgaaaaacggtcatgctgtcccaggagaggatcctagggggcagttaggcacgcatgctgaatatgcttctggactcatgtctcccctcaccatgtccctcctggagaacccagacaacgaagggtctcctccctcggagcagctggtccaggatggggctacgcacagtctagtggcagagagcacagggggcccagttgtgagccacacagtgccatctggtgatcaagaggcagccttgccagtgtcttcagcaactaggcacctgtggctgtcctcatctccccctgataataagcctggtggtgatcttccagctctgtccccatcacccatccgtcagcacccagctgacaagctgcccagcagggaggcagacctaggagaggcctgccagagcagagagactgtacttttctcccacgaacacatgggtagtgagcagtatgatgctgatgcagaggagacggggctggatggctcctggggtttcccaggaaagcccttcaccaccatacatatgggggtaccccattctggacctacactcaccccacgaacaggaagtagtgatgtggctgaccagctctgggcccaggagagaaaacatcctacaaggcttggttggcaggagtttggtttgtccacagaccccatcaagttgccctgcaacagtgaaaatgtcacatggctcaaacccaggccgatctcaaggtgcttagcaaggccaagttctcccttggttcccagctgctctcccaagactgcagggacactccgtcagcccaccctggagcaagcgcagcaggtggtcatccgagcacaccaggaacagctggatgaaatggctgagctcggcttcaaggaggagacgctgatgagccagctggcttctaatgattttgaagattttgtgacccagctggatgaaatcatggttctgaaatccaagtgtatccagagtctgaggagccagctgcagctctatctcacctgccacgggcccaccgcagcccctgagggaacagtgccgtcttagagccagaccctgtgccgagatggtgggggccctgcaggagtctgtgctgggctctcaggctggaggagcctctgccaggtcctccctgcacacaccagaacccacacgctggtcctgcctatgctagcgtcaccccagccccacgtggcttcagataggtcccagcttctccctcagggacaggcccctgtccctcagttccatgcacaggagtgcctccaagggtgggccaggccgaagaacctaatgcctttcccttgtgcctagagaatatgattaactaaccccttgcctgtgggaatatatttgggtctaataaccctgaagtttctaagtttggggatcagaggatggggtggtcagtggtagcctagaggtcagaggtcacaagacagagaagacaacatgctgagaccagaggcttcaccagctgaattctgtgcctaacttagaagactaaacactggcccaaacttaaccattggtgctagggggacaggggtggggtgagctctgccccatcagcccttggagattgatttggggatttagaggcgtttttgaaaatgtaaatagcataaaccttgacttgatgtgtcactgacagcagcagatgtgagacaggccttatatttacagctcccttcccttcctgcaatccagtgttgaggcagaagagggtgcctgtgtcacacatcaatttttctcctgacttttgctcgggtgaaaggcctctgtacaatgcccgatactctcatgcttccatggcagctcctggctcctatctgggacacctcactacccagccccctcatggaatagtccatctcctagcctggccttcatccagttcaccctgcccagccaccctgcctctcaggggtctgtgttgggaaccttggcagttgaacagagtgctctgttcaacagtctgaggcctctgaaacagaattcacacacaaaccttcagccaagttctgcctgctgtgtatctttttagcaggaagcagctcaggacagggaagacaaagtagcctccaggtgccaattactttaaagccactctgggtcaaatggagattcatgagtcacggccttggcccgaacgcccattactatgtgagcctttatttccttcagataaaggataactttttacggttttaaaaggagggcttaattaaaaggccaagaagagggttaaatggctctcttgagacactagcagcctggtccagtcaccctttgtcagcctgacagtgcctcatctgaccgccagggggcatccttattggtgcttcccggctgcagggcactgcggcccctccctcacatgatcactaaaaaccttcaaagacccagtctagccaaaagctcaagtgggacaatggcacagtattaaggtcaaggacaaaaacttacttactttaggaatgaaccctattctatcatcatatacaacagcaccactgagagctggtgaaacagtttaaatcccatcctctgcttgtggcaaatgatgcataaatgcctgctgctcacagtaaaagggcttcttcctcttttactgggtgatccccctgaaggcccagcctatcccaactccacagtcaggaaggcctacgtccttggtccacagacggagctgggccaggtttaaaagactcagtctaggcttgcctttgcaaaccaaaaacgaggacaggtctgaagtgggaagaaagctccgaaatagaaaacggttaggtcctattctatccccagcaaatctaagcaagaaatctctttatacaccacatggcccccccactcccataaaacagccttggtaataaagaagttatcacaccaagacataccttttagatttttattagtagttctctctgaagaatcaaaatagttagttagcaaattattttagattcaagactgtatatcctttgtatttagatctttaatgatgtacaacataatacaaaacaaaccagagagactg

SEQ ID NO: 15411 - DNA, 3597 bp, Homo sapiens
  source 1..3597: mol_type = unassigned DNA
gacgggactgttaggttgcgggctttggggctcactcccgacggcattgtcttctcctcttctcagacagggcagaccgaggagtttggaccgagagtttatagaaacctattcaccaaaatggcatcctggttatatgaatgtctttgtgaagctgaacttgcacagtattattctcatttcactgcccttggccttcagaaaatagatgaattagccaagattacaatgaaggactactccaaattaggagtccatgacatgaacgaccgcaaacgtctcttccaacttatcaaaattattaagattatgcaagaagaagataaagcagtcagtatcccagagcgtcatcttcagacaagcagcctgcgcatcaaatctcaggaattaagatctggccctcgcagacagctgaattttgattctcctgctgacaataaagacagaaatgccagcaatgatgggtttgaaatgtgcagtttatcagatttctctgcaaatgaacagaagtccacttacctaaaagtgctagaacacatgctaccagatgattcccagtaccatacaaaaacaggaattctgaatgccacagctggtgattcctatgtgcaaacagaaatcagcacttcactcttttcaccaaattacctttctgcaatactgggggattgtgatattcccattattcaaagaatctctcatgtttcagggtataactatggaatccctcattcttgtatcagacagaacacttcagagaaacagaatccttggactgagatggagaaaatcagagtttgtgttcgaaaacgccccctgggcatgagggaggtacgtcgtggagaaattaatattattactgtagaagacaaagaaactctacttgtgcatgagaagaaagaagcagttgacctcactcaatatattctgcagcatgttttttattttgatgaagtctttggtgaggcgtgcaccaatcaggatgtatacatgaagactactcacccacttattcagcatattttcaatggaggcaatgccacttgctttgcttatggacagacaggtgctggaaagacctacaccatgataggaactcatgagaacccaggattgtatgctctagctgccaaagatatcttcaggcaactagaagtgtcccagccaagaaagcacctctttgtgtggatcagcttctatgaaatttactgtggacagctttatgacctcctaaatagaagaaaaaggctctttgcaagagaagatagcaagcacatggtgcagatagtgggactgcaagagcttcaggtggacagtgtggagctcctcttagaggtgatcttaaagggcagcaaggagcgcagcactggggccactggagttaatgcagactcctcccgctcccatgccgtcatccaaattcagatcaaagattcagccaagaggacatttggcaggatctcttttattgacttggctggcagtgaaagagcagcagatgcaagggactcagatagacagacaaagatggaaggtgcagaaataaatcagagtctactggctctgaaggaatgtatccgagcactggatcaggaacacacccatactcccttcaggcaaagcaaactaactcaggtcctgaaggactctttcatcggcaatgccaaaacctgcatgatcgccaacatctcaccaagccacgtggccactgaacacactctcaacaccttgcgctatgctgaccgggtcaaagaactaaagaaaggcattaagtgttgcacttcagttaccagtcgaaatcggacatctggaaactcctctccaaaacgaattcagagctcccctggggctttgtcagaggacaaatgttctcccaaaaaagtcaagctgggatttcagcagtcactcacagtggcagcccctggttccacgagagggaaggtccatcctctgaccagccacccacccaacattccttttacttctgcacctaaggtctctggtaaaaggggtggctccagagggagtccttcacaagagtgggtcattcatgctagccctgtgaaaggaactgtgcgctctggacatgtggccaaaaaaaagccagaagagtcagcaccattgtgctctgagaaaaatcgaatgggcaacaaaactgtccttgggtgggaaagcagggcctcaggcccaggagaaggcctagtgcgtggtaagctgtccaccaagtgcaagaaagtgcagacagtgcagccagtacagaagcagcttgtgtctcgagttgagctctcctttggcaacgcccaccacagggctgagtacagtcaagacagccagaggggcacgcctgctaggcctgcctctgaagcttggacaaacatcccgccacatcagaaggagagggaggaacatctgcgtttctatcaccagcagttccaacagccacctctcctccaacagaagttaaaataccaaccactgaaaaggtctttacgccagtacaggcccccagagggtcagctcacgaatgagactccgcctctgttccactcttactctgaaaaccatgatggagcccaagtagaggaacttgatgacagtgatttcagtgaagattctttttcacacatctctagtcagagggccacaaagcaaaggaacaccctggagaatagcgaagactcattcttcctgcaccagacgtggggacagggtcctgagaagcaggtggcagaaagacagcagagtctgttttctagccccaggacaggtgacaagaaagatctaactaaaagctgggtggactccagggaccccataaaccacagaagagcagcactcgatcacagctgcagcccaagtaaggggcccgtggactggagcagagagaactctacttcctcagggccttctcccagagacagcctggcagagaagccatactgttcacaggtagatttcatatatagacaggaaagaggtggaggctcttcctttgatctcagaaaggatgcctcccaaagtgaggtttctggggagaatgagggcaacttgccatccccagaggaagatggtttcactatctcattgtcccacgttgcagttcctggatccccagaccaaagagacacagtcaccacacctctgagagaagtcagtgcagacggcccaatccaggtgaccagcactgtgaaaaacggtcatgctgtcccaggagaggatcctagggggcagttaggcacgcatgctgaatatgcttctggactcatgtctcccctcaccatgtccctcctggagaacccagacaacgaagggtctcctccctcggagcagctggtccaggatggggctacgcacagtctagtggcagagagcacagggggcccagttgtgagccacacagtgccatctggtgatcaagaggcagccttgccagtgtcttcagcaactaggcacctgtggctgtcctcatctccccctgataataagcctggtggtgatcttccagctctgggcccaggagagaaaacatcctacaaggcttggttggcaggagtttggtttgtccacagaccccatcaagttgccctgcaacagtga

SEQ ID NO: 15412 - DNA, 1326 bp, Homo sapiens
  source 1..1326: mol_type = unassigned DNA
ggttggtggggcttgtgtttaattaacgcagcacacaaagtcttatgacgtcgttttactcttttctctcaggaaacaattctggtgaaatgtgatcgtcctggccaccctctgattgataagacatatcattttgaaagatatactggccttcccagctgacatggacctcaggtcagcttcagcgtgagaagcaggccaggcctgggtctggagccgtcctggccttcccagatgacatggacctcaggtcagcttcagcgtgagaagcaggccaggcctgggtctggagccgtcctggccttcccagatgacaaggacctcagggtttatggtccagcagagtctcagagcgcggtctttggagatgtgtgccccctactcacttctctcttggatgggtacaatgtttgtgttatggcgtatggacagacgggcagcggaaagagctataccatgctgggacgccattcggacgacggccctgttctgccgcttgacccacagagtgacttaggaattatccctagagtggctgaggagctcttcaggctcattttggaaaatacctcaagaagcccaaaggttgaagtctccatagtggaagtttacaataatgacatttttgaccttctggccaaagacagcattgcagcagtgtcgggggtcaagcgtgaggtggtgacagccaaggatggacggacagaggttgcgctgctggcctctgaggctgtcggcagcgcctcgaaactgatggagctcgttcatggaggtctgcagctcagggcgaagcaccccaccctggtgcacgcggattcctccaggtctcacctgataattacggtgactctaaccacagcctcctgctctgacagcactgcagaccaagcctgcagtgccaccctccccagggagcaaacagaggcaggaagggcaggaaggagccgcagagcttctcaaggggccttggctccacagctggttcctgggaaccccgcagggcatgcggagcaggtgcaggctcgactacagctcgtggactcggccggcagcgagtgcgttggaggcgatgcgaagttactggtgattctctgcatttctcccagccagaggcacctggcacagacgttgcagggcctgggtttcgggatccgagctcggcaagtccagcgaggccctgcccgaaagaagccgcccagctcccaaacggaggggaagaggaggccggattgaatgcattaacaagtttttctcctaaaactgtgtttcttgtccttgctttataatgcatatgtgcttagaaataaacaggtttcacgtggactc

SEQ ID NO: 15413 - DNA, 1510 bp, Homo sapiens
  source 1..1510: mol_type = unassigned DNA
ttgtttacaaaaacaggcggcaggctggggttggtggggcttgtgtttaattaacgcagcacacaaagtcttatgacgtcgttttactcttttctctcaggaaacaattctggtgaaatgtgatcgtcctggccaccctctgattgataagacatatcattttgaaagatatactggccttcccagctgacatggacctcaggtcagcttcagcgtgagaagcaggccaggcctgggtctggagccgtcctggccttcccagatgacatggacctcaggtcagcttcagcgtgagaagcaggccaggcctgggtctggagccgtcctggccttcccagatgacaaggacctcagggtttatggtccagcagagtctcagagcgcggtctttggagatgtgtgccccctactcacttctctcttggatgggtacaatgtttgtgttatggcgtatggacagacgggcagcggaaagagctataccatgctgggacgccattcggacgacggccctgttctgccgcttgacccacagagtgacttaggaattatccctagagtggctgaggagctcttcaggctcattttggaaaatacctcaagaagcccaaaggttgaagtctccatagtggaagtttacaataatgacatttttgaccttctggccaaagacagcattgcagcagtgtcgggggtcaagcgtgaggtggtgacagccaaggatggacggacagaggttgcgctgctggcctctgaggctgtcggcagcgcctcgaaactgatggagctcgttcatggaggtctgcagctcagggcgaagcaccccaccctggtgcacgcggattcctccaggtctcacctgataattacggtgactctaaccacagcctcctgctctgacagcactgcagaccaagcctgcagtgccaccctccccagggagcaaacagaggcaggaagggcaggaaggagccgcagagcttctcaaggggccttggctccacagctggttcctgggaaccccgcagggcatgcggagcaggtgcaggctcgactacagctcgtggactcggccggcagcgagtgcgttggtgtgtctggagtgaccgggttggccctgagggagatggcgtgcatcagccgcagccttgcggccctggcaggcgtcctgggggctttgttggagcaccgtggccatgccccgtaccggaacagcaggctcacccacctccttcaggactgcctcggaggcgatgcgaagttactggtgattctctgcatttctcccagccagaggcacctggcacagacgttgcagggcctgggtttcgggatccgagctcggcaagtccagcgaggccctgcccgaaagaagccgcccagctcccaaacggaggggaagaggaggccggattgaatgcattaacaagtttttctcctaaaactgtgtttcttgtccttgctttataatgcatatgtgcttagaaataaacaggtttcacgtggactc

SEQ ID NO: 15414 - DNA, 1613 bp, Homo sapiens
  source 1..1613: mol_type = unassigned DNA
gggtctttcgaagtggagacaggtgctgcagatctcacggccgcgtctcaggagctggtgcccggtgcacgttcagtgggggatgctccgcagtgcaggctcgcgcccgggttgacacgcagacctcttgatcattgcaggagctgaaacgaaatatcagagttcactgtcggattcgtcctttgttgccttttgatagtgaatccgacgatccagttttgcagagcaggaaacaattctggtgaaatgtgatcgtcctggccaccctctgattgataagacatatcattttgaaagatatactggccttcccagctgacatggacctcaggtcagcttcagcgtgagaagcaggccaggcctgggtctggagccgtcctggccttcccagatgacatggacctcaggtcagcttcagcgtgagaagcaggccaggcctgggtctggagccgtcctggccttcccagatgacaaggacctcagggtttatggtccagcagagtctcagagcgcggtctttggagatgtgtgccccctactcacttctctcttggatgggtacaatgtttgtgttatggcgtatggacagacgggcagcggaaagagctataccatgctgggacgccattcggacgacggccctgttctgccgcttgacccacagagtgacttaggaattatccctagagtggctgaggagctcttcaggctcattttggaaaatacctcaagaagcccaaaggttgaagtctccatagtggaagtttacaataatgacatttttgaccttctggccaaagacagcattgcagcagtgtcgggggtcaagcgtgaggtggtgacagccaaggatggacggacagaggttgcgctgctggcctctgaggctgtcggcagcgcctcgaaactgatggagctcgttcatggaggtctgcagctcagggcgaagcaccccaccctggtgcacgcggattcctccaggtctcacctgataattacggtgactctaaccacagcctcctgctctgacagcactgcagaccaagcctgcagtgccaccctccccagggagcaaacagaggcaggaagggcaggaaggagccgcagagcttctcaaggggccttggctccacagctggttcctgggaaccccgcagggcatgcggagcaggtgcaggctcgactacagctcgtggactcggccggcagcgagtgcgttggtgtgtctggagtgaccgggttggccctgagggagatggcgtgcatcagccgcagccttgcggccctggcaggcgtcctgggggctttgttggagcaccgtggccatgccccgtaccggaacagcaggctcacccacctccttcaggactgcctcggaggcgatgcgaagttactggtgattctctgcatttctcccagccagaggcacctggcacagacgttgcagggcctgggtttcgggatccgagctcggcaagtccagcgaggccctgcccgaaagaagccgcccagctcccaaacggaggggaagaggaggccggattgaatgcattaacaagtttttctcctaaaactgtgtttcttgtccttgctttataatgcatatgtgctta

SEQ ID NO: 15415 - DNA, 5649 bp, Homo sapiens
  source 1..5649: mol_type = unassigned DNA
atggtcggccgcggcgtccctctgtgcgctgcgcagcccgcggtggccgagggcggcccggcccgcgagccgccgccgctgctggaggtgtccccccgaaagaggctacccgccgggcccgaccaggacccatgcggcagccgccctgctcccgaaggcgccggggccggcccagagcagggccactcggccggcggaggcggctggtgccgccactgccacacgaagctggtggagctcaagcgacaggcgtggaagctggtcagcgggcccgggaccaccctccgggatccttgcctctctgccctgcttctcgacaagctaccagcacctggggccctgccagcctgtcgcccagaggccgagcgccgctgtgacgtctgcgccacacacctgcagcagctcacacgggaggccatgcacctgctgcaggcccctgccagccatgaggaccttgacgccccccatggaggccccagcctcgcaccccccagcaccacgaccagctcgagggacacgccaggaccagcgggtcctgcagggaggcagccaggacgagctgggccagacaggaccaaggggctggcctggtcccccgggcccagtgtccaggtgtctgtagcacctgcgggtcttggaggggcgctgagcacggtcaccatccaggcccagcagtgcctggagggcatgtggagtgtctcgcgggtcaacagcttcctcccgccggcgtgcctggccgaggcagcggtggcggccgtggcggtggcagacacggtccgagaatgcccccccgtggccggccctgatggcttgtcgaaggcctggggccgtggtggagtctgcacgtcagccctggtcacccccaccccgggctcggtggggggctccacaggcccctcagctgcagcctccttcttcataagggctatgcagaagctcagcctggcctccaagaggaagaagccccacccgccaccgcctccagccacccgcggcacctccacctaccccaccgacttcagcggggtcctgcagctgtggccgcccccggcgcccccctgcctgctcagggccgcctccaagaccaaggacaaccctggcagcatcgggaaggtgaaggttatgctgcggatctggcccgcacagggggcccagcgctcggccgaggccatgtccttcctgaaggtggaccctcggaagaagcaggtgatcctctacgatcccgccgccggtcccccaggcagcgcaggcccccggcgagccgccactgctgcagttcccaagatgtttgccttcgatgccgtcttcccccaggactccgagcaggccgaagtctgctcggggaccgtggccgacgtgctccagtcggtggtcagtggggctgatggctgcattttttcctttggccacatgagcctgggcaagtcgtacaccatgatcgggaaggacagctcaccccagagcctgggcatcgtgccctgcgccatctcctggctcttcaggctcatcgaggagcgcagggagaggacgggcacccgcttctccgtccgggtctcagccgtggaggtgtgcgggcgcgaccagagcctgcgggacctgctggccgaggtggcccctggcagcctccaggacacccagtctccgggagtgtacctgcgggaggaccccgtgtgtggggcgcagctccagaaccaaagcgagctgcgggcacccacggccgagaaggcggctttctacctggatgcggccctggcggcccgcagcaccagccgagcgggctgtggcgaggacgcccgacgcagctcccacatgttgttcacgctgcacgtctaccagtaccgcatggagaagtgcggccggggaggaatgtccggaggccgcagccgcctgcacctcatcgacctgggcagctgtgaggcggcggctggcagggccggggaggctgctgggggtcccctgtgtctgtccctgtcggccctgggcagcgtcatcttggccctggtcaacggagccaagcatgtgccgtatcgggaccacaggctcaccatgctgctgcgtgaatccctggccaccgctggctgccgcaccaccatgatcgcccacgtgtcggatgcgccagcccagcacgcagagacactcagcaccgtgcagctcgccgcccgcatccaccgcctgcgcaggaagaaggccaagtacgcctccagctcctctggcggggagagctcctgtgaggaaggccgggcccgtcggcccccgcacctgcggcccttccacccacgcactgtggccctggaccccgaccgcacgcctccctgcctgcccggtgaccccgattactcctccagcagcgagcagtcctgtgacacggtcatctacgtggggcccggtggggcggcgctgtcagaccgggagctcaccgacaacgaaggtccgcctgacttcgtgcccatcatccctgccctgagccgccaccggccctccaagggtccccgagacgcagaccacttccgctgcagcaccttcgcggagctgcaggagcggctggaatgcatggacggcaacgagggtccctcaggaggtccaggtggcaccgacggagctcaggccagccccgcccgagggggccggaagccctcgccaccagaggctgcatcccccaggaaggccgtgggcaccccgatggctgccagcacccctcgaggcagttctggtccagacacccaccagggtacccctgagccctgcaaggccattgtctggggtgaccagagagaggacagcagcgcttggcctgagctgctggtcccggaaaaggctgcagtgagtggaggcaggaggccactgcccagcccggctcccccacctcctcagttgctggaagcctgcagagccccagaagagcctgggggagggggcactgatggagtggcacggacccctcccgtgggcatgagtgggcaggtggctgggtccccgatgcttcctggggccacctgcccccgcctggctgctggcagtcgctgtccggagcggggcctgctcaccaccacagtgaccctgcagcggccagtggagctcaacggcgaggacgagctggtgttcacggtggtggaggagctgtccctgggggcgcttgccggagctgggcggcccaccagcctggctagcttcgacagtgactgctccctgcgggccctggcctcggggtcccggccagtcagcatcatcagcagcatcaatgatgagtttgacgcctacacctctcaggcccctgagggggggcccctggagggggcagcctgggccggcagcagtcacggctcctccatcagctcctggctcagcgaggtcagcgtctgcactgccgacagccgtgaccccacgccgcagccccgcttcagccccgactcgctggcagggcttgaccctgggggcccccctgccctggatggttccctgggggatggaagctctgggttcctggggccagacagacctgacagtcctgggccaacctggggtccgtgccctggggaagtggctgcagtggccccatcccgacccggcagggagccccaggccgggccctcgcggtgggcatccgcagcccagaccatccactccagcctcccccggaaaccgaggactgcctctgccaccacccgtgtgggctgtgctcgcctgggccagagcccacctggccgtggaggcctgtttgaggacccatggctgctccgggtaggggagtgtgatacccaggcagcttctgctggcagggcccccagccccacacttggctccccccggctgcctgaggcccaggtgatgctagcctgtgcccagagagtggtggacgggtgtgaggtggcagccagggcggcccgcaggccagaggctgtggctcggatcccaccgctgcggaggggtgccaccacgctgggtgtgacaacgccagctgtgtcctggggagatgctcccacggaggtggtggcctgctcggggagcctgaaggcctcccccaccagcaagaagggtctggctcccaaggcgggcttcctcccgaggcccagtggggcggcccccccggccccacccacgcggaagtccagcctggagcagaggagcagcccggcctcggcccctccgcatgctgtgaacccggcgcgggtcggggctgctgctgtccttcgaggggaggaggagcccagacccagcagccgggctgaccactctgtccccagggccacgtccagcctgaaggcccgggccagcaaggtagaagcagcacaccgtcttgccggacacgcgtctctggagcggtacgaaggcctggcgcacagcagcagcaagggccgggaagcccctgggcggcctccccgggctgtacccaagctgggtgtgccaccctccagccccacacacggtccagctcccgcctgtaggagcggcgcagccaaggctgtgggggcccccaagccccctgttggtggaggcaagggccgtggcctagtggctggtgggtcgcgggctctggggccttcggtgaagctgtctacggcctctgtgacgggcaggagccctggcggccctgtggccggtcccagagcagccccacgggccgggcccagtgtcggggcgaaggctggccggggtaccgtcatgggcacaaagcaggcgctccgggctgctcacagccgcgtccatgagctgtcagccagtggagccccgggccgaggtggctcctcgtggggctcggcggactcagacagcggccatgacagcggcgtgaacgtgggggaggagcggccacccacgggcccggccctgccctccccctacagcaaggtgaccgccccacggcggccccagcgctacagcagcggccatggcagcgacaacagcagcgtgctgagtggagagctgccgcccgccatgggccgcaccgcccttttccaccacagcggtggcagcagtggctatgagagcctgcggcgcgacagcgaggccaccggcagcgcctcctccgcccctgactccatgagcgagagtggggctgcctccccaggcgcccgcacccgcagcctcaagtcccccaagaagagggccacaggtctgcagcggcggcgcctgattcccgccccactgcccgacaccactgccctgggccgtaagcccagcctccccgggcagtgggtggacctgcccccgcccctggctggctccctgaaggagccgttcgagatcaaggtgtacgagatcgatgacgtggagcgccttcagcggccccgccccaccccgagggaggcccccacccagggtctggcgtgcgtcagtacaaggctgcggctggcggagcgcaggcagcagcggctgcgggaggtgcaggccaagcacaagcacctgtgtgaggagctggccgagacccagggccggctgatgctggagcctggccgctggctggagcagtttgaggtggacccggagctggagcccgagtcggccgagtacctggcggccctggagcgagccacggcggccctggagcagtgcgtgaacctgtgcaaggcgcacgtcatgatggtcacctgcttcgacatcagcgttgcagccagtgctgccatcccggggccgcaggaggtggacgtctga

SEQ ID NO: 15416 - DNA, 5808 bp, Homo sapiens
  source 1..5808: mol_type = unassigned DNA
tcctgagatggccccagatctgcaagagacatttgagagaagctatttattagcagacgtgaagaaatggattctgcacttgattatttagccatgacttatcaatgatgatggattggaaagcagtagctgcccagaagttaaatctgtcttctaaaaagaagaaacatcggccttccacttcttccgctgccgaaccaccgctctttgcaaccagcttcagtgggattctgcagacctcccctcccccagccccaccctgcctgctgagggctgtcaacaaggtgaaggacaccccggggctgggcaaggtgaaagtcatgcttcgcatctgttccaccttggctcgagatacttcagaatccagctctttcttaaaggtggacccacggaagaagcagatcaccttgtacgatcccctgacttgtggaggtcaaaatgccttccaaaagagaggcaaccaggttcctccaaagatgtttgccttcgatgcagtttttccacaagacgcttctcaggctgaagtgtgtgcaggcaccgtggcagaggtgatccagtctgtggtcaacggggcagatggctgcgtgttctgtttcggccacgccaaactgggaaaatcctacaccatgatcggaaaggatgattccatgcagaacctgggcatcattccctgtgccatctcttggctcttcaagctcataaacgaacgcaaggaaaagaccggcgcccgtttctcagtccgggtttccgccgtggaagtgtgggggaaggaggagaacctgcgggacctgctgtcggaggtggccacgggcagcctgcaggacggccagtccccgggcgtgtacctctgtgaggaccccatctgcggcacgcagctgcagaaccagagcgagctgcgggcccccaccgcagagaaggctgcctttttcctggatgccgccattgcctcccgcaggagccaccaacaggactgtgatgaggacgaccaccgcaactcacacgtgttcttcacactgcacatctaccagtaccggatggagaagagcgggaaagggggaatgtctggaggtcgcagccgcctgcatctcattgatctcggcagctgtgtgaaagctcttagcaaaaatcgagaaggaggctcagggctgtgtctctcgctgtctgctctgggcaatgtcatcctggctctcgtcaatggcagcaaacacattccatacaaagagagcaagctcgccatgttgctgcgggagtctctggggaacatgaactgccgtaccaccatgatcgcgcacatctcggccgcggtcgggagctacgcggagaccctgtccaccatccagattgcatcgagagtcttgaggatgaagaaaaagaagacgaagtacacatccagctcgtccggcggggagagctcctgcgaagaaggccgcatgcgcaggcccacccagctgagacccttccacaccagggccacggtggaccctgacttccccatcgctcacctgtccagcgaccccgactactcctccagcagcgagcagtcctgcgacaccgtcatctacatcgggcccaacggcacggccctctctgacaaggagctcaccgacaacgagggccccccagactttgtccctatcgtgccagccctgcagaagacccggggcgacagccggcccgcagaggcaggagaggctgcagccggcaagtcagaaagggactgcctgaagtgcaacacgtttgccgagctgcaggagaggctggactgcatcgacggcagcgaggagcccagcagctttcctttcgaagaactgcctgctcagtttgggccagagcaggcaagcagaggcccccggttaagccaagcagcgggggcaagcccactctctgagtctgataaggaagataatgggtccgaaggtcagctgaccaacagagaaggccctgaactcccagcctccaagatgcagaggagtcactcacctgtgcccgccgcggcacccgcccacagccccagcccggcctcacccaggagcgtcccgggcagcagtagccagcacagcgcctccccactcgtgcagagccccagcctccagagcagccgggagagcctcaactcctgcggcttcgtggaaggcaagcccaggcccatgggctccccccggctgggcatcgccagcctgtccaagacctcggagtacaagccacccagctctccttcccagagatgcaaagtctacacccagaagggggtcctgccgtctcccgccccactgcctccctcgagcaaggattccggcgtggcgtctagggagtccttgctgcagcccgaggtgcgtacgcccccggttggaatgagcccccaggttttgaaaaaatccatgtctgctgggagcgaagggttcccggaaactcctgtcgatgatgagcagcaggcagctactccttcagagtccaagaaggagatcctgagcaccacgatggtgacggtgcagcagccactggagctgaacggtgaggacgagctggtgttcacgctggtggaggagctgaccatcagcggggtcctggacagcggccgccccaccagcatcatcagcttcaacagcgactgctctgcacgggccctggcctcgggctcgcggcccgtcagcatcatcagcagcatcagcgaggacctggagtgctactccagcacggcccccgtctccgaggtcagcatcacacagttcttgcccctcccgaagatgagcctggatgagaaggcccaggacgcagggagcagacgctcttccatcagctcctggctgagcgagatgagcgcgggcagtgagggtgagcagtcgtgccacagtttcatagcccagacgtgttttgggcacggggaggcaatggcagaacctgtggcctcggagtttgtcagcagcctccagaacaccgctgtggtgtgcagagagaagcccaaggccagccccgacaacttgctcatcctgtctgagatgggagatgactctttcaacaaagcagcccccatcaaaggctgcaaaatatccacagtgagcaaggccatggtcaccatctccaacacggccaatctgagcagctgcgaggggtacatccccatgaagaccaatatcacagtttacccctgcattgccatgagcccccggaacatccaagagccggaggcccccaccgccacccccaaagcaggccccacattagcccagtcccgggagagtaaggaaaacagtgcaaagaaagagatgaaatttgaggacccgtggctgaaacgagaagaggaagtgaaaaaagagacggctcatcccaatgaagaagggatgatgaggtgtgagactgccacgggcccctcgaatgctgagaccagagcagagcaggagcaggacggaaagcccagtccgggagacaggctcagcagcagcagcggagaggtgtcggcctccccggtcactgacaacttcaggagggtcgtggatgggtgtgagatggccctgcccggtttggccacccagagccccgtgcatcccaacaaaagcgtcaagtccagcagccttcccagggcctttcagaaggccagccggcaggaggagccggacagcctctcctattactgcgctgctgagaccaacggggtgggtgcagcctcgggcaccccgccctccaaggctaccctggaggggaaggtggcttcccccaagcactgtgttctggctcggcccaaagggactccccctctgccccctgtccgaaagtccagcctggaccagaagaaccgggccagccctcagcacagtgccagcggcagcggcaccagcagccccctgaaccaaccagccgccttcccggcgggcctcccagacgagcctagcggcaagacgaaggacgccagcagcagcagcaagctcttcagtgccaagctggagcagctggccagcagaagcaactcgctgggcagggcgacagtcagccactacgaatgcctctccctggagcgggccgagagcctgtcctccgtgagctcccggctgcacgcgggcaaggacggcaccatgccccgcgcggggaggagcctgggccgcagcgccgggacctcgccccccagctccggggcctcgcccaaggccggccagtccaagatctccgccgtgagcagactcctcctggccagccccagagcgcgcggcccgtccgcctccaccaccaaaaccctcagcttctccaccaagtccctgccgcaggcggtgggccagggctccagctcgccccccggtgggaagcacacgccctggtccacgcagtccctcagcaggaacaggagctcgggcctggcctccaagcttcccctgcgggccgtcagcgggcgcatctcggagctgctgcagggtggcgcgggcgcccggggcttgcagctgcgggccgggcccgaggcggaggcgcgcgggggggccctggccgaggacgagcccgcggccgcgcacctgctcccgtcgccctacagcaagatcacgcccccgcggaggccccaccgctgcagcagcggccacggcagcgacaacagcagcgtgctgagcggggagctcccgccggccatggggaagacggccctgttctaccacagcggcggcagcagcggctacgagagcgtgatgcgggacagcgaggccaccggcagcgcgtcctcggcgcaggactccacgagcgagaacagcagctccgtgggcggcaggtgccggagcctcaagaccccgaagaaacgctccaatccaggttctcagagacggaggcttatcccagcactatccctggacacctcttcccctgtgagaaaaccccccaacagcacaggcgtccgctgggtggatggccccttgcggagcagcccgaggggccttggggaaccctttgagattaaagtctatgaaatcgatgacgtggagcgcctgcagcggcgacgagggggtgccagcaaggaggccatgtgcttcaatgcaaagctgaagattctggaacaccgccagcagaggatcgccgaggtccgcgcgaagtacgagtggctgatgaaggagctggaggcgaccaaacagtatctgatgctggatcccaacaagtggctcagtgaatttgacttggagcaggtttgggagctggattccctggagtacctggaggcactggagtgtgtgacggagcgcctggagagccgtgtcaacttctgcaaggcccatctcatgatgatcacctgcttcgacatcacctccaggcgccggtagatgagccagacccttgtcctagtggtcccccgctccccaggacttcagagatgttgcacgcccctaggccctctgtgctggggcatcaaagacaatgaatgaggatgaaggttggtggcaagtctggagcgggcgttgagcggaaggcgagttttcttttgttttctgtaggaaaggtgcaaacgtcaaacaccgtggaaggagaaaaggatgggaagcccgaggggtgtccaagccctgtgagactgaaaaagcactttgaggaaccttaaagaccttgtttgtacataagaactgctagcaaaagagacctcactcttctcttgctttcgtgagaaaggaggggcgtggatgtaggattgctgtggaaagcgaacacaaaacaacccagaatgactgattaagtgccttgcaaatctttattattatccaaacatttatgttcatactttcttgtgtacagatggtgctagtcaagatgaaaacaacaaaacaaacaagaaaaacattttggaaatgt

SEQ ID NO: 15417 - DNA, 7287 bp, Homo sapiens
  source 1..7287: mol_type = unassigned DNA
agttaccaagctcggtgaaggagacaagttcccacagctgactcggctcggctctcccaccttcccggcagcggccgcgagccctgattgtatccctcgctttcctcgtgggggagcacggactgacttggctgaagaaaatgccagttctgtggatgtggccgtgacaagaggacgtgcggctggaagaggcagaaggggacgaggaaaagcatgctttgaagagaagaataaaccagcgaccccaaccctttctgcaaattggtgctattacttgtgggatccatttgctttcattccctcccaccccaccgctgaagaaaccttgccctgagggctgagagccagccccctgcagccgggggacgcttctgggttggaggaccttctggatgtagcgtcggtggaacctttagatactctcctctggaaaagccaccatgaattcggtagctgggaataaagagaggcttgcggtctccaccaggggcaagaaatacggggtgaatgaagtctgctcgcccaccaagcccgcagcgcccttctccccggaaagctggtaccggaaagcatacgaggagtcgcgcgccggcagccggcccactcctgagggcgcgggctcagcgctcggctcctcggggaccccgtctcccggctcgggcacctcgtccccgagctcgttcaccggctccccgggacccgcctcccccggcatcggcactagttcgccgggctccttgggcggctctccgggcttcggcacaggctccccgggctccggcagcggcggcggctcctcccccggctcggaccgcggcgtctggtgcgagaactgcaacgcccgcctggtggagctcaagaggcaggccctgaggttgctcctcccggggcccttcccgggcaaggaccctgctttctcggctgtgattcacgacaaactccaggtccccaacaccatccggaaggcatggaacgaccgggacaaccgctgtgacatttgcgccactcacctgaaccagttgaagcaggaggccatccagatggtgctgacgttggagcaggcagccggcagtgagcactacgacgcctcgccctgctccccgccaccgctctccaacatccccaccctggtggggtcccggcacgtgggtgggctccagcagcccagagactgggcctttgtgcccgccccctgtgccacctccaactacacaggcttcgccaacaagcacggcagcaaacccagcagccttggggtcagcaatggggcggaaaagaagagcgggtccccaacccaccaggccaaggtcagcctccagatggccaccagtccaagcaatgggaacatcctcaattcggtggccatccaggctcaccagtacctggatggcacctggtccctgtcgagaaccaacggggtcaccctgtacccataccagatctcccagctgatgacagagagtagccgggagggactaacagaagcagtgctgaaccgctacaatgcagacaagccttccgcctgcagtgtcccagcctcgcagggctcctgcgtggccagcgagacttccacaggcacatcggtggccgcctccttctttgcacgagctgcccagaagttaaatctgtcttctaaaaagaagaaacatcggccttccacttcttccgctgccgaaccaccgctctttgcaaccagcttcagtgggattctgcagacctcccctcccccagccccaccctgcctgctgagggctgtcaacaaggtgaaggacaccccggggctgggcaaggtgaaagtcatgcttcgcatctgttccaccttggctcgagatacttcagaatccagctctttcttaaaggtggacccacggaagaagcagatcaccttgtacgatcccctgacttgtggaggtcaaaatgccttccaaaagagaggcaaccaggttcctccaaagatgtttgccttcgatgcagtttttccacaagacgcttctcaggctgaagtgtgtgcaggcaccgtggcagaggtgatccagtctgtggtcaacggggcagatggctgcgtgttctgtttcggccacgccaaactgggaaaatcctacaccatgatcggaaaggatgattccatgcagaacctgggcatcattccctgtgccatctcttggctcttcaagctcataaacgaacgcaaggaaaagaccggcgcccgtttctcagtccgggtttccgccgtggaagtgtgggggaaggaggagaacctgcgggacctgctgtcggaggtggccacgggcagcctgcaggacggccagtccccgggcgtgtacctctgtgaggaccccatctgcggcacgcagctgcagaaccagagcgagctgcgggcccccaccgcagagaaggctgcctttttcctggatgccgccattgcctcccgcaggagccaccaacaggactgtgatgaggacgaccaccgcaactcacacgtgttcttcacactgcacatctaccagtaccggatggagaagagcgggaaagggggaatgtctggaggtcgcagccgcctgcatctcattgatctcggcagctgtgtgaaagctcttagcaaaaatcgagaaggaggctcagggctgtgtctctcgctgtctgctctgggcaatgtcatcctggctctcgtcaatggcagcaaacacattccatacaaagagagcaagctcgccatgttgctgcgggagtctctggggaacatgaactgccgtaccaccatgatcgcgcacatctcggccgcggtcgggagctacgcggagaccctgtccaccatccagattgcatcgagagtcttgaggatgaagaaaaagaagacgaagtacacatccagctcgtccggcggggagagctcctgcgaagaaggccgcatgcgcaggcccacccagctgagacccttccacaccagggccacggtggaccctgacttccccatcgctcacctgtccagcgaccccgactactcctccagcagcgagcagtcctgcgacaccgtcatctacatcgggcccaacggcacggccctctctgacaaggagctcaccgacaacgagggccccccagactttgtccctatcgtgccagccctgcagaagacccggggcgacagccggcccgcagaggcaggagaggctgcagccggcaagtcagaaagggactgcctgaagtgcaacacgtttgccgagctgcaggagaggctggactgcatcgacggcagcgaggagcccagcagctttcctttcgaagaactgcctgctcagtttgggccagagcaggcaagcagaggcccccggttaagccaagcagcgggggcaagcccactctctgagtctgataaggaagataatgggtccgaaggtcagctgaccaacagagaaggccctgaactcccagcctccaagatgcagaggagtcactcacctgtgcccgccgcggcacccgcccacagccccagcccggcctcacccaggagcgtcccgggcagcagtagccagcacagcgcctccccactcgtgcagagccccagcctccagagcagccgggagagcctcaactcctgcggcttcgtggaaggcaagcccaggcccatgggctccccccggctgggcatcgccagcctgtccaagacctcggagtacaagccacccagctctccttcccagagatgcaaagtctacacccagaagggggtcctgccgtctcccgccccactgcctccctcgagcaaggattccggcgtggcgtctagggagtccttgctgcagcccgaggtgcgtacgcccccggttggaatgagcccccaggttttgaaaaaatccatgtctgctgggagcgaagggttcccggaaactcctgtcgatgatgagcagcaggcagctactccttcagagtccaagaaggagatcctgagcaccacgatggtgacggtgcagcagccactggagctgaacggtgaggacgagctggtgttcacgctggtggaggagctgaccatcagcggggtcctggacagcggccgccccaccagcatcatcagcttcaacagcgactgctctgcacgggccctggcctcgggctcgcggcccgtcagcatcatcagcagcatcagcgaggacctggagtgctactccagcacggcccccgtctccgaggtcagcatcacacagttcttgcccctcccgaagatgagcctggatgagaaggcccaggacgcagggagcagacgctcttccatcagctcctggctgagcgagatgagcgcgggcagtgagggtgagcagtcgtgccacagtttcatagcccagacgtgttttgggcacggggaggcaatggcagaacctgtggcctcggagtttgtcagcagcctccagaacaccgctgtggtgtgcagagagaagcccaaggccagccccgacaacttgctcatcctgtctgagatgggagatgactctttcaacaaagcagcccccatcaaaggctgcaaaatatccacagtgagcaaggccatggtcaccatctccaacacggccaatctgagcagctgcgaggggtacatccccatgaagaccaatatcacagtttacccctgcattgccatgagcccccggaacatccaagagccggaggcccccaccgccacccccaaagcaggccccacattagcccagtcccgggagagtaaggaaaacagtgcaaagaaagagatgaaatttgaggacccgtggctgaaacgagaagaggaagtgaaaaaagagacggctcatcccaatgaagaagggatgatgaggtgtgagactgccacgggcccctcgaatgctgagaccagagcagagcaggagcaggacggaaagcccagtccgggagacaggctcagcagcagcagcggagaggtgtcggcctccccggtcactgacaacttcaggagggtcgtggatgggtgtgagatggccctgcccggtttggccacccagagccccgtgcatcccaacaaaagcgtcaagtccagcagccttcccagggcctttcagaaggccagccggcaggaggagccggacagcctctcctattactgcgctgctgagaccaacggggtgggtgcagcctcgggcaccccgccctccaaggctaccctggaggggaaggtggcttcccccaagcactgtgttctggctcggcccaaagggactccccctctgccccctgtccgaaagtccagcctggaccagaagaaccgggccagccctcagcacagtgccagcggcagcggcaccagcagccccctgaaccaaccagccgccttcccggcgggcctcccagacgagcctagcggcaagacgaaggacgccagcagcagcagcaagctcttcagtgccaagctggagcagctggccagcagaagcaactcgctgggcagggcgacagtcagccactacgaatgcctctccctggagcgggccgagagcctgtcctccgtgagctcccggctgcacgcgggcaaggacggcaccatgccccgcgcggggaggagcctgggccgcagcgccgggacctcgccccccagctccggggcctcgcccaaggccggccagtccaagatctccgccgtgagcagactcctcctggccagccccagagcgcgcggcccgtccgcctccaccaccaaaaccctcagcttctccaccaagtccctgccgcaggcggtgggccagggctccagctcgccccccggtgggaagcacacgccctggtccacgcagtccctcagcaggaacaggagctcgggcctggcctccaagcttcccctgcgggccgtcagcgggcgcatctcggagctgctgcagggtggcgcgggcgcccggggcttgcagctgcgggccgggcccgaggcggaggcgcgcgggggggccctggccgaggacgagcccgcggccgcgcacctgctcccgtcgccctacagcaagatcacgcccccgcggaggccccaccgctgcagcagcggccacggcagcgacaacagcagcgtgctgagcggggagctcccgccggccatggggaagacggccctgttctaccacagcggcggcagcagcggctacgagagcgtgatgcgggacagcgaggccaccggcagcgcgtcctcggcgcaggactccacgagcgagaacagcagctccgtgggcggcaggtgccggagcctcaagaccccgaagaaacgctccaatccaggttctcagagacggaggcttatcccagcactatccctggacacctcttcccctgtgagaaaaccccccaacagcacaggcgtccgctgggtggatggccccttgcggagcagcccgaggggccttggggaaccctttgagattaaagtctatgaaatcgatgacgtggagcgcctgcagcggcgacgagggggtgccagcaaggaggccatgtgcttcaatgcaaagctgaagattctggaacaccgccagcagaggatcgccgaggtccgcgcgaagtacgagtggctgatgaaggagctggaggcgaccaaacagtatctgatgctggatcccaacaagtggctcagtgaatttgacttggagcaggtttgggagctggattccctggagtacctggaggcactggagtgtgtgacggagcgcctggagagccgtgtcaacttctgcaaggcccatctcatgatgatcacctgcttcgacatcacctccaggcgccggtagatgagccagacccttgtcctagtggtcccccgctccccaggacttcagagatgttgcacgcccctaggccctctgtgctggggcatcaaagacaatgaatgaggatgaaggttggtggcaagtctggagcgggcgttgagcggaaggcgagttttcttttgttttctgtaggaaaggtgcaaacgtcaaacaccgtggaaggagaaaaggatgggaagcccgaggggtgtccaagccctgtgagactgaaaaagcactttgaggaaccttaaagaccttgtttgtacataagaactgctagcaaaagagacctcactcttctcttgctttcgtgagaaaggaggggcgtggatgtaggattgctgtggaaagcgaacacaaaacaacccagaatgactgattaagtgccttgcaaatctttattattatccaaacatttatgttcatactttcttgtgtacagatggtgctagtcaagatgaaaacaacaaaacaaacaagaaaaacattttggaaatgt

SEQ ID NO: 15418 - DNA, 5695 bp, Homo sapiens
  source 1..5695: mol_type = unassigned DNA
gattggaaaacgaaagctgcccagaagttaaatctgtcttctaaaaagaagaaacatcggccttccacttcttccgctgccgaaccaccgctctttgcaaccagcttcagtgggattctgcagacctcccctcccccagccccaccctgcctgctgagggctgtcaacaaggtgaaggacaccccggggctgggcaaggtgaaagtcatgcttcgcatctgttccaccttggctcgagatacttcagaatccagctctttcttaaaggtggacccacggaagaagcagatcaccttgtacgatcccctgacttgtggaggtcaaaatgccttccaaaagagaggcaaccaggttcctccaaagatgtttgccttcgatgcagtttttccacaagacgcttctcaggctgaagtgtgtgcaggcaccgtggcagaggtgatccagtctgtggtcaacggggcagatggctgcgtgttctgtttcggccacgccaaactgggaaaatcctacaccatgatcggaaaggatgattccatgcagaacctgggcatcattccctgtgccatctcttggctcttcaagctcataaacgaacgcaaggaaaagaccggcgcccgtttctcagtccgggtttccgccgtggaagtgtgggggaaggaggagaacctgcgggacctgctgtcggaggtggccacgggcagcctgcaggacggccagtccccgggcgtgtacctctgtgaggaccccatctgcggcacgcagctgcagaaccagagcgagctgcgggcccccaccgcagagaaggctgcctttttcctggatgccgccattgcctcccgcaggagccaccaacaggactgtgatgaggacgaccaccgcaactcacacgtgttcttcacactgcacatctaccagtaccggatggagaagagcgggaaagggggaatgtctggaggtcgcagccgcctgcatctcattgatctcggcagctgtgtgaaagctcttagcaaaaatcgagaaggaggctcagggctgtgtctctcgctgtctgctctgggcaatgtcatcctggctctcgtcaatggcagcaaacacattccatacaaagagagcaagctcgccatgttgctgcgggagtctctggggaacatgaactgccgtaccaccatgatcgcgcacatctcggccgcggtcgggagctacgcggagaccctgtccaccatccagattgcatcgagagtcttgaggatgaagaaaaagaagacgaagtacacatccagctcgtccggcggggagagctcctgcgaagaaggccgcatgcgcaggcccacccagctgagacccttccacaccagggccacggtggaccctgacttccccatcgctcacctgtccagcgaccccgactactcctccagcagcgagcagtcctgcgacaccgtcatctacatcgggcccaacggcacggccctctctgacaaggagctcaccgacaacgagggccccccagactttgtccctatcgtgccagccctgcagaagacccggggcgacagccggcccgcagaggcaggagaggctgcagccggcaagtcagaaagggactgcctgaagtgcaacacgtttgccgagctgcaggagaggctggactgcatcgacggcagcgaggagcccagcagctttcctttcgaagaactgcctgctcagtttgggccagagcaggcaagcagaggcccccggttaagccaagcagcgggggcaagcccactctctgagtctgataaggaagataatgggtccgaaggtcagctgaccaacagagaaggccctgaactcccagcctccaagatgcagaggagtcactcacctgtgcccgccgcggcacccgcccacagccccagcccggcctcacccaggagcgtcccgggcagcagtagccagcacagcgcctccccactcgtgcagagccccagcctccagagcagccgggagagcctcaactcctgcggcttcgtggaaggcaagcccaggcccatgggctccccccggctgggcatcgccagcctgtccaagacctcggagtacaagccacccagctctccttcccagagatgcaaagtctacacccagaagggggtcctgccgtctcccgccccactgcctccctcgagcaaggattccggcgtggcgtctagggagtccttgctgcagcccgaggtgcgtacgcccccggttggaatgagcccccaggttttgaaaaaatccatgtctgctgggagcgaagggttcccggaaactcctgtcgatgatgagcagcaggcagctactccttcagagtccaagaaggagatcctgagcaccacgatggtgacggtgcagcagccactggagctgaacggtgaggacgagctggtgttcacgctggtggaggagctgaccatcagcggggtcctggacagcggccgccccaccagcatcatcagcttcaacagcgactgctctgcacgggccctggcctcgggctcgcggcccgtcagcatcatcagcagcatcagcgaggacctggagtgctactccagcacggcccccgtctccgaggtcagcatcacacagttcttgcccctcccgaagatgagcctggatgagaaggcccaggacgcagggagcagacgctcttccatcagctcctggctgagcgagatgagcgcgggcagtgagggtgagcagtcgtgccacagtttcatagcccagacgtgttttgggcacggggaggcaatggcagaacctgtggcctcggagtttgtcagcagcctccagaacaccgctgtggtgtgcagagagaagcccaaggccagccccgacaacttgctcatcctgtctgagatgggagatgactctttcaacaaagcagcccccatcaaaggctgcaaaatatccacagtgagcaaggccatggtcaccatctccaacacggccaatctgagcagctgcgaggggtacatccccatgaagaccaatatcacagtttacccctgcattgccatgagcccccggaacatccaagagccggaggcccccaccgccacccccaaagcaggccccacattagcccagtcccgggagagtaaggaaaacagtgcaaagaaagagatgaaatttgaggacccgtggctgaaacgagaagaggaagtgaaaaaagagacggctcatcccaatgaagaagggatgatgaggtgtgagactgccacgggcccctcgaatgctgagaccagagcagagcaggagcaggacggaaagcccagtccgggagacaggctcagcagcagcagcggagaggtgtcggcctccccggtcactgacaacttcaggagggtcgtggatgggtgtgagatggccctgcccggtttggccacccagagccccgtgcatcccaacaaaagcgtcaagtccagcagccttcccagggcctttcagaaggccagccggcaggaggagccggacagcctctcctattactgcgctgctgagaccaacggggtgggtgcagcctcgggcaccccgccctccaaggctaccctggaggggaaggtggcttcccccaagcactgtgttctggctcggcccaaagggactccccctctgccccctgtccgaaagtccagcctggaccagaagaaccgggccagccctcagcacagtgccagcggcagcggcaccagcagccccctgaaccaaccagccgccttcccggcgggcctcccagacgagcctagcggcaagacgaaggacgccagcagcagcagcaagctcttcagtgccaagctggagcagctggccagcagaagcaactcgctgggcagggcgacagtcagccactacgaatgcctctccctggagcgggccgagagcctgtcctccgtgagctcccggctgcacgcgggcaaggacggcaccatgccccgcgcggggaggagcctgggccgcagcgccgggacctcgccccccagctccggggcctcgcccaaggccggccagtccaagatctccgccgtgagcagactcctcctggccagccccagagcgcgcggcccgtccgcctccaccaccaaaaccctcagcttctccaccaagtccctgccgcaggcggtgggccagggctccagctcgccccccggtgggaagcacacgccctggtccacgcagtccctcagcaggaacaggagctcgggcctggcctccaagcttcccctgcgggccgtcagcgggcgcatctcggagctgctgcagggtggcgcgggcgcccggggcttgcagctgcgggccgggcccgaggcggaggcgcgcgggggggccctggccgaggacgagcccgcggccgcgcacctgctcccgtcgccctacagcaagatcacgcccccgcggaggccccaccgctgcagcagcggccacggcagcgacaacagcagcgtgctgagcggggagctcccgccggccatggggaagacggccctgttctaccacagcggcggcagcagcggctacgagagcgtgatgcgggacagcgaggccaccggcagcgcgtcctcggcgcaggactccacgagcgagaacagcagctccgtgggcggcaggtgccggagcctcaagaccccgaagaaacgctccaatccaggttctcagagacggaggcttatcccagcactatccctggacacctcttcccctgtgagaaaaccccccaacagcacaggcgtccgctgggtggatggccccttgcggagcagcccgaggggccttggggaaccctttgagattaaagtctatgaaatcgatgacgtggagcgcctgcagcggcgacgagggggtgccagcaaggaggccatgtgcttcaatgcaaagctgaagattctggaacaccgccagcagaggatcgccgaggtccgcgcgaagtacgagtggctgatgaaggagctggaggcgaccaaacagtatctgatgctggatcccaacaagtggctcagtgaatttgacttggagcaggtttgggagctggattccctggagtacctggaggcactggagtgtgtgacggagcgcctggagagccgtgtcaacttctgcaaggcccatctcatgatgatcacctgcttcgacatcacctccaggcgccggtagatgagccagacccttgtcctagtggtcccccgctccccaggacttcagagatgttgcacgcccctaggccctctgtgctggggcatcaaagacaatgaatgaggatgaaggttggtggcaagtctggagcgggcgttgagcggaaggcgagttttcttttgttttctgtaggaaaggtgcaaacgtcaaacaccgtggaaggagaaaaggatgggaagcccgaggggtgtccaagccctgtgagactgaaaaagcactttgaggaaccttaaagaccttgtttgtacataagaactgctagcaaaagagacctcactcttctcttgctttcgtgagaaaggaggggcgtggatgtaggattgctgtggaaagcgaacacaaaacaacccagaatgactgattaagtgccttgcaaatctttattattatccaaacatttatgttcatactttcttgtgtacagatggtgctagtcaagatgaaaacaacaaaacaaacaagaaaaacattttggaaatgt

SEQ ID NO: 15419 - DNA, 2955 bp, Homo sapiens
  source 1..2955: mol_type = unassigned DNA
ggaagccgtaactggggaagtttctgggcccagaagaaaatgtaggtagtcttagggttaggtagcagctgtcaggaacttgcccctgcccataagatcctaaagggcccccatttgactctcaccagacagttagaacttgtttcctcctccgtgtcagccatcaagaggtgcttggggggctgtgcccagcaggacctcactgcccagcagatcagcaggggagccaagtggcctagatctgctgtggagtacccgactgtttgcctgcctgtctgccctcctcttcacctcattctcatcactgacgtctaccattggcttggaaatcagaaacccatatccatctagatgattgattttgatgatgtggctgcaataaacccagaactcttacagcttcttcccttacatccgaaggacaatctgcccttgcaggaaaatgtaacaatccagaaacaaaaacggagatccgtcaactccaaaattcctgctccaaaagaaagtcttcgaagccgctccactcgcatgtccactgtctcagagcttcgcatcacggctcaggagaatgacatggaggtggagctgcctgcagctgcaaactcccgcaagcagttttcagttcctcctgcccccactaggccttcctgccctgcagtggctgaaataccattgaggatggtcagcgaggagatggaagagcaagtccattccatccgaggcagctcttctgcaaaccctgtgaactcagttcggaggaaatcatgtcttgtgaaggaagtggaaaaaatgaagaacaagcgagaagagaagaaggcccagaactctgaaatgagaatgaagagagctcaggagtatgacagtagttttccaaactgggaatttgcccgaatgattaaagaatttcgggctactttggaatgtcatccacttactatgactgatcctatcgaagagcacagaatatgtgtctgtgttaggaaacgcccactgaataagcaagaattggccaagaaagaaattgatgtgatttccattcctagcaagtgtctcctcttggtacatgaacccaagttgaaagtggacttaacaaagtatctggagaaccaagcattctgctttgactttgcatttgatgaaacagcttcgaatgaagttgtctacaggttcacagcaaggccactggtacagacaatctttgaaggtggaaaagcaacttgttttgcatatggccagacaggaagtggcaagacacatactatgggcggagacctctctgggaaagcccagaatgcatccaaagggatctatgccatggcctcccgggacgtcttcctcctgaagaatcaaccctgctaccggaagttgggcctggaagtctatgtgacattcttcgagatctacaatgggaagctgtttgacctgctcaacaagaaggccaagctgcgcgtgctggaggacggcaagcaacaggtgcaagtggtggggctgcaggagcatctggttaactctgctgatgatgtcatcaagatgatcgacatgggcagcgcctgcagaacctctgggcagacatttgccaactccaattcctcccgctcccacgcgtgcttccaaattattcttcgagctaaagggagaatgcatggcaagttctctttggtagatctggcagggaatgagcgaggcgcggacacttccagtgctgaccggcagacccgcatggagggcgcagaaatcaacaagagtctcttagccctgaaggagtgcatcagggccctgggacagaacaaggctcacaccccgttccgtgagagcaagctgacacaggtgctgagggactccttcattggggagaactctaggacttgcatgattgccacgatctcaccaggcataagctcctgtgaatatactttaaacaccctgagatatgcagacagggtcaaggagctgagcccccacagtgggcccagtggagagcagttgattcaaatggaaacagaagagatggaagcctgctctaacggggcgctgattccaggcaatttatccaaggaagaggaggaactgtcttcccagatgtccagctttaacgaagccatgactcagatcagggagctggaggagaaggctatggaagagctcaaggagatcatacagcaaggaccagactggcttgagctctctgagatgaccgagcagccagactatgacctggagacctttgtgaacaaagcggaatctgctctggcccagcaagccaagcatttctcagccctgcgagatgtcatcaaggccttgcgcctggccatgcagctggaagagcaggctagcagacaaataagcagcaagaaacggccccagtgacgactgcaaataaaaatctgtttggtttgacacccagcctcttccctggccctccccagagaactttgggtacctggtgggtctaggcagggtctgagctgggacaggttctggtaaatgccaagtatgggggcatctgggcccagggcagctggggagggggtcagagtgacatgggacactccttttctgttcctcagttgtcgccctcacgagaggaaggagctcttagttacccttttgtgttgcccttctttccatcaaggggaatgttctcagcatagagctttctccgcagcatcctgcctgcgtggactggctgctaatggagagctccctggggttgtcctggctctggggagagagacggagcctttagtacagctatctgctggctctaaaccttctacgcctttgggccgagcactgaatgtcttgtactttaaaaaaatgtttctgagacctctttctactttactgtctccctagagatcctagaggatccctactgttttctgttttatgtgtttatacattgtatgtaacaataaagagaaaaaataaatcagctgtttaagtgtgtggaaa

SEQ ID NO: 15420 - DNA, 2711 bp, Homo sapiens
  source 1..2711: mol_type = unassigned DNA
aagacttcgtagggttagcgaaattgaggtttcttggtattgcgcgtttctcttccttgctgactctccgaatggccatggactcgtcgcttcaggcccgcctgtttcccggtctcgctatcaagatccaacgcagtaatggtttaattcacagtgccaatgtaaggactgtgaacttggagaaatcctgtgtttcagtggaatgggcagaaggaggtgccacaaagggcaaagagattgattttgatgatgtggctgcaataaacccagaactcttacagcttcttcccttacatccgaaggacaatctgcccttgcaggaaaatgtaacaatccagaaacaaaaacggagatccgtcaactccaaaattcctgctccaaaagaaagtcttcgaagccgctccactcgcatgtccactgtctcagagcttcgcatcacggctcaggagaatgacatggaggtggagctgcctgcagctgcaaactcccgcaagcagttttcagttcctcttcggaggaaatcatgtcttgtgaaggaagtggaaaaaatgaagaacaagcgagaagagaagaaggcccagaactctgaaatgagaatgaagagagctcaggagtatgacagtagttttccaaactgggaatttgcccgaatgattaaagaatttcgggctactttggaatgtcatccacttactatgactgatcctatcgaagagcacagaatatgtgtctgtgttaggaaacgcccactgaataagcaagaattggccaagaaagaaattgatgtgatttccattcctagcaagtgtctcctcttggtacatgaacccaagttgaaagtggacttaacaaagtatctggagaaccaagcattctgctttgactttgcatttgatgaaacagcttcgaatgaagttgtctacaggttcacagcaaggccactggtacagacaatctttgaaggtggaaaagcaacttgttttgcatatggccagacaggaagtggcaagacacatactatgggcggagacctctctgggaaagcccagaatgcatccaaagggatctatgccatggcctcccgggacgtcttcctcctgaagaatcaaccctgctaccggaagttgggcctggaagtctatgtgacattcttcgagatctacaatgggaagctgtttgacctgctcaacaagaaggccaagctgcgcgtgctggaggacggcaagcaacaggtgcaagtggtggggctgcaggagcatctggttaactctgctgatgatgtcatcaagatgatcgacatgggcagcgcctgcagaacctctgggcagacatttgccaactccaattcctcccgctcccacgcgtgcttccaaattattcttcgagctaaagggagaatgcatggcaagttctctttggtagatctggcagggaatgagcgaggcgcggacacttccagtgctgaccggcagacccgcatggagggcgcagaaatcaacaagagtctcttagccctgaaggagtgcatcagggccctgggacagaacaaggctcacaccccgttccgtgagagcaagctgacacaggtgctgagggactccttcattggggagaactctaggacttgcatgattgccacgatctcaccaggcataagctcctgtgaatatactttaaacaccctgagatatgcagacagggtcaaggagctgagcccccacagtgggcccagtggagagcagttgattcaaatggaaacagaagagatggaagcctgctctaacggggcgctgattccaggcaatttatccaaggaagaggaggaactgtcttcccagatgtccagctttaacgaagccatgactcagatcagggagctggaggagaaggctatggaagagctcaaggagatcatacagcaaggaccagactggcttgagctctctgagatgaccgagcagccagactatgacctggagacctttgtgaacaaagcggaatctgctctggcccagcaagccaagcatttctcagccctgcgagatgtcatcaaggccttgcgcctggccatgcagctggaagagcaggctagcagacaaataagcagcaagaaacggccccagtgacgactgcaaataaaaatctgtttggtttgacacccagcctcttccctggccctccccagagaactttgggtacctggtgggtctaggcagggtctgagctgggacaggttctggtaaatgccaagtatgggggcatctgggcccagggcagctggggagggggtcagagtgacatgggacactccttttctgttcctcagttgtcgccctcacgagaggaaggagctcttagttacccttttgtgttgcccttctttccatcaaggggaatgttctcagcatagagctttctccgcagcatcctgcctgcgtggactggctgctaatggagagctccctggggttgtcctggctctggggagagagacggagcctttagtacagctatctgctggctctaaaccttctacgcctttgggccgagcactgaatgtcttgtactttaaaaaaatgtttctgagacctctttctactttactgtctccctagagatcctagaggatccctactgttttctgttttatgtgtttatacattgtatgtaacaataaagagaaaaaataaatcagctgtttaagtgtgtgg

SEQ ID NO: 15421 - DNA, 2095 bp, Homo sapiens
  source 1..2095: mol_type = unassigned DNA
aaggcatgggcaggaagccgtaactggggaagtttctgggcccagaagaaaatattgattttgatgatgtggctgcaataaacccagaactcttacagcttcttcccttacatccgaaggacaatctgcccttgcaggaaaatgtaacaatccagaaacaaaaacggagatccgtcaactccaaaattcctgctccaaaagaaagtcttcgaagccgctccactcgcatgtccactgtctcagagcttcgcatcacggctcaggagaatgacatggaggtggagctgcctgcagctgcaaactcccgcaagcagttttcagttcctcctgcccccactaggccttcctgccctgcagtggctgaaataccattgaggatggtcagcgaggagatggaagagcaagtccattccatccgaggcagctcttctgcaaaccctgtgaactcagttcggaggaaatcatgtcttgtgaaggaagtggaaaaaatgaagaacaagcgagaagagaagaaggcccagaactctgaaatgagaatgaagagagctcaggagtatgacagtagttttccaaactgggaatttgcccgaatgattaaagaatttcgggctactttggaatgtcatccacttactatgactgatcctatcgaagagcacagaatatgtgtctgtgttaggaaacgcccactgaataagcaagaattggccaagaaagaaattgatgtgatttccattcctagcaagtgtctcctcttggtacatgaacccaagttgaaagtggacttaacaaagtatctggagaaccaagcattctgctttgactttgcatttgatgaaacagcttcgaatgaagttgtctacaggttcacagcaaggccactggtacagacaatctttgaaggtggaaaagcaacttgttttgcatatggccagacaggaagtggcaagacacatactatgggcggagacctctctgggaaagcccagaatgcatccaaagggatctatgccatggcctcccgggacgtcttcctcctgaagaatcaaccctgctaccggaagttgggcctggaagtctatgtgacattcttcgagatctacaatgggaagctgtttgacctgctcaacaagaaggccaagctgcgcgtgctggaggacggcaagcaacaggtgcaagtggtggggctgcaggagcatctggttaactctgctgatgatgtcatcaagatgatcgacatgggcagcgcctgcagaacctctgggcagacatttgccaactccaattcctcccgctcccacgcgtgcttccaaattattcttcgagctaaagggagaatgcatggcaagttctctttggtagatctggcagggaatgagcgaggcgcggacacttccagtgctgaccggcagacccgcatggagggcgcagaaatcaacaagagtctcttagccctgaaggagtgcatcagggccctgggacagaacaaggctcacaccccgttccgtgagagcaagctgacacaggtgctgagggactccttcattggggagaactctaggacttgcatgattgccacgatctcaccaggcataagctcctgtgaatatactttaaacaccctgagatatgcagacagggtcaaggagctgagcccccacagtgggcccagtggagagcagttgattcaaatggaaacagaagagatggaagcctgctctaacggggcgctgattccaggcaatttatccaaggaagaggaggaactgtcttcccagatgtccagctttaacgaagccatgactcagatcagggagctggaggagaaggctatggaagagctcaaggagatcatacagcaaggaccagactggcttgagctctctgagatgaccgagcagccagactatgacctggagacctttgtgaacaaagcggaatctgctctggcccagcaagccaagcatttctcagccctgcgagatgtcatcaaggccttgcgcctggccatgcagctggaagagcaggctagcagacaaataagcagcaagaaacggccccagtgacgactgcaaataaaaatctgtttggtttg

SEQ ID NO: 15422 - DNA, 2879 bp, Homo sapiens
  source 1..2879: mol_type = unassigned DNA
gcttgcgcgcgggatttaaactgcggcggtttacgcggcgttaagacttcgtagggttagcgaaattgaggtttcttggtattgcgcgtttctcttccttgctgactctccgaatggccatggactcgtcgcttcaggcccgcctgtttcccggtctcgctatcaagatccaacgcagtaatggtttaattcacagtgccaatgtaaggactgtgaacttggagaaatcctgtgtttcagtggaatgggcagaaggaggtgccacaaagggcaaagagattgattttgatgatgtggctgcaataaacccagaactcttacagcttcttcccttacatccgaaggacaatctgcccttgcaggaaaatgtaacaatccagaaacaaaaacggagatccgtcaactccaaaattcctgctccaaaagaaagtcttcgaagccgctccactcgcatgtccactgtctcagagcttcgcatcacggctcaggagaatgacatggaggtggagctgcctgcagctgcaaactcccgcaagcagttttcagttcctcctgcccccactaggccttcctgccctgcagtggctgaaataccattgaggatggtcagcgaggagatggaagagcaagtccattccatccgaggcagctcttctgcaaaccctgtgaactcagttcggaggaaatcatgtcttgtgaaggaagtggaaaaaatgaagaacaagcgagaagagaagaaggcccagaactctgaaatgagaatgaagagagctcaggagtatgacagtagttttccaaactgggaatttgcccgaatgattaaagaatttcgggctactttggaatgtcatccacttactatgactgatcctatcgaagagcacagaatatgtgtctgtgttaggaaacgcccactgaataagcaagaattggccaagaaagaaattgatgtgatttccattcctagcaagtgtctcctcttggtacatgaacccaagttgaaagtggacttaacaaagtatctggagaaccaagcattctgctttgactttgcatttgatgaaacagcttcgaatgaagttgtctacaggttcacagcaaggccactggtacagacaatctttgaaggtggaaaagcaacttgttttgcatatggccagacaggaagtggcaagacacatactatgggcggagacctctctgggaaagcccagaatgcatccaaagggatctatgccatggcctcccgggacgtcttcctcctgaagaatcaaccctgctaccggaagttgggcctggaagtctatgtgacattcttcgagatctacaatgggaagctgtttgacctgctcaacaagaaggccaagctgcgcgtgctggaggacggcaagcaacaggtgcaagtggtggggctgcaggagcatctggttaactctgctgatgatgtcatcaagatgatcgacatgggcagcgcctgcagaacctctgggcagacatttgccaactccaattcctcccgctcccacgcgtgcttccaaattattcttcgagctaaagggagaatgcatggcaagttctctttggtagatctggcagggaatgagcgaggcgcggacacttccagtgctgaccggcagacccgcatggagggcgcagaaatcaacaagagtctcttagccctgaaggagtgcatcagggccctgggacagaacaaggctcacaccccgttccgtgagagcaagctgacacaggtgctgagggactccttcattggggagaactctaggacttgcatgattgccacgatctcaccaggcataagctcctgtgaatatactttaaacaccctgagatatgcagacagggtcaaggagctgagcccccacagtgggcccagtggagagcagttgattcaaatggaaacagaagagatggaagcctgctctaacggggcgctgattccaggcaatttatccaaggaagaggaggaactgtcttcccagatgtccagctttaacgaagccatgactcagatcagggagctggaggagaaggctatggaagagctcaaggagatcatacagcaaggaccagactggcttgagctctctgagatgaccgagcagccagactatgacctggagacctttgtgaacaaagcggaatctgctctggcccagcaagccaagcatttctcagccctgcgagatgtcatcaaggccttgcgcctggccatgcagctggaagagcaggctagcagacaaataagcagcaagaaacggccccagtgacgactgcaaataaaaatctgtttggtttgacacccagcctcttccctggccctccccagagaactttgggtacctggtgggtctaggcagggtctgagctgggacaggttctggtaaatgccaagtatgggggcatctgggcccagggcagctggggagggggtcagagtgacatgggacactccttttctgttcctcagttgtcgccctcacgagaggaaggagctcttagttacccttttgtgttgcccttctttccatcaaggggaatgttctcagcatagagctttctccgcagcatcctgcctgcgtggactggctgctaatggagagctccctggggttgtcctggctctggggagagagacggagcctttagtacagctatctgctggctctaaaccttctacgcctttgggccgagcactgaatgtcttgtactttaaaaaaatgtttctgagacctctttctactttactgtctccctagagatcctagaggatccctactgttttctgttttatgtgtttatacattgtatgtaacaataaagagaaaaaataaatcagctgtttaagtgtgtggaaa

SEQ ID NO: 15423 - DNA, 320 bp, Homo sapiens
  source 1..320: mol_type = unassigned DNA
tgaaggagtgcatcagggccctgggacagaacaaggctcacaccccgttccgtgagagcaagctgacacaggtgctgagggactccttcattggggagaactctaggacttgcatgattgccacgatctcaccaggcataagctcctgtgaatatactttaaacaccctgagatatgcagacaggcaaggttgccattccatccccttggagcctcaagcctcgaagcctgggcggtgccacattcctctgttatccaaggaagaggaggaactgtcttcccagatgtccagctttaacgaagccatgactcagatcagg

SEQ ID NO: 15424 - DNA, 1124 bp, Homo sapiens
  source 1..1124: mol_type = unassigned DNA
acgcttgcgcgcgggatttaaactgcggcggtttacgcggcgttaagacttcgtagggttagcgaaattgaggtttcttggtattgcgcgtttctcttccttgctgactctccgaatggccatggactcgtcgcttcaggcccgcctgtttcccggtctcgctatcaagatccaacgcagtaatggtttaattcacagtgccaatgtaaggactgtgaacttggagaaatcctgtgtttcagtggaatgggcagaaggaggtgccacaaagggcaaagagattgattttgatgatgtggctgcaataaacccagaactcttacagcttcttcccttacatccgaaggacaatctgcccttgcaggaaaatgtaacaatccagaaacaaaaacggagatccgtcaactccaaaattcctgctccaaaagaaagtcttcgaagccgctccactcgcatgtccactgtctcagagcttcgcatcacggctcaggagaatgacatggaggtggagctgcctgcagctgcaaactcccgcaagcagttttcagttcctcttcggaggaaatcatgtcttgtgaaggaagtggaaaaaatgaagaacaagcgagaagagaagaaggcccagaactctgaaatgagaatgaagagagctcaggagtatgacagtagttttccaaactgggaatttgcccgaatgattaaagaatttcgggctactttggaatgtcatccacttactatgactgatcctatcgaagagcacagaatatgtgtctgtgttaggaaacgcccactgaataagcaagaattggccaagaaagaaattgatgtgatttccattcctagcaagtgtctcctcttggtacatgaacccaagttgaaagtggacttaacaaagtatctggagaaccaagcattctgctttgactttgcatttgatgaaacagcttcgaatgaagttgtctacaggttcacagcaaggccactggtacagacaatctttgaaggtggaaaagcaacttgttttgcatatggccagacaggaagtggcaagacacatactatgggcggagacctctctgggaaagcccagaatgcatccaaagggatctatgccatggcct

SEQ ID NO: 15425 - DNA, 908 bp, Homo sapiens
  source 1..908: mol_type = unassigned DNA
tcaggcccgcctgtttcccggtctcgctatcaagatccaacgcagtaatggtgaggagcggggtccctaggtcaaggggactcgtgagcggtttaattcacagtgccaatgtaaggactgtgaacttggagaaatcctgtgtttcagtggaatgggcagaaggaggtgccacaaagggcaaagagattgattttgatgatgtggctgcaataaacccagaactcttacagcttcttcccttacatccgaaggacaatctgcccttgcaggaaaatgtaacaatccagaaacaaaaacggagatccgtcaactccaaaattcctgctccaaaagaaagtcttcgaagccgctccactcgcatgtccactgtctcagagcttcgcatcacggctcaggagaatgacatggaggtggagctgcctgcagctgcaaactcccgcaagcagttttcagttcctcctgcccccactaggccttcctgccctgcagtggctgaaataccattgaggatggtcagcgaggagatggaagagcaagtccattccatccgaggcagctcttctgcaaaccctgtgaactcagttcggaggaaatcatgtcttgtgaaggaagtggaaaaaatgaagaacaagcgagaagagaagaaggcccagaactctgaaatgagaatgaagagagctcaggagtatgacagtagttttccaaactgggaatttgcccgaatgattaaagaatttcgggctactttggaatgtcatccacttactatgactgatcctatcgaagagcacagaatatgtgtctgtgttaggaaacgcccactgaataagcaagaattggccaagaaagaaattgatgtgatttccattcctagcaagtgtctcctcttggtacatgaacccaagttg

SEQ ID NO: 15426 - DNA, 6103 bp, Homo sapiens
  source 1..6103: mol_type = unassigned DNA
atccggggcagcggggaatggctgagccaggggttcgccgcccccgccgccgccgccgccgccgccgccgccgccgccgcccgctttcggctcgggcctcaggaccgtagcatcctgagacattttgaattgacacttctcaagatttgactggatcagagttcatcatgtcaaagttgaaaagctcagagtcagtcagggtggtggttcgctgtcggcccatgaatggcaaggaaaaggctgcttcgtatgacaaagtggtggatgtggatgttaagctggggcaggtgtctgtgaagaaccccaaagggacggcccatgaaatgcccaagaccttcacctttgatgccgtctatgactggaatgccaagcagtttgaactgtacgatgagacgttccgaccacttgttgactctgtcctgcaaggtttcaatggaaccatttttgcctatggacaaactgggacaggaaaaacctacaccatggaaggaatccgtggtgaccctgaaaaaagaggagtcattcctaactcatttgaccatatcttcacccacatctctcgatcccagaatcaacaatacctggtcagggcttcttacttagagatctaccaggaggagatccgagatttgctctcaaaggatcagaccaaaaggcttgagctcaaagagaggcctgacacaggagtgtatgtgaaagacctgtcttcctttgtcaccaagagtgtgaaggagatagagcatgtgatgaatgtggggaaccagaaccgttctgtcggtgctaccaacatgaacgagcacagctcgcgttctcatgcaattttcgttatcactattgagtgcagcgaggtgggcctcgatggtgaaaaccacatccgtgtaggaaaattgaaccttgtagatcttgctggcagcgaacggcaagccaagaccggcgcacaaggggagagattaaaagaagctaccaagatcaacctctccctttccgctttgggtaatgtcatctctgctctagtggacggcaaaagcactcacattccatatcgggactcaaagcttaccaggctcctccaagattcccttggtggcaatgccaagactgtgatggtggccaacgtggggcctgcctcttacaacgtagaagagactctgaccactctgcgatatgccaaccgtgccaaaaacattaagaacaaaccaagggtcaatgaggaccccaaggatgccctccttcgagaattccaggaagagattgctcggctcaaggcccagctggaaaaacggtccattggtaggaggaagaggcgagagaagcggagggaaggtggtggcagtggtgggggtggggaagaggaggaggaggagggagaagagggtgaggaggaaggggatgataaggatgattactggcgggaacagcaagaaaaactggagattgagaagcgggccattgtagaggatcacagcttggttgcagaggagaagatgaggctgctgaaggagaaagagaaaaagatggaggacctgcggcgggagaaggatgctgccgagatgctgggcgccaagatcaaggccatggagagtaagttgcttgttggaggaaaaaatatagtagatcatacgaatgaacagcagaaaatcctggagcagaaacgacaggaaattgcagagcagaaacgtcgagaaagagaaatccagcaacagatggaaagtcgagatgaggagaccttggaacttaaagagacatacagctcattgcagcaagaggtggacatcaagaccaaaaaactcaaaaagctcttctccaagcttcaggcagtgaaggctgagatccatgacctccaagaagaacacatcaaggagcgccaagagctagagcagactcagaatgagctcaccagggagctgaaactcaagcatcttattatagaaaactttatccctctggaagaaaaaagtaaaattatgaatagagccttctttgatgaagaggaagatcattggaaactacatcctataaccagactggagaaccagcagatgatgaagcggccagtctcagccgtgggatataagagaccattgagccagcacgcaagaatgtccatgatgattcgtccagaggcccgatatagggcagaaaacattgtgctgttagagctggacatgcccagccggaccaccagagactatgagggtccagccattgcccccaaggtccaggctgcattggatgcggctctgcaggatgaagatgagatacaggtggatgcatcatcatttgaaagcactgcaaataagaaatccaaggccaggcctaaaagtggaaggaagtcgggatcctcctcctcttcctcaggaacccctgcatctcagctttatccacagtctcgggggctggttccaaagtaaagccagcttctcctctcccagggcggaaacagcatttgccttctgagagaagagactagcaaaaagctgcagagaggattcggcccaaactcagaactgttcccctgaggagaagcggtggcctctttgcagatcaaccaacttaatctggttgaacgtgctgttcctaatctggcactcagcccctctgggaaacatcttttaattagcatctcagaaatgcatgggtaaggtaaagtgcgatagttcaagtggaaagcaagagaatgaccagtgaccttgcttccttcccccttgccttcttctcccccttcccctgtgctccctttctctcctctctccttttctagcctgttctttacatggggctcccttcttgttgaacaatagggcagaatcaggagtcaccttagcaggaccacatctttggagcctcgggataaaatgacagtgaggttgaaaagtgaaaaccctagaacttgaataggtgcctgttcttgtagggagaaatgagaaatcgcatttggatccaggccccaggtgggcaccatcagcagtcttgcttccatgcacctcagtaagaagtggatctgcctttgggacctgctcagtgaggaaatctcttccaatttctgcttctgaatgattcaatgttgggagcaatagaaataacattccctttgccttctctgagtgtttagggaaatagcttctttaaaacctcaaaaccatgaccatcctgtcaaagacctaagtctgtaagctggtgccatgtccatacaccatgtcactttactcttcatttgtcaccatcttttcccatgcacgcatactctgaacatccttgtgtgggcccatcctctgcatccagagcatgctctgcagtgggcctgttttgtggaagaaaggaggctgtctctgccttctctgatgggactggagttgagggaaggagctgtattgtggcacttctgaattccccgttttgttccatattggtatagagagcagaagagtagctaggcagatgcagagatggagacatgagactcagtgcagtgggcagggaagacataacagatggaagcaaaggaatcctgcctgccttcagcagagaattcaccgaatcctagaactgtggctccctccaggcagagcctaagatgctggtgaagaatagctgtgtgattgaataggctcaaaggagagttcagaattcccatttacatattactagtttggtttgtaagttttagttccttgtattattgagattcagagcttcattttatgttggtcattaggtgaatattactcattttccctcaagagaagctcataagtgtgtgtgggtgtgagagcacgatggtgcctgtgttctgtgaatgtgtccatatgtgtctgtaagagagacagagaccaagaacttgcccaattttagaaatacactaatgtgcagttgttgccttttgtctgtattgaaggcccattgaatgactaatccaggctggaagcattcccatgtgggtgtctgagtccatgagccaagcctgaggggacagtgagtctccaggtctgccacactggtgcaccttgctggcacggtgcctcaggaaggtggcgactcaggtgggccttgagttatattttaactcagctgctcagttcccagggcacatttctggatcagaacccatgggaaacaggaggtactaagtgcaatgtcttagcattctgcaaaatggagatctgttgtccagcggcttatctcctttttagtaacccttctttctgaacccagggcccttttcagccttccctcatattttcttgagatcaaactttacttctttcttatttactaagaatttgcctgtttgaataagaacaaaacgctaaggtgggtagcctaagctgattttctgctggttacacgtgtctctcacaccacatttcctcaaagctaatctgaattctgtaggctaaaaatattcatgtagcaaatctgagaattgaaaactgcagataaccggccgggtatggtgactcatgcctgtaatcctagcactttgggaggccgaggtgggtggaccacctgaggttaggacttcaagaccagcctggccaacatggtgaaaccccatctgtactaaaaatacaaaaatttgcctggtgtggtggtgcatgcctctagtcctagctactcgggaggctgaggcacgagaatcacttgaacctgggaggcggaggttgcagtgagtcgagataacactactgcattccagcctgggtgacagagtgagactccccctcaaaaaaaaaaaaaaaaaaaaaaaaaacagaaagaaagaaaaagaaaactgcagataaccctatacattaatactggtatctcgaggtgactcttctgaccaagggtggttaagtgacacatagaacttttctaagagaagacagacaagttgacaggcatgccttgtactcagctgtgttcatgtggtggtctgtggaaagaaaagaagactcatttggaaatgaagctgtccctttccaagcagtctctggtgcttttcttctctcaaaatggatccgataaatatttgaatagagcagattgtagaatgtcgtgctgtcaccagaaagctgctgttttgggttctgcattgagccaaatatgtagaggacctaccaagcccactgagggactaggttttcatgtctctagtcatacctagaatgttctgagccgtctgagggccttcatgccggcagcagctagcaaagccagaaagcaagtctaacaggatctaagatgaccatcaggagaaggagtttgagactgtgtatgcaacccccaatagacccccttttactctgatctggagaatgtatctggcttcatattttcaagtcacatgtctctcagacccctggattcagaacccaaggccacaaatcataggcatgaagcactttcttaagactgacctaacgctggattatttcccgtccaatgcctgcatgctgcttgaattgctccacccacacctccatgaccaagggcgccagagtgctgcaactggggcgtgggccgctctctgcttttcctgtctgactctgacaagtcctccctcactgaatgtagaatcgttgccaagtttctgagaagtgtcgattccctgttaacatggatatcagttctgcctcacatttcccacttgaggttgaggcgtactggagacaacacctcagaccatctgaaccccatcagtggacgaaaatggggctgttaatatactctaaaagccatactaaaaatgctctgagggaactggctaagaatagtgggcctggtgattgtctatcacgcaaggctttgttttgtactgttcagaaatctgtcacctttctgcctgcccttgtttcctgaatgaaatgcttctggggttatttatgaaaggagtgatcctggggcaggcaggaggcagtgggcttcatggctccttgaagttattactgatcttgaccttctctttggctacctttagacaaagaatacgccaatcaatacttggggctctaagttttacaattgatatttatttgtatcatctctttgtctaggaatgtaaaagtgattctaaactaagatgtgtaataaaaatcaatcagatttattgtacctacaaaaa

SEQ ID NO: 15427 - DNA, 1756 bp, Homo sapiens
  source 1..1756: mol_type = unassigned DNA
taggaaaattgaaccttgtagatcttgctggcagcgaacggcaagccaagaccggcgcacaaggggagagattaaaagaagctaccaagatcaacctctccctttccgctttgggtaatgtcatctctgctctagtggacggcaaaagcactcacattccatatcgggactcaaagcttaccaggctcctccaagattcccttggtggcaatgccaagactgtgatggtggccaacgtggggcctgcctcttacaacgtagaagagactctgaccactctgcgatatgccaaccgtgccaaaaacattaagaacaaaccaagggtcaatgaggaccccaaggatgccctccttcgagaattccaggaagagattgctcggctcaaggcccagctggaaaaacggtccattgaggagaagatgaggctgctgaaggagaaagagaaaaagatggaggacctgcggcgggagaaggatgctgccgagatgctgggcgccaagatcaaggccatggagagtaagttgcttgttggaggaaaaaatatagtagatcatacgaatgaacagcagaaaatcctggagcagaaacgacaggaaattgcagagcagaaacgtcgagaaagagaaatccagcaacagatggaaagtcgagatgaggagaccttggaacttaaagagacatacagctcattgcagcaagaggtggacatcaagaccaaaaaactcaaaaagctcttctccaagcttcaggcagtgaaggctgagatccatgacctccaagaagaacacatcaaggagcgccaagagctagagcagactcagaatgagctcaccagggagctgaaactcaagcatcttattatagaaaactttatccctctggaagaaaaaagtaaaattatgaatagagccttctttgatgaagaggaagatcattggaaactacatcctataaccagactggagaaccagcagatgatgaagcggccagtctcagccgtgggatataagagaccattgagccagcacgcaagaatgtccatgatgattcgtccagaggcccgatatagggcagaaaacattgtgctgttagagctggacatgcccagccggaccaccagagactatgagggtccagccattgcccccaaggtccaggctgcattggatgcggctctgcaggatgaagatgagatacaggtggatgcatcatcatttgaaagcactgcaaataagaaatccaaggccaggcctaaaagtggaaggaagtcgggatcctcctcctcttcctcaggaacccctgcatctcagctttatccacagtctcgggggctggttccaaagtaaagccagcttctcctctcccagggcggaaacagcatttgccttctgagagaagagactagcaaaaagctgcagagaggattcggcccaaactcagaactgttcccctgaggagaagcggtggcctctttgcagatcaaccaacttaatctggttgaacgtgctgttcctaatctggcactcagcccctctgggaaacatcttttaattagcatctcagaaatgcatgggtaaggtaaagtgcgatagttcaagtggaaagcaagagaatgaccagtgaccttgcttccttcccccttgccttcttctcccccttcccctgtgctccctttctctcctctctccttttctagcctgttctttacatggggctcccttcttgttgaacaatagggcagaatcaggagtcacct

SEQ ID NO: 15428 - DNA, 5338 bp, Homo sapiens
  source 1..5338: mol_type = unassigned DNA
gtttttctctctcattctccagtggcggcggcggggaaggcggaggcagaggcagcagcagccgcgctggctgcaatgaatgatcccccagcttggggggaggactccaggtgagcctctgccctcgggaggcccgggacccccggccgcccacgaccggcagcccacgctatggatccctagaggaaggaggagaagacagctcgccgcccacccccatcccattttcctcttcctttatctcattgttgccgaagctgtttacggcagcgctccctctgctcctgcatggggcgggctccgggcacggctgctcggcaggcgctgctcccgcggcgactgggggattctgcctaattcacctcccagccggtgcagagaggaccggagagcggtggaggcccggactgcagcagcgttggggccacctcccagcgtccccaccctaggaggctgcatgcggattgaagagctgcgcctgggggctgggccggccccgctgatcccgacctagcgagcaggatagcaggaccgcccaggctgcggaggggctcgggggcaggaaggtcagagcagcaagatggccagtaagaccaaggccagcgaggccctcaaggtggtggcccggtgccgccccctcagcaggaaggaggaggctgctggtcacgagcagatcctgaccatggacgtgaaactgggccaggtgaccctgcggaacccccgcgccgccccgggggagctgcccaagaccttcacctttgacgccgtgtatgatgccagctccaagcaggccgacctgtatgacgaaaccgtgaggcccctgatagactccgtgctccagggtttcaatggcacggtgtttgcctatggccagacgggcactggcaagacctataccatgcaggggacctgggtggagcccgagctgcgcggggtcatcccgaatgcctttgagcacatcttcacccacatctcccgctcccagaaccaacagtacctggtccgggcctcctatttggagatctaccaggaagagattcgagacctgctctccaaggagccgggcaagaggctagagctgaaagagaaccccgagactggcgtctacatcaaggacctctcctccttcgtcaccaagaatgtcaaggagattgagcatgtgatgaacctggggaaccagacccgggctgtgggcagcacccacatgaatgaggtcagctcccgctcccatgccatcttcatcatcactgtggagtgcagcgaacgtggctctgatggccaggaccacatccgagtgggcaagctcaacctcgtggacctggctggcagcgagaggcagaacaaggcaggccccaacacagcgggaggggcagccacaccatcctcgggtggcggtggtggcggtggaggcagtggtggtggtgctggtggagagaggcctaaggaagcctccaaaatcaacctctcattatctgccctgggcaacgtgattgctgccctggcgggcaacaggagcacccacattccctaccgggactccaagctgacccggctgctccaggactccctgggggggaatgccaagaccatcatggtagccacactggggccagcttctcacagctacgatgagagcctctccaccttgcgctttgccaaccgagccaagaacatcaagaacaagccccaggtgaacgaggaccccaaggacacactgctgcgggaattccaagaggagattgcccgcctgaaggcccagctggagaagagggggatgctggggaagcggccccggaggaagagcagccgcaggaagaaggccgtgtccgccccgcctgggtaccctgagggcccagtgattgaggcctgggtggcagaagaggaggatgacaacaacaacaaccaccgcccgccccagcccatcctggagtcagccttggagaagaacatggagaattacctgcaggaacagaaggagcggctggaggaggagaaggcagccatccaggatgaccgcagcctggtgagcgaggagaagcagaagctgctggaggagaaggagaagatgctggaggacctgcggcgggaacagcaggccacagagctgcttgcggccaagtacaaggccatggagagcaagctcctcatcgggggcaggaacatcatggatcacaccaacgaacagcagaagatgttggaactgaagaggcaggagattgccgagcagaaacgtcgtgagcgggagatgcagcaggagatgatgctccgggacgaggagactatggagctccggggcacctacacatccctgcagcaggaggtggaggtcaaaaccaagaaactcaagaagctctacgccaagctgcaggcggtgaaggcggagatccaggaccagcatgatgagtatatccgcgtgcggcaggacctggaggaggcgcagaacgagcagacccgcgaactcaagctcaagtacctaatcatcgagaacttcatcccgccggaggagaagaacaagatcatgaaccggcttttcctggactgtgaggaggagcagtggaagttccagccactggtgccagccggcgtcagtagcagccagatgaagaagcggccaacatctgcagtgggctacaagaggcctatcagccagtatgctcgggttgccatggcaatggggtcccaccccaggtacagggctgaaaacataatgtttctggagttggatgtgtcccctccagctgtctttgagatggaattctctcacgaccaagaacaagaccctcgtgcgctacacatggagaggctcatgcgattggacagctttctggaaagaccttccacgtctaaagtccgaaagtccagatcctggtgccagagtcctcagcggcctccaccttccaccacacatgcctccctggcctctgcttctctgcgccctgcaacagtggcggaccatgagtgacaaccatcacgtcaggctgcccatccaatagactcctgggatggggcagccaaccctggctcatctcatctgccgcttggtgcgtgtgcgtgtgcgtgcatgtgcgtgtgcgtgtgtgcaggggtgagaatctggcagatggtgcctctgcctgctcttcttcgcctcctttatttaattcatgttatttattcgcggagctctgttcgtgttggggagatgccctcgcctgagccgtctgggcctaccgtggtcactgcgtagcctctttttcttctgacttgagagctcccccagtcagatctcaggcttgtccccctgtcagctgcctccagaagggaaggtagccagtgcctgagaagacagtcccttttctacccaccgcactccataacctccatcttctcccacactgatggcgagcagcccctgagcactttctgggactgggagactgcttggtgttccctgaggacaagagacatcctgacagtgttgggcatctgctccccgtggacacagccccactctccactttctgagcctcagacaacctcattcagcctcttgggctccttttcaaggacattaataacctcaccaacatagctcatgcccttcagctttgacaagaactcacagcttcccaaactctgctttctgcccaccttggatgggaactgtggaccaagcaattaccatcgccttggaacctgcaggaaatggaacagcaattgagacaacttgaacagtcatcaacggaagtccctccactggattcctttgtttctgtcccctccgaggagtcattttggtcgacaggctctcaaggcaactccccattttcaagaggctgctcctgcctgcttcgatcatttctccctgcagctgcctagaccccgttcacagtgggaggagtcaatgtcattctacccctcgctaaacgaagatattaacatctattgctttttcccttcatctgtcacaggaaacagaagcccaggcacaatcttttccagctttgcctgttacccctgtttctgaattgcatctttaaggtattattttgttgaaaatagatcctttattcactagttacgcaaattggttcctagggggatactccttaccttcctttgtgatggcccaaaatgtctctaggtatctcaagtgataagtaaatttctacaaaaaaaaatggttaatgttcattgactggctttttaagtgtatattttggaggacgggtgaagaggtcataacgaaagcaagcgagtgaattaggatttcaaagtgccctaatagtgtgagtctccagttcctagaatatgaagagtgctgtcgttggggtgaaaccatgagactgacagatctgcctgaaatggggggtgtgggaggtggtggcgggggttattctctttccttcaggaaatgaacccttcttacatcattcaagttctgctctgaggatcaagcttgggtctgatttaactcagcgacactgtcatttctgcttcattactggactagagggttgagccacccacttgccatttgctcctgtccttccaggaaatcacaattttcatcagagcccaagagattatttgagactcaggattcagatcagaggttcgactgtggctgggacaggagttgtgtgtagaaattcaccaggtggcctgagcgcagggggacctccagggctgcgttgagcagcctctcccactgacctctttctcgtttgtggacaaagcagcacgtatcacctcattcatcacttggacacatcgcctttgcattgtcttgtcacacctccctcacagtcttatagcacaatatacccaaatcagcccccccagtccgagggctgggcccgaggtatggtcggaggaggagctcctgcctgcggttttgtgtatgtgtgtatgtgtgtgcgtgtttgtgtgcgtgtttacctccacaggggacactctacactcagtgtaagatctgctgggaacagggccaccaggagtggctggatctcagtctctctgtctctctttctctccttttccttttggtgtatcaaatatttgattgacaaagtaagggccttgattaggaccaaattctcgtgtgttgctatggtctttatttaggacaacaattaacaatgcagtggcccattcttgtcactctacacatatgactatacgggacatatgtaatatataaatatatatataaaacattcccctctgtccccttggcttcggatggaggcctttctgttgagctgaaatgcacctgcagctgggtgctgccagcagcttgcaggccccagccctgttccaatcaatgcagttgacaataaaggaatgagtatcgtca

SEQ ID NO: 15429 - DNA, 3180 bp, Homo sapiens
  source 1..3180: mol_type = unassigned DNA
ggcggtggctgcgctgcacccgactggtgggcgcaggacctgggtcggcaccggagcctgtcatcccggagcggtcggcgggggtgcagagacggcgatgcgcccctgtcccccgcacccgggccgctccgggctcgcgcctcccgccccgcggccccgccccctgccccaccccagtcgggaggcttagctggggccgcagcgcggcggcaacatcactctcgctgccgctgctccgccccatccccttctgtttttctctctcattctccagtggcggcggcggggaaggcggaggcagaggcagcagcagccgcgctggctgcaatgaatgatcccccagcttggggggaggactccagccggtgcagagaggaccggagagcggtggaggcccggactgcagcagcgttggggccacctcccagcgtccccaccctaggaggctgcatgcggattgaagagctgcgcctgggggctgggccggccccgctgatcccgacctagcgagcaggatagcaggaccgcccaggctgcggaggggctcgggggcaggaaggtcagagcagcaagatggccagtaagaccaaggccagcgaggccctcaaggtggtggcccggtgccgccccctcagcaggaaggaggaggctgctggtcacgagcagatcctgaccatggacgtgaaactgggccaggtgaccctgcggaacccccgcgccgccccgggggagctgcccaagaccttcacctttgacgccgtgtatgatgccagctccaagcaggccgacctgtatgacgaaaccgtgaggcccctgatagactccgtgctccagggtttcaatggcacggtgtttgcctatggccagacgggcactggcaagacctataccatgcaggggacctgggtggagcccgagctgcgcggggtcatcccgaatgcctttgagcacatcttcacccacatctcccgctcccagaaccaacagtacctggtccgggcctcctatttggagatctaccaggaagagattcgagacctgctctccaaggagccgggcaagaggctagagctgaaagagaaccccgagactggcgtctacatcaaggacctctcctccttcgtcaccaagaatgtcaaggagattgagcatgtgatgaacctggggaaccagacccgggctgtgggcagcacccacatgaatgaggtcagctcccgctcccatgccatcttcatcatcactgtggagtgcagcgaacgtggctctgatggccaggaccacatccgagtgggcaagctcaacctcgtggacctggctggcagcgagaggcagaacaaggcaggccccaacacagcgggaggggcagccacaccatcctcgggtggcggtggtggcggtggaggcagtggtggtggtgctggtggagagaggcctaaggaagcctccaaaatcaacctctcattatctgccctgggcaacgtgattgctgccctggcgggcaacaggagcacccacattccctaccgggactccaagctgacccggctgctccaggactccctgggggggaatgccaagaccatcatggtagccacactggggccagcttctcacagctacgatgagagcctctccaccttgcgctttgccaaccgagccaagaacatcaagaacaagccccaggtgaacgaggaccccaaggacacactgctgcgggaattccaagaggagattgcccgcctgaaggcccagctggagaagagggggatgctggggaagcggccccggaggaagagcagccgcaggaagaaggccgtgtccgccccgcctgggtaccctgagggcccagtgattgaggcctgggtggcagaagaggaggatgacaacaacaacaaccaccgcccgccccagcccatcctggagtcagccttggagaagaacatggagaattacctgcaggaacagaaggagcggctggaggaggagaaggcagccatccaggatgaccgcagcctggtgagcgaggagaagcagaagctgctggaggagaaggagaagatgctggaggacctgcggcgggaacagcaggccacagagctgcttgcggccaagtacaaggccatggagagcaagctcctcatcgggggcaggaacatcatggatcacaccaacgaacagcagaagatgttggaactgaagaggcaggagattgccgagcagaaacgtcgtgagcgggagatgcagcaggagatgatgctccgggacgaggagactatggagctccggggcacctacacatccctgcagcaggaggtggaggtcaaaaccaagaaactcaagaagctctacgccaagctgcaggcggtgaaggcggagatccaggaccagcatgatgagtatatccgcgtgcggcaggacctggaggaggcgcagaacgagcagacccgcgaactcaagctcaagtacctaatcatcgagaacttcatcccgccggaggagaagaacaagatcatgaaccggcttttcctggactgtgaggaggagcagtggaagttccagccactggtgccagccggcgtcagtagcagccagatgaagaagcggccaacatctgcagtgggctacaagaggcctatcagccagtatgctcgggttgccatggcaatggggtcccaccccaggtacagggctgaaaacataatgtttctggagttggatgtgtcccctccagctgtctttgagatggaattctctcacgaccaagaacaagaccctcgtgcgctacacatggagaggctcatgcgattggacagctttctggaaagaccttccacgtctaaagtccgaaagtccagatcctggtgccagagtcctcagcggcctccaccttccaccacacatgcctccctggcctctgcttctctgcgccctgcaacagtggcggaccatgagtgacaaccatcacgtcaggctgcccatccaatagactcctgggatggggcagccaaccctggctcatctcatctgccgcttggtgcgtgtgcgtgtgcgtgcatgtgcgtgtgcgtgtgtgcaggggtgagaatctggcagatggtgcctctgcctgctcttcttcgcctcctttatttaattcatgttatttattcgcggagctctgttcgtgttggggagatgccc

SEQ ID NO: 15430 - DNA, 2544 bp, Homo sapiens
  source 1..2544: mol_type = unassigned DNA
attctccagtggcggcggcggggaaggcggaggcagaggcagcagcagccgcgctggctgcaatgaatgatcccccagcttggggggaggactccaggtgagcctctgccctcgggaggcccgggacccccggccgcccacgaccggcagcccacgctatggatccctagaggaaggaggagaagacagctcgccgcccacccccatcccattttcctcttcctttatctcattgttgccgaagctgtttacggcagcgctccctctgctcctgcatggggcgggctccgggcacggctgctcggcaggcgctgctcccgcggcgactgggggattctgcctaattcacctcccatttggagatctaccaggaagagattcgagacctgctctccaaggagccgggcaagaggctagagctgaaagagaaccccgagactggcgtctacatcaaggacctctcctccttcgtcaccaagaatgtcaaggagattgagcatgtgatgaacctggggaaccagacccgggctgtgggcagcacccacatgaatgaggtcagctcccgctcccatgccatcttcatcatcactgtggagtgcagcgaacgtggctctgatggccaggaccacatccgagtgggcaagctcaacctcgtggacctggctggcagcgagaggcagaacaaggcaggccccaacacagcgggaggggcagccacaccatcctcgggtggcggtggtggcggtggaggcagtggtggtggtgctggtggagagaggcctaaggaagcctccaaaatcaacctctcattatctgccctgggcaacgtgattgctgccctggcgggcaacaggagcacccacattccctaccgggactccaagctgacccggctgctccaggactccctgggggggaatgccaagaccatcatggtagccacactggggccagcttctcacagctacgatgagagcctctccaccttgcgctttgccaaccgagccaagaacatcaagaacaagccccaggtgaacgaggaccccaaggacacactgctgcgggaattccaagaggagattgcccgcctgaaggcccagctggagaagagggggatgctggggaagcggccccggaggaagagcagccgcaggaagaaggccgtgtccgccccgcctgggtaccctgagggcccagtgattgaggcctgggtggcagaagaggaggatgacaacaacaacaaccaccgcccgccccagcccatcctggagtcagccttggagaagaacatggagaattacctgcaggaacagaaggagcggctggaggaggagaaggcagccatccaggatgaccgcagcctggtgagcgaggagaagcagaagctgctggaggagaaggagaagatgctggaggacctgcggcgggaacagcaggccacagagctgcttgcggccaagtacaaggccatggagagcaagctcctcatcgggggcaggaacatcatggatcacaccaacgaacagcagaagatgttggaactgaagaggcaggagattgccgagcagaaacgtcgtgagcgggagatgcagcaggagatgatgctccgggacgaggagactatggagctccggggcacctacacatccctgcagcaggaggtggaggtcaaaaccaagaaactcaagaagctctacgccaagctgcaggcggtgaaggcggagatccaggaccagcatgatgagtatatccgcgtgcggcaggacctggaggaggcgcagaacgagcagacccgcgaactcaagctcaagtacctaatcatcgagaacttcatcccgccggaggagaagaacaagatcatgaaccggcttttcctggactgtgaggaggagcagtggaagttccagccactggtgccagccggcgtcagtagcagccagatgaagaagcggccaacatctgcagtgggctacaagaggcctatcagccagtatgctcgggttgccatggcaatggggtcccaccccaggtacagggctgaaaacataatgtttctggagttggatgtgtcccctccagctgtctttgagatggaattctctcacgaccaagaacaagaccctcgtgcgctacacatggagaggctcatgcgattggacagctttctggaaagaccttccacgtctaaagtccgaaagtccagatcctggtgccagagtcctcagcggcctccaccttccaccacacatgcctccctggcctctgcttctctgcgccctgcaacagtggcggaccatgagtgacaaccatcacgtcaggctgcccatccaatagactcctgggatggggcagccaaccctggctcatctcatctgccgcttggtgcgtgtgcgtgtgcgtgcatgtgcgtgtgcgtgtgtgcaggggtgagaatctggcagatggtgcctctgcctgctcttcttcgcctcctttatttaattcatgttatttattcgcggagctctgttcgtgttggggagatgccctcgcctgagccgtctg

SEQ ID NO: 15431 - DNA, 3527 bp, Homo sapiens
  source 1..3527: mol_type = unassigned DNA
gggcagtccgcactgcaattggttggcgtctccgggacggatttgaaacttggcggttaaagctccggctgggacagggcggcgggaggcccagggagaacggggaagggacatttagtttgagacggtgctgagataggatcatgaaggaagaggtgaagggaattcccgtaagagtggcgctgcgttgtcgccctctggtccccaaagagattagcgagggctgccagatgtgcctttccttcgtgcccggagagcctcaggtggtggttggtacagataaatccttcacctacgattttgtatttgatccctctactgaacaggaagaagtcttcaatacagcagtagcgccactcataaaaggtgtatttaaaggatataatgcaacggtcctggcctatgggcagactggctctggaaaaacctattcaatgggaggtgcatatactgcagagcaagagaatgaaccaacagttggggttattcctagggtaatacaactgctcttcaaagaaattgataaaaagagtgactttgaatttactctgaaagtgtcttacttagagatttacaatgaagaaattttggatcttctatgcccatctcgtgagaaagctcaaataaatatacgagaggatcctaaggaaggcataaagattgtgggactcactgagaagactgttttggttgccttggatactgtttcctgtttggaacagggcaacaactctaggactgtggcctccacggctatgaactcccagtcgtcccgatctcatgccatctttacaatctccttagagcaaagaaagaaaagtgacaagaatagcagctttcgctccaagctgcatcttgtagacctcgctggatcagaaagacagaagaaaaccaaggctgaaggggatcgtctaaaagagggtattaatattaaccgaggcctcctatgcttgggaaatgtaatcagtgctcttggagatgacaaaaagggtggctttgtgccctacagagattccaagttgactcgactgcttcaagattctctaggaggtaatagccatactcttatgatagcctgtgtgagtcctgctgactccaatctagaggaaacattaaatacccttcgctatgctgacagagcaagaaaaatcaagaacaaacctattgttaatattgatccccagacagctgaacttaatcatctaaagcaacaggtacaacagctacaagtcttgttgctacaggcccatggaggtaccctgcctggatctataactgtggaaccatcagagaatctacaatccctgatggagaagaatcagtccctggtagaggagaatgaaaaattaagtcgtggtctgagcgaggcagctggtcagacagcccagatgttggagaggatcattttgacagagcaagcgaatgaaaaaatgaacgccaagctagaagagctcaggcagcatgcggcctgcaaactggatcttcaaaagctagtggagactttggaagaccaggaattgaaagaaaatgtagagataatttgtaacctgcagcaattgattacccagttatcggatgaaactgttgcttgcatggctgcagccattgatactgcggtggagcaagaagcccaagtagaaaccagtccagagacgagcaggtcttctgacgcttttaccactcagcatgctctccgtcaagcgcagatgtctaaggagctggttgagttgaataaagcgcttgcactgaaagaggccctggctaggaagatgactcagaatgacagccaactgcagcccattcagtaccaataccaggataacataaaagagctagaattagaagtcatcaatctgcaaaaggaaaaggaagaattggttcttgaacttcagacagcaaagaaggatgccaaccaagccaagttgagtgagcgccgccgcaaacgtctccaggagctggagggtcaaattgctgatctgaagaagaaactgaatgagcagtccaaacttctgaaactaaaggaatccacagagcgtactgtctccaaactgaaccaggagatacggatgatgaaaaaccagcgggtacagttaatgcgtcaaatgaaagaagatgctgagaagtttagacagtggaagcagaaaaaagacaaagaagtaatacagttaaaagaacgagaccgtaagaggcaatatgagctgctgaaacttgaaagaaacttccagaaacaatccaatgtgctcagacgtaaaacggaggaggcagcagctgccaacaagcgtctcaaggatgctctccagaaacaacgggaggttgcagataagcggaaagagactcagagccgtggaatggaaggcactgcagctcgagtgaagaattggcttggaaacgaaattgaggttatggtcagtactgaggaagccaaacgccatctgaatgacctccttgaagatagaaagatcctggctcaagatgtggctcaactcaaagaaaaaaaggaatctggggagaatccacctcctaaactccggaggcgtacattctcccttactgaagtgcgtggtcaagtttcggagtcagaagattctattacaaagcagattgaaagcctagagactgaaatggaattcaggagtgctcagattgctgacctacagcagaagctgctggatgcagaaagtgaagacagaccaaaacaacgctgggagaatattgccaccattctggaagccaagtgtgccctgaaatatttgattggagagctggtctcctccaaaatacaggtcagcaaacttgaaagcagcctgaaacagagcaagaccagctgtgctgacatgcagaagatgctgtttgaggaacgaaatcattttgccgagatagagacagagttacaagctgagctggtcagaatggagcaacagcaccaagagaaggtgctgtaccttctcagccagctgcagcaaagccaaatggcagagaagcagttagaggaatcagtcagtgaaaaggaacagcagctgctgagcacactgaagtgtcaggatgaagaacttgagaaaatgcgagaagtgtgtgagcaaaatcagcagcttctccgagagaatgaaatcatcaagcagaaactgaccctcctccaggtagccagcagacagaaacatcttcctaaggatacccttctatctccagactcttcttttgaatatgtcccacctaagccaaaaccttctcgtgttaaagaaaagttcctggagcaaagcatggacatcgaggatctaaaatattgttcagagcattctgtgaatgagcatgaggatggtgatggtgatgatgatgagggggatgacgaggaatggaagccaacaaaattagttaaggtgtccaggaagaacatccaaggggtgctgttgctcacgcctgtaatctcagcactttgggaggctgaggcaagaggattgcttgaggccaggagttcaagaccagcctgggcaacatggcgagaccctgtctctacaaaaccaaaaaattag

SEQ ID NO: 15432 - DNA, 4348 bp, Homo sapiens
  source 1..4348: mol_type = unassigned DNA
gctccggctgggacagggcggcgggaggcccagggagaacggggaagggacatttagtttgagacggtgctgagataggatcatgaaggaagaggtgaagggaattcccgtaagagtggcgctgcgttgtcgccctctggtccccaaagagattagcgagggctgccagatgtgcctttccttcgtgcccggagagcctcaggtggtggttggtacagataaatccttcacctacgattttgtatttgatccctctactgaacaggaagaagtcttcaatacagcagtagcgccactcataaaaggtgtatttaaaggatataatgcaacggtcctggcctatgggcagactggctctggaaaaacctattcaatgggaggtgcatatactgcagagcaagagaatgaaccaacagttggggttattcctagggtaatacaactgctcttcaaagaaattgataaaaagagtgactttgaatttactctgaaagtgtcttacttagagatttacaatgaagaaattttggatcttctatgcccatctcgtgagaaagctcaaataaatatacgagaggatcctaaggaaggcataaagattgtgggactcactgagaagactgttttggttgccttggatactgtttcctgtttggaacagggcaacaactctaggactgtggcctccacggctatgaactcccagtcgtcccgatctcatgccatctttacaatctccttagagcaaagaaagaaaagtgacaagaatagcagctttcgctccaagctgcatcttgtagacctcgctggatcagaaagacagaagaaaaccaaggctgaaggggatcgtctaaaagagggtattaatattaaccgaggcctcctatgcttgggaaatgtaatcagtgctcttggagatgacaaaaagggtggctttgtgccctacagagattccaagttgactcgactgcttcaagattctctaggaggtaatagccatactcttatgatagcctgtgtgagtcctgctgactccaatctagaggaaacattaaatacccttcgctatgctgacagagcaagaaaaatcaagaacaaacctattgttaatattgatccccagacagctgaacttaatcatctaaagcaacaggtacaacagctacaagtcttgttgctacaggcccatggaggtaccctgcctggatctataactgtggaaccatcagagaatctacaatccctgatggagaagaatcagtccctggtagaggagaatgaaaaattaagtcgtggtctgagcgaggcagctggtcagacagcccagatgttggagaggatcattttgacagagcaagcgaatgaaaaaatgaacgccaagctagaagagctcaggcagcatgcggcctgcaaactggatcttcaaaagctagtggagactttggaagaccaggaattgaaagaaaatgtagagataatttgtaacctgcagcaattgattacccagttatcggatgaaactgttgcttgcatggctgcagccattgatactgcggtggagcaagaagcccaagtagaaaccagtccagagacgagcaggtcttctgacgcttttaccactcagcatgctctccgtcaagcgcagatgtctaaggagctggttgagttgaataaagcgcttgcactgaaagaggccctggctaggaagatgactcagaatgacagccaactgcagcccattcagtaccaataccaggataacataaaagagctagaattagaagtcatcaatctgcaaaaggaaaaggaagaattggttcttgaacttcagacagcaaagaaggatgccaaccaagccaagttgagtgagcgccgccgcaaacgtctccaggagctggagggtcaaattgctgatctgaagaagaaactgaatgagcagtccaaacttctgaaactaaaggaatccacagagcgtactgtctccaaactgaaccaggagatacggatgatgaaaaaccagcgggtacagttaatgcgtcaaatgaaagaagatgctgagaagtttagacagtggaagcagaaaaaagacaaagaagtaatacagttaaaagaacgagaccgtaagaggcaatatgagctgctgaaacttgaaagaaacttccagaaacaatccaatgtgctcagacgtaaaacggaggaggcagcagctgccaacaagcgtctcaaggatgctctccagaaacaacgggaggttgcagataagcggaaagagactcagagccgtggaatggaaggcactgcagctcgagtgaagaattggcttggaaacgaaattgaggttatggtcagtactgaggaagccaaacgccatctgaatgacctccttgaagatagaaagatcctggctcaagatgtggctcaactcaaagaaaaaaaggaatctggggagaatccacctcctaaactccggaggcgtacattctcccttactgaagtgcgtggtcaagtttcggagtcagaagattctattacaaagcagattgaaagcctagagactgaaatggaattcaggagtgctcagattgctgacctacagcagaagctgctggatgcagaaagtgaagacagaccaaaacaacgctgggagaatattgccaccattctggaagccaagtgtgccctgaaatatttgattggagagctggtctcctccaaaatacaggtcagcaaacttgaaagcagcctgaaacagagcaagaccagctgtgctgacatgcagaagatgctgtttgaggaacgaaatcattttgccgagatagagacagagttacaagctgagctggtcagaatggagcaacagcaccaagagaaggtgctgtaccttctcagccagctgcagcaaagccaaatggcagagaagcagttagaggaatcagtcagtgaaaaggaacagcagctgctgagcacactgaagtgtcaggatgaagaacttgagaaaatgcgagaagtgtgtgagcaaaatcagcagcttctccgagagaatgaaatcatcaagcagaaactgaccctcctccaggtagccagcagacagaaacatcttcctaaggatacccttctatctccagactcttcttttgaatatgtcccacctaagccaaaaccttctcgtgttaaagaaaagttcctggagcaaagcatggacatcgaggatctaaaatattgttcagagcattctgtgaatgagcatgaggatggtgatggtgatgatgatgagggggatgacgaggaatggaagccaacaaaattagttaaggtgtccaggaagaacatccaagggtgttcctgcaagggctggtgtggaaacaagcagtgtgggtgcaggaagcaaaagtcagactgtggtgtggactgttgctgtgaccccacaaagtgtcggaaccgccagcaaggcaaggatagcttgggcactgttgaacggacccaggattccgaaggctccttcaaactggaggatcctaccgaggtgaccccaggattgagcttctttaatcccgtctgtgccacccccaatagcaagatcctgaaagagatgtgcgatgtggagcaggtgctgtcaaagaagactcccccagctccctccccttttgacctcccagagttgaaacatgtagcaacagaataccaagaaaacaaggctccagggaagaaaaagaaacgggctctggccagcaacaccagcttcttctctggctgctcccctatcgaagaagaggcccactgaagttggagtcatcatctctacccccagtctggcttgggagatgctttcaggttgcagccagaaggggttttttaaatgacttctctggatttcaggtttcttgctgttgaaaaaaggaacaaagcgttactgaaaagaaggtaacctttgttggatgtgggccttagcctccaggtccagactactactctatgttctccagaagggtgctaagtcacctactgaagagagaaccaactgactttcctattgactcatcaggaaccagtcctcagtctggtcaagttgtttcttatttgtgagcagttcaggctatctcctgatggggatgaggccaaggctttcttatcttttggttgtctctgcttaatggaggagcctggcctaggatggaggcctggcttagatctttcattccacctcaggaatgaggttgtgatctttcctgtcctgaccctctctgaattatgtttcaatagtactcttgattgtctgccatgttgttgaagcaaatgaattatttttaaatgttaagtaagtaaataaaccttagcccgtctactgttt

SEQ ID NO: 15433 - DNA, 2605 bp, Homo sapiens
  source 1..2605: mol_type = unassigned DNA
ccattcagtaccaataccaggataacataaaagagctagaattagaagtcatcaatctgcaaaaggaaaaggaagaattggttcttgaacttcagacagcaaagaaggatgccaaccaagccaagttgagtgagcgccgccgcaaacgtctccaggagctggagggtcaaattgctgatctgaagaagaaactgaatgagcagtccaaacttctgaaactaaaggaatccacagagcgtactgtctccaaactgaaccaggagatacggatgatgaaaaaccagcgggtacagttaatgcgtcaaatgaaagaagatgctgagaagtttagacagtggaagcagaaaaaagacaaagaagtaatacagttaaaagaacgagaccgtaagaggcaatatgagctgctgaaacttgaaagaaacttccagaaacaatccaatgtgctcagacgtaaaacgggaggcagcagctgccaacaagcgtctcaaggatgctctccagaaacaacgggaggttgcagataagcggaaagagactcagagccgtggaatggaaggcactgcagctcgagtgaagaattggcttggaaacgaaattgaggttatggtcagtactgaggaagccaaacgccatctgaatgacctccttgaagatagaaagatcctggctcaagatgtggctcaactcaaagaaaaaaaggaatctggggagaatccacctcctaaactccggaggcgtacattctcccttactgaagtgcgtggtcaagtttcggagtcagaagattctattacaaagcagattgaaagcctagagactgaaatggaattcaggagtgctcagattgctgacctacagcagaagctgctggatgcagaaagtgaagacagaccaaaacaacgctgggagaatattgccaccattctggaagccaagtgtgccctgaaatatttgattggagagctggtctcctccaaaatacaggtcagcaaacttgaaagcagcctgaaacagagcaagaccagctgtgctgacatgcagaagatgctgtttgaggaacgaaatcattttgccgagatagagacagagttacaagctgagctggtcagaatggagcaacagcaccaagagaaggtgctgtaccttctcagccagctgcagcaaagccaaatggcagagaagcagttagaggaatcagtcagtgaaaaggaacagcagctgctgagcacactgaagtgtcaggatgaagaacttgagaaaatgcgagaagtgtgtgagcaaaatcagcagcttctccgagagaatgaaatcatcaagcagaaactgaccctcctccaggtagccagcagacagaaacatcttcctaaggatacccttctatctccagactcttcttttgaatatgtcccacctaagccaaaaccttctcgtgttaaagaaaagttcctggagcaaagcatggacatcgaggatctaaaatattgttcagagcattctgtgaatgagcatgaggatggtgatggtgatgatgatgagggggatgacgaggaatggaagccaacaaaattagttaaggtgtccaggaagaacatccaagggtgttcctgcaagggctggtgtggaaacaagcagtgtgggtgcaggaagcaaaagtcagactgtggtgtggactgttgctgtgaccccacaaagtgtcggaaccgccagcaaggcaaggatagcttgggcactgttgaacggacccaggattccgaaggctccttcaaactggaggatcctaccgaggtgaccccaggattgagcttctttaatcccgtctgtgccacccccaatagcaagatcctgaaagagatgtgcgatgtggagcaggtgctgtcaaagaagactcccccagctccctccccttttgacctcccagagttgaaacatgtagcaacagaataccaagaaaacaaggctccagggaagaaaaagaaacgggctctggccagcaacaccagcttcttctctggctgctcccctatcgaagaagaggcccactgaagttggagtcatcatctctacccccagtctggcttgggagatgctttcaggttgcagccagaaggggttttttaaatgacttctctggatttcaggtttcttgctgttgaaaaaaggaacaaagcgttactgaaaagaaggtaacctttgttggatgtgggccttagcctccaggtccagactactactctatgttctccagaagggtgctaagtcacctactgaagagagaaccaactgactttcctattgactcatcaggaaccagtcctcagtctggtcaagttgtttcttatttgtgagcagttcaggctatctcctgatggggatgaggccaaggctttcttatcttttggttgtctctgcttaatggaggagcctggcctaggatggaggcctggcttagatctttcattccacctcaggaatgaggttgtgatctttcctgtcctgaccctctctgaattatgtttcaatagtactcttgattgtctgccatgttgttgaagcaaatgaattatttttaaatgttaagtaagtaaataaaccttagcccgtctac

SEQ ID NO: 15434 - DNA, 4378 bp, Homo sapiens
  source 1..4378: mol_type = unassigned DNA
ggatttgaaacttggcggttaaagctccggctgggacagggcggcgggagaccccgggtgaacggggaagggacatttagtttgagacggtgctgagataggatcatgaaggaagaggtgaagggaattcctgtaagagtggcactgcgttgtcgccctctggtccccaaagagattagcgagggctgccagatgtgcctttccttcgtgcccggggagactcaggtggtggttggtactgataaatccttcacctacgattttgtgtttgacccctgtactgagcaggaagaagtcttcaataaagcagtagcgccgctcataaaaggcatatttaaaggatataatgcaacggtcctggcctatgggcagactggctctggaaaaacctattcaatgggaggtgcatacactgcggagcaggagaatgaaccaacagttggcattattcctagggtaatacaactgctcttcaaagaaattgataaaaagagtgactttgaatttactctgaaagtgtcttacttagagatttacaatgaagaaattttggatcttctatgcccatctcgtgagaaagctcaaataaatatacgggaggatcctaaggaaggcataaagattgtgggactcactgagaagactgttttagttgccttggatactgtttcctgtttggagcagggcaacaactctaggactgtggcctccacagctatgaactcccagtcgtcccgatctcatgccatctttacaatctccatagagcaaagaaagaaaagtgacaagaattgcagctttcgctccaagctgcatcttgtagatctcgctggatcagaaagacagaagaaaaccaaggctgaaggggatcgtctaaaagagggtattaatattaaccgaggcctcctatgcttgggaaatgtaatcagtgctcttggagatgacaaaaagggtagctttgtgccctacagagattccaagttaactcgactgctgcaagattctctaggaggtaacagccacactcttatgatagcctgtgtgagtcctgctgactccaatctagaggaaacattaagtacccttcgctatgctgacagagcaagaaaaatcaagaacaaacctattgttaatattgatccccacacagctgaacttaatcatctaaagcaacaggtacaacagctacaagtcttgttgctacaagcccatggaggtaccctgcctggatctataaatgcagaaccatcagagaatctacaatccctgatggagaagaatcagtccctggtagaggagaatgaaaaattaagtcgttgtctgagcaaggcagctggtcagacagcccagatgttggagaggatcattttgacagagcaagtgaatgaaaaactgaacgccaagctagaagagctcaggcagcatgtggcctgcaagctggatcttcaaaagctagtggagactttggaagaccaggaattgaaagaaaatgtagagataatttgtaacctgcagcaactgattacccagttatcagatgaaactgttgcttgcacggctgcagccattgatactgcggtagaagaagaagctcaagtggaaaccagtccagagacaagcaggtcttctgacgcttttaccactcagcatgctctccatcaagctcagatgtctaaggaggtggttgagttgaataacgcccttgcactgaaagaggccctagttaggaagatgactcagaacgacaaccaactacagcccattcagtttcaataccaggataacataaaaaatctagaattagaagtcatcaatctgcaaaaggaaaaggaagaattggttcgtgaacttcagacagcaaagaagaatgtcaaccaagccaagctgagtgagcaccgccacaaacttctccaggagctggagggtcaaatagctgatctgaagaagaaactgaatgagcagtccaaacttctgaaactaaaggaatccacagagcgtactgtctccaagctgaaccaagagatatggatgatgaaaaaccagcgggtacagttaatgcgtcaaatgaaagaggatgctgagaagtttagacaatggaagcagaaaaaagacaaagaagtaatacagttgaaagaacgagaccgtaagaggcaatatgagctgctcaaacttgaaagaaacttccagaaacaatccagtgtgctcagacgtaaaacggaagaggcagcagctgccaacaagcgactcaaggatgctctccagaaacaacgagaggtcacagataagcggaaagagactcagagccatggaaaggaaggtattgcagctcgagtgaggaattggcttggaaatgaaattgaggttatggtcagtactgaggaagccaaacgccatctgaatgacctccttgaagacagaaagatcctggctcaggatgtggttcaactcaaagaaaaaaaggaatctcgggagaatccacctcctaaactccggaagtgtacattctccctttctgaggtgcatggtcaagttttggagtcagaagattgtattacaaaacagattgaaagcctagagactgaaatggaactcaggagtgctcagattgctgacctacagcagaagctgctggatgcagaaagtgaagataggccaaaacaatgctgggagaatattgccaccattctggaagccaagtgtgccctgaaatatttgattggagagctggtctcctccaaaatacatgtcaccaaacttgaaaacagcctgagacagagcaaggccagctgtgctgacatgcagaagatgctatttgaggaacaaaatcatttttctgagatagagacagagttacaagctgagctggtcagaatggagcaacagcaccaagagaaggtgctataccttgtcagccagctgcaggaaagccaaatggcagagaagcagttagagaaatcagccagtgaaaaggaacaacagctggtgagcacactgcagtgtcaggatgaagaacttgagaagatgcgagaagtgtgtgagcaaaatcagcagcttctccaagagaatgaaatcatcaagcagaaactgatcctcctccaggtagccagcagacagaaacatcttcctaatgatacccttctatctccagactcttcttttgaatatatcccacctaagccaaaaccttctcgtgttaaagaaaagtttctggagcaaagcatggacatcgaggatctaaaatattgttcagagcattctgtgaatgagcatgaagatggtgatggtgatggcgacagtgatgagggggatgatgaggaatggaagccaacaaaattagtcaaggtgtccaggaagaacatccaagggtgttcctgcaagggctggtgtgggaacaagcagtgtgggtgcaggaagcaaaagtcagactgtggtgtggactgtagctgtgaccccacaaagtgtcggaaccgccagcaaggcaaggatagcttgggcactgttgaacagacccaggattccgaaggctccttcaaactggaggatcctaccgaggtgaccccaggattgagcttctttaaccctgtctgtgccacccccaatagcaagatcctgaaagagatgtgtgacatggagcaggtgctgtcaaagaagactgctccagctccctccccttttgacctcccagagtcgaaacatggagcaacagaataccaacaaaataagcctccagggaagaaaaagaaacgagctctggctagcaacaccagcttcttctctggctgctcccctatcgaagaagaggcccactgaagttggagtcatcatctctacccccaatctggcttgggagatgctttccagttgcagccagaaggggttttttaaatgacttctctggatttcaggtttcttgccgttgaaaaaaaggaacaaagcattactaaaaagaaggtaacctttgttggatgttgtccctcagtctccatccccagactactgctctctgctctctagaaggctgctaaaccacctgctgaagagagaaccaacagactttcctaatgactcatcaggaaccagtcctcagtatgatcaagttccttcttatttgtgagcagttcaggctatctcctgatggggatgaggccaaggctttcttatcttttggttgtctctgcttaatggaggagcctggcctaggatggaggtctggctcagatctttcactccacctcgggaatggggttgtgatctttcctgtcctgaccccctctgaattgtaagtgtttcaatagtactcttgattgtatgccatgttgttgaagtaaatgaattatttttaaatgttaagtaaataaaccttagcccatctactgtt

SEQ ID NO: 15435 - DNA, 5824 bp, Homo sapiens
  source 1..5824: mol_type = unassigned DNA
cgcccaggcccgcagcgcggcgctgcagcgcgaggggcggagaggcagagagcccgaaaggaccagacgcccaggtcgcccgcatcccgctgccgcaggagagagacagcgcgccccggccctgctccccaggcttcgcccgggcgccctcaactctgtccccagagactgagcacctgtcctccgcctcggcctctgctgagagccctctcctctggagcacacaccacccctgcagcccaagaagagtcccagccccacgccggctaccaccatggcggagaccaacaacgaatgtagcatcaaggtgctctgccgattccggcccctgaaccaggctgagattctgcggggagacaagttcatccccattttccaaggggacgacagcgtcgttattggggggaagccatatgtttttgaccgtgtattccccccaaacacgactcaagagcaagtttatcatgcatgtgccatgcagattgtcaaagatgtccttgctggctacaatggcaccatttttgcttatggacagacatcctcagggaaaacacataccatggagggaaagctgcacgaccctcagctgatgggaatcattcctcgaattgcccgagacatcttcaaccacatctactccatggatgagaaccttgagttccacatcaaggtttcttactttgaaatttacctggacaaaattcgtgaccttctggatgtgaccaagacaaatctgtccgtgcacgaggacaagaaccgggtgccatttgtcaagggttgtactgaacgctttgtgtccagcccggaggagattctggatgtgattgatgaagggaaatcaaatcgtcatgtggctgtcaccaacatgaatgaacacagctctcggagccacagcatcttcctcatcaacatcaagcaggagaacatggaaacggagcagaagctcagtgggaagctgtatctggtggacctggcagggagtgagaaggtcagcaagactggagcagagggagccgtgctggacgaggcaaagaatatcaacaagtcactgtcagctctgggcaatgtgatctccgcactggctgagggcactaaaagctatgttccatatcgtgacagcaaaatgacaaggattctccaggactctctcgggggaaactgccggacgactatgttcatctgttgctcaccatccagttataatgatgcagagaccaagtccaccctgatgtttgggcagcgggcaaagaccattaagaacactgcctcagtaaatttggagttgactgctgagcagtggaagaagaaatatgagaaggagaaggagaagacaaaggcccagaaggagacgattgcgaagctggaggctgagctgagccggtggcgcaatggagagaatgtgcctgagacagagcgcctggctggggaggaggcagccctgggagccgagctctgtgaggagacccctgtgaatgacaactcatccatcgtggtgcgcatcgcgcccgaggagcggcagaaatacgaggaggagatccgccgtctctataagcagcttgacgacaaggatgatgaaatcaaccaacaaagccaactcatagagaagctcaagcagcaaatgctggaccaggaagagctgctggtgtccacccgaggagacaacgagaaggtccagcgggagctgagccacctgcaatcagagaacgatgccgctaaggatgaggtgaaggaagtgctgcaggccctggaggagctggctgtgaactatgaccagaagtcccaggaggtggaggagaagagccagcagaaccagcttctggtggatgagctgtctcagaaggtggccaccatgctgtccctggagtctgagttgcagcggctacaggaggtcagtggacaccagcgaaaacgaattgctgaggtgctgaacgggctgatgaaggatctgagcgagttcagtgtcattgtgggcaacggggagattaagctgccagtggagatcagtggggccatcgaggaggagttcactgtggcccgactctacatcagcaaaatcaaatcagaagtcaagtctgtggtcaagcggtgccggcagctggagaacctccaggtggagtgtcaccgcaagatggaagtgaccgggcgggagctctcatcctgccagctcctcatctctcagcatgaggccaagatccgctcgcttacggaatacatgcagagcgtggagctaaagaagcggcacctggaagagtcctatgactccttgagcgatgagctggccaagctccaggcccaggaaactgtgcatgaagtggccctgaaggacaaggagcctgacactcaggatgcagatgaagtgaagaaggctctggagctgcagatggagagtcaccgggaggcccatcaccggcagctggcccggctccgggacgagatcaacgagaagcagaagaccattgatgagctcaaagacctaaatcagaagctccagttagagctagagaagcttcaggctgactacgagaagctgaagagcgaagaacacgagaagagcaccaagctgcaggagctgacatttctgtacgagcgacatgagcagtccaagcaggacctcaagggtctggaggagacagttgcccgggaactccagaccctccacaaccttcgcaagctgttcgttcaagacgtcacgactcgagtcaagaaaagtgcagaaatggagcccgaagacagtggggggattcactcccaaaagcagaagatttcctttcttgagaacaacctggaacagcttacaaaggttcacaaacagctggtacgtgacaatgcagatctgcgttgtgagcttcctaaattggaaaaacgacttagggctacggctgagagagttaaggccctggagggtgcactgaaggaggccaaggagggcgccatgaaggacaagcgccggtaccagcaggaggtggaccgcatcaaggaggccgttcgctacaagagctcgggcaaacggggccattctgcccagattgccaaacccgtccggcctggccactacccagcatcctcacccaccaacccctatggcacccggagccctgagtgcatcagttacaccaacagcctcttccagaactaccagaatctctacctgcaggccacacccagctccacctcagatatgtactttgcaaactcctgtaccagcagtggagccacatcttctggcggccccttggcttcctaccagaaggccaacatggacaatggaaatgccacagatatcaatgacaataggagtgacctgccgtgtggctatgaggctgaggaccaggccaagcttttccctctccaccaagagacagcagccagctaatctcccacacccacggctgcatacctgcactttcagtttctaagagggactgaggcctcttctcagcatgctgcaaacctgtggtctctgatactaactccctccccaacccctgttgttggactgtactatgtttgatgtcttctcttacttactctgtatctctttgtactctgtatctatatatcaaaagctgctgctatgtctctcttctgtcttattctcaagtatctactgatgtatttagcaatttcaaagcatagtctaccttccttatttggggcaatagggaggagggtgaatgtttcttctttctcatctactcgtctcacactgagtggtgttagtcactgagtagaggtcacagagatgacaaaaggaaaaatgggagctagagggttgtgacccttcatacacacacgcacgcacgcacacaaacatgcacacacgcatgcacacacacaaagccttaagcagaagaatgtcttagcatcatgagacagagaaatagactcttcctccctcctctttcacatatagcacaggggaaggtaaaatggaagggctgctaattgagacatataattttcttcatacacccctcaccttaatcaaaggattcaggtgttacttctgccctacaaagtctgccttttgcctccctcttcctgttttcccctggactgagaaatgggttgctcaagggaccatttccctttttcttcaagctccttttgatattccctgccccagagctcatgaccagaacccagagctgatttaaaatattttgaaaaatggaggaggcagactgctcccagcagcctgtcaatggctgctcatctgtccatggagatggttacaggcaggtgtagtcaaaatgattgattccttgggtttgggggtgaataggctgggaaatttctgagccttttttttttgtcacagtgccctcaagttgaagtgatgagctggatttctttcttgttccatactgggcggcatgctcctcccatctccaccccttggtttgggggcttccagctcattggcaaaatctctctagttgccttcctttcaagctggagcctgacttttccccaatgtacattttttttttctccacaaagagttccttctctaatgtccccatctggtattaagtgcactttaaagaaaggggcagggtggattttcaagaggtgggaagctctaaggcttgaccctgaggggtcttctcccagccattctcagcccatatgcagcaccctccatactgaagaggactgttgttttagtttcagacggtcctttccttccacatggtgctaaggtggttttctaggtaactgcagggatggaggtcactagccattccaaaccaggagagaaagtctggtgtcctgatatccagtcttttctaggaggaagaccaagattctccagcggcagggcagcctatcacccaacttctaagtcaggaaaggaagctgagtgggaatgccagctggtaagcgcaggctgcactggcccatgactccttcaaggaaaagaggccctgctccctttacctgctgagctccttttagcagttagggagaactgcagggggaaaaataccagtggagtgtggaataaatccaaagcagtgatttttaaatgtttttcaaaaacaaatcttacatagaaccccaatataaaaaataaagtaatgcagacctgggcagtttgcatttttttttttttttttttttggtggaagaagtctcagcgtctcttaggactgactgttcaaaggctcctcagcaaatgagcccttgaacagtcctaagagaccctgaggattctgtggagtagtttgaaaaccattgttctgaggaagggggtccaatctggctcctctgcactaaagctgcaactcatggaaaagagggcaacggtggggtagacaagccatgctgtctccagacccactagggtggaaggaaggttcctgtgggcctgtggacttaggctaatatttgctgtcagcagggcacttaagaatccagggggttttatgtaatgttgccaccacatggttcttttaaaaacacataaggaaatgtgagggtgtagcgcagatgaggagagagatgacacagagggagcagccttctctttagcaagatgtaagggaaatataattcacttacataaaaaagaaacaacacacacgcaaacccttcaccagaagcttcacactacatcctcctcctcctcctgctccccaccttcaccgcatccctttcagagccagggtcactgcaaggggcacctggcctgcccactcacatctgccaaaatgttgcatgccagcgtggaagacaaaccaaactgcgcaaccccctgtgtgtatttacttggtgtacatagataactttaaaataaaataaattcaatgataactct

SEQ ID NO: 15436 - DNA, 564 bp, Homo sapiens
  source 1..564: mol_type = unassigned DNA
aagagctcgggcaaacggggccattctgcccagattgccaaacccgtccggcctggccactacccagcatcctcacccaccaacccctatggcacccggagccctgagtgcatcagttacaccaacagcctcttccagaactaccagaatctctacctgcaggccacacccagctccacctcagatatgtactttgcaaactcctgtaccagcagtggagccacatcttctggcggccccttggcttcctaccagaaggccaacatggacaatggaaatgccacagatatcaatgacaataggagtgacctgccgtgtggctatgaggctgaggaccaggccaagcttttccctctccaccaagagacagcagccagctaatctcccacacccacggctgcatacctgcactttcagctccttttagcagttagggagaactgcagggggaaaaataccagtggagtgtggaataaatccaaagcagtgatttttaaatgtttttcaaaaacaaatcttacatagaaccccaatataaaaaataaagtaatgcagacctgggca

SEQ ID NO: 15437 - DNA, 5877 bp, Homo sapiens
  source 1..5877: mol_type = unassigned DNA
cgccctgtcgcccaacggcggcctcaggagtgatcgggcagcagtcggccggccagcggacggcagagcgggcggacgggtaggcccggcctgctcttcgcgaggaggaagaaggtggccactctcccggtccccagaacctccccagcccccgcagtccgcccagaccgtaaagggggacgctgaggagccgcggacgctctccccggtgccgccgccgctgccgccgccatggctgccatgatggatcggaagtgagcattagggttaacggctgccggcgccggctcttcaagtcccggctccccggccgcctccacccggggaagcgcagcgcggcgcagctgactgctgcctctcacggccctcgcgaccacaagccctcaggtccggcgcgttccctgcaagactgagcggcggggagtggctcccggccgccggccccggctgcgagaaagatggcggacctggccgagtgcaacatcaaagtgatgtgtcgcttcagacctctcaacgagtctgaagtgaaccgcggcgacaagtacatcgccaagtttcagggagaagacacggtcgtgatcgcgtccaagccttatgcatttgatcgggtgttccagtcaagcacatctcaagagcaagtgtataatgactgtgcaaagaagattgttaaagatgtacttgaaggatataatggaacaatatttgcatatggacaaacatcctctgggaagacacacacaatggagggtaaacttcatgatccagaaggcatgggaattattccaagaatagtgcaagatatttttaattatatttactccatggatgaaaatttggaatttcatattaaggtttcatattttgaaatatatttggataagataagggacctgttagatgtttcaaagaccaacctttcagttcatgaagacaaaaaccgagttccctatgtaaaggggtgcacagagcgttttgtatgtagtccagatgaagttatggataccatagatgaaggaaaatccaacagacatgtagcagttacaaatatgaatgaacatagctctaggagtcacagtatatttcttattaatgtcaaacaagagaacacacaaacggaacaaaagctgagtggaaaactttatctggttgatttagctggtagtgaaaaggttagtaaaactggagctgaaggtgctgtgctggatgaagctaaaaacatcaacaagtcactttctgctcttggaaatgttatttctgctttggctgagggtagtacatatgttccatatcgagatagtaaaatgacaagaatccttcaagattcattaggtggcaactgtagaaccactattgtaatttgctgctctccatcatcatacaatgagtctgaaacaaaatctacactcttatttggccaaagggccaaaacaattaagaacacagtttgtgtcaatgtggagttaactgcagaacagtggaaaaagaagtatgaaaaagaaaaagaaaaaaataagatcctgcggaacactattcagtggcttgaaaatgagctcaacagatggcgtaatggggagacggtgcctattgatgaacagtttgacaaagagaaagccaacttggaagctttcacagtggataaagatattactcttaccaatgataaaccagcaaccgcaattggagttataggaaattttactgatgctgaaagaagaaagtgtgaagaagaaattgctaaattatacaaacagcttgatgacaaggatgaagaaattaaccagcaaagtcaactggtagagaaactgaagacgcaaatgttggatcaggaggagcttttggcatctaccagaagggatcaagacaatatgcaagctgagctgaatcgccttcaagcagaaaatgatgcctctaaagaagaagtgaaagaagttttacaggccctagaagaacttgctgtcaattatgatcagaagtctcaggaagttgaagacaaaactaaggaatatgaattgcttagtgatgaattgaatcagaaatcggcaactttagcgagtatagatgctgagcttcagaaacttaaggaaatgaccaaccaccagaaaaaacgagcagctgagatgatggcatctttactaaaagaccttgcagaaataggaattgctgtgggaaataatgatgtaaagcagcctgagggaactggcatgatagatgaagagttcactgttgcaagactctacattagcaaaatgaagtcagaagtaaaaaccatggtgaaacgttgcaagcagttagaaagcacacaaactgagagcaacaaaaaaatggaagaaaatgaaaaggagttagcagcatgtcagcttcgtatctctcaacatgaagccaaaatcaagtcattgactgaataccttcaaaatgtggaacaaaagaaaagacagttggaggaatctgtcgatgccctcagtgaagaactagtccagcttcgagcacaagagaaagtccatgaaatggaaaaggagcacttaaataaggttcagactgcaaatgaagttaagcaagctgttgaacagcagatccagagccatagagaaactcatcaaaaacagatcagtagtttgagagatgaagtagaagcaaaagcaaaacttattactgatcttcaagaccaaaaccagaaaatgatgttagagcaggaacgtctaagagtagaacatgagaagttgaaagccacagatcaggaaaagagcagaaaactacatgaacttacggttatgcaagatagacgagaacaagcaagacaagacttgaagggtttggaagagacagtggcaaaagaacttcagactttacacaacctgcgcaaactctttgttcaggacctggctacaagagttaaaaagagtgctgagattgattctgatgacaccggaggcagcgctgctcagaagcaaaaaatctcctttcttgaaaataatcttgaacagctcactaaagtgcacaaacagttggtacgtgataatgcagatctccgctgtgaacttcctaagttggaaaagcgacttcgagctacagctgagagagtgaaagctttggaatcagcactgaaagaagctaaagaaaatgcatctcgtgatcgcaaacgctatcagcaagaagtagatcgcataaaggaagcagtcaggtcaaagaatatggccagaagagggcattctgcacagattgctaaacctattcgtcccgggcaacatccagcagcttctccaactcacccaagtgcaattcgtggaggaggtgcatttgttcagaacagccagccagtggcagtgcgaggtggaggaggcaaacaagtgtaatcgtttatacatacccacaggtgttaaaaagtaatcgaagtacgaagaggacatggtatcaagcagtcattcaatgactataacctctactcccttgggattgtagaattataacttttaaaaaaaatgtataaattatacctggcctgtacagctgtttcctacctactcttcttgtaaactctgctgcttcccaacacaactagagtgcaattttggcatcttaggagggaaaaaggacagtttacaactgtggccctatttattacacagtttgtctatcgtgtcttaaatttagtctttactgtgccaagctaactgtaccttataggactgtactttttgtattttttgtgtatgtttattttttaatctcagtttaaattacctagctgctactgcttcttgtttttcttttcctattaaaacgtcttcctttttttttcttaagagaaaatggaacatttaggttaaatgtctttaaattttaccacttaacaacactacatgcccataaaatatatccagtcagtactgtattttaaaatcccttgaaatgatgatatcagggttaaaattacttgtattgtttctgaagtttgctcctgaaaactactgtttgagcactgaaacgttacaaatgcctaataggcatttgagactgagcaaggctacttgttatctcatgaaatgcctgttgccgagttattttgaatagaaatattttaaagtatcaaaagcagatcttagtttaagggagtttggaaaaggaattatatttctctttttcctgattctgtactcaacaagtcttgatggaattaaaatactctgctttattctggtgagcctgctagctaatataagtattggacaggtaataatttgtcatctttaatattagtaaaatgaattaagatattataggattaaacataattttatacggttagtactttattggccgacctaaatttatagcgtgtggaaattgagaaaaatgaagaaacaggacagatatatgatgaattaaaaatatatataggtcaattttggtctgaaatccctgaggtgtttttaacctgctacactaatttgtacactaatttatttctttagtctagaaatagtaaattgtttgcaagtcactaataatcattagataaattattttcttggccatagccgataattttgtaatcagtactaagtgtatacgtatttttgccactttttcctcagatgattaaagtaagtcaacagcttattttaggaaactgtaaaagtaatagggaaagagatttcactatttgcttcatcagtggtaggggggcggtgactgcaactgtgttagcagaaattcacagagaatggggatttaaggttagcagagaaacttggaaagttctgtgttaggatcttgctggcagaattaactttttgcaaaagttttatacacagatatttgtattaaatttggagccatagtcagaagactcagatcataattggcttatttttctatttccgtaactattgtaatttccacttttgtaataattttgatttaaaatataaatttatttatttatttttttaatagtcaaaaatctttgctgttgtagtctgcaacctctaaaatgattgtgttgcttttaggattgatcagaagaaacactccaaaaattgagatgaaatgttggtgcagccagttataagtaatatagttaacaagcaaaaaaagtgctgccaccttttatgatgattttctaaatggagaaacatttggctgcatccacatagacctttatgttttgttttcagttgaaaacttgcctcctttggcaacattcgtaaatgaagcagaatttttttttctcttttttccaaatatgttagttttgttcttgtaagatgtatcatgggtattggtgctgtgtaatgaacaacgaattttaattagcatgtggttcagaatatacaatgttaggtttttaaaaagtatcttgatggttcttttctatttataatttcagactttcataaagtgtaccaagaatttcataaatttgttttcagtgaactgctttttgctatggtaggtcattaaacacagcacttactcttaaaaatgaaaatttctgatcatctaggatattgacacatttcaatttgcagtgtctttttgactggatatattaacgttcctctgaatggcattgatagatggttcagaagagaaactcaatgaaataaagagaatatttattcatggcgattaattaaattatttgcctaacttaagaaaactactgtgcgtaactctcagtttgtgcttaactccatttgacatgaggtgacagaagagagtctgagtctacctgtggaatatgttggtttattttcagtgcttgaagatacattcacaaatacttggtttgggaagacaccgtttaattttaagttaacttgcatgttgtaaatgcgttttatgtttaaataaagaggaaaattttttgaaatgtaa

SEQ ID NO: 15438 - DNA, 6272 bp, Homo sapiens
  source 1..6272: mol_type = unassigned DNA
gggaagctgcatgacccccagctcatggggatcatcccacgaattgcccatgatatctttgaccatatctactccatggatgagaacctggagtttcacataaaggtttcctattttgagatctacttggacaaaataagggacttacttgatgtatccaagaccaacttggctgttcatgaagataaaaacagagtcccgtatgtaaaggggtgcactgagcggtttgtgtcgagccctgaggaagtcatggatgtaatagatgaaggcaaagcaaaccgacacgtggctgtgacaaacatgaatgaacacagctctagaagtcacagtatcttcctgataaatattaaacaagagaatgtagagactgaaaaaaaactcagtgggaaactttatttggttgatttggctgggagcgaaaaggtcagcaaaactggtgccgagggagctgttcttgacgaagctaaaaatatcaataagtctttgtctgctcttggaaatgtgatctctgctttggcagaagggacaaaaacacatgtgccataccgggacagcaagatgactcggattcttcaggactctttgggtgggaactgcagaaccaccatcgtcatttgctgttctccttctgtcttcaatgaggctgagaccaagtccacactgatgttcggacagagagctaagaccatcaagaatacagtctctgtgaacctagaactgacagcagaagaatggaagaagaaatatgaaaaagagaaagagaaaaacaagactttgaagaatgttatccagcatctggagatggagctaaacaggtggaggaatggagaagctgtgcctgaggatgaacagatcagtgccaaggaccagaagaacctggagccttgtgataacacccccatcatagacaatattgctcctgttgttgctggcatctctacagaggagaaagagaagtacgatgaggagatctccagtctctacagacaactggatgacaaggatgatgaaattaaccagcagagccagctggctgaaaagctgaagcaacagatgttggatcaggatgagcttttagcttccacaagaagagactatgagaagatacaggaggagctgacacgtctccagattgaaaatgaggcagccaaggatgaggtgaaagaagttctccaggccctggaggagctggctgtcaattatgaccagaaatcacaggaagtggaggataagacccgggccaatgagcagctgacagacgagctggcccagaaaacgactacattgacaaccacacagagagagctgagccagctacaagagcttagcaaccaccagaagaaaagggcaactgagatcctgaatttgctgttgaaagatctgggggagataggtggaattattggcaccaatgatgtgaaaactttggcagatgtgaatggagtcattgaggaggagtttaccatggcccgcctgtacatcagcaagatgaagtcagaggtcaagtccctggtgaaccgcagcaaacagctcgagagcgcccagatggactccaacaggaagatgaatgccagcgagcgggagctggcagcctgccagctgctcatctcccagcacgaagccaagatcaagtctctgacagactacatgcagaacatggaacagaagaggaggcagctagaagagtcccaggactcgctcagcgaagagctggcaaagctccgagcccaggaaaaaatgcacgaagtcagcttccaggataaggagaaggaacatctgacgcggttgcaggatgctgaagaaatgaagaaggcgctggagcagcagatggagagccaccgggaagctcaccagaagcagctgtccagactccgagacgaaattgaggagaagcagaaaatcattgatgagattcgggatttgaatcagaaactgcaactggaacaggagaagcttagttctgattataacaagctgaaaatagaggaccaagagagagaaatgaagctggaaaagctcttattgctcaacgataaaagggaacaagccagagaagacctcaaagggctggaggagacagtgtctagagaattgcagacactgcacaaccttcggaaactctttgtccaggatctgaccacccgagttaaaaaaagtgtggagttggacaacgatgatggagggggcagtgctgcccagaagcagaaaatttccttcttggagaataacctggagcagctcaccaaagttcacaagcagctggtccgggacaacgcagacctgcgctgtgaactgcccaagctggagaagcggctgcgtgccacggcggagcgcgtcaaggctctggagagcgcgctgaaggaggccaaggagaacgccatgcgggaccgtaagcgctaccagcaggaggtggatcgtatcaaggaggccgtgcgggccaagaacatggccagaagggcccattcagcccagatcgccaagcccatccgccccggacactacccggcctcatctccaacggccgtccatgccattcgagggggaggaggcagctcttcaaattccactcactaccagaaataaatacaaaatatgactccacgtagcatgtcaaggactacattaatcaccaattcctttatttttccccccctacagtttccattttttttttatacttgcttactccagccatctgcagtacaccagtttcaggtcttttgagctgtgtagagtttctgtgtgtacagatgtgtgctcggacttttctctttttgagaaatctgaaggagatggttgcagaagatccacttactactgagaaccattaccaccgactcggcctccggggtgttgggtggtttctgggtggttcctggagcctcctctgggcagtgcactgtcccatctgtacgccctaatgtgccattccctagaggggaacaaccaagtgccgtggaggcagatgatcatggtctgcctcaactgtctggtttcctgtaaaataaacacattgttttatatttttagggaacaaaaagtgctgctatagggttcaaagttttccttctgaacacttttccgaaacaaattaccccaaagacacattttgaatatcctggtcacatctttggatctgtaaaatataccttttagtatggcacctgttaaaatgcaaagcaaatttctttggggcagaaaaacaatctgacagtagcagtgtagaatttgttcattcaaatacatctgtgtaaatgcaaaaagtcataaaattcacctccgagctgcttgcttttgaacctgcagcaactagtcttagccggcccggtttgaacatcgttctttcagaagtgctgaaaatgctgcaaagttggataagtggaaatgtggctgcccctctcctcactacttcctctctgatcgttctgaagcttgcattgggaatggctgctttctctaaccattttcagcttgagtgggtattgctgaagaaatccaacatcattccagcagttgaaaaaggaagccttcgggagaaagtgcttgtcaaaattttgttctttgtgcttgtgtatgagtaagttgccatgaataagttattattttaacccataattggcgactgtttatatgaattctttctttggcaccaaataggtttcatcttcttaggcacaattagaaaaaatccacatagatggatattttacatttagttattgctttatccaaatacatgaatctaaagctgaatcaacccttacttccagttgtgcttattaagaagatcaatttccaagtagtaaagttttcagggaaactgactgtgctgctatttgttttgacaaatttgggggtaagtcaatgacaaccaaaccaatctcggtggaaactcctatcctatcatgttgtgtgcccaagatgagtgagctggcactgtgccctgaagctttcaccactgtaatgaaatatatgccaggggagactttgggcttttctcatgactgtgtgggtcgaaggtagctcaagtgtgtgtgtgtgtgtgtgtgtgtgtgtgtgtgtgtgtgtgtgtgtatgtgtgtaaagtgctaagaactgtgcattgacatccaaacatttcttgtacaaaatttccctagcaaagcaaacctgctttgacttaatttatttgttaaatgttgcactttgtttatgtatgttttgtttttggtggggaataaggagagagaggacgacaaattctattgaagtatttattttgtgaagatggcaattttgcatttgtttaaatttttttcattctttaattttgttatcagtgccagcccaatatacctgctctaccattatttgcggtctgataaaagggtccttgtggggcaggttttgcaaagcttatcaggtaataacatatgccacataaccttgttgatatgtttgcttctgatttgggaagctaaacattggtgtttgagaggattgccaattattaattgtcattaccactactctccattactttttgtttggaaattgaacaaaggtcagtaatggtttttggctcttgttaatatccatcataaaatagattgttttagattctttccagggtgatttttccctgggtaccccgtttctacttctaaagaattgcttggcactttcatgtttcaaagggaaacattcgcttgtagttccattttacttgatctctacaagggactgacaacatttgctttacttttattcacagagaaagttggctttgatgtctcttaaagataattctgctagttgctgatcagccagtcagttcacctagcttcaatctttataggacttctaatctaattttcctatagtgtgactaaaagggaggcaaattattggaacggattattcaaatggatccttaaatattgctatgtataataagccagttattatatcaggaccatgttctctgtaggccactttctaaaaaagccacatatgtgcaattttcaggtttttagactattgctccctgtactttaaatgtaaaaaccacacttctgaacaactaagctcatgaatatgattttggttatatgcagcttttgactagcatgtattgtgtctttttctcctctatgaataattttatatttcatgctacttcttgaaagtttactctttgatgctctaagagaacagccagatggtttatatgaataatctttatctgcaggatggtggattggtaaattaggagaatgttgtttgagatatcaagatttatgtctgggaactaaaatatataatgccaaatgtgtttttgtcaattactagagaattctgtgcaaacatatcatctcttcaaatgctgcacactttgcttttgttaaacagcaggtagtagacagaacaataacagtttcgcgttaagacttttaaaggaaatagaatcgtgattaagaaatcagaatttatagatatattgggataaatgaagaaataaaaatgtttgtctagaatgtagcatctagtgactttttaaagccctaacgtttacataaagaagctctagttcttatagaaataacaaagcaaataaaagttcttaacaatcccctctttcgaagtgcatttttttaaagcagggcaggagacatttggactctagctatatgacatactgggaaaggcagagggtggagggaagatttcacttcattgtctagcccagaatcttgagcaagctaaagaaaccatcataatctaaaattgcttcatttaacactaacaatttagactttttaaaccaagcattgaataatggctggataactgccgaagtaagcgccgctccatgaagtctgcttacttatttaaaaattgtgtatcagttttaaatactgttcattgtgtgcagatataaggggaatagggcattctgtagaattatacatgtctagtttgtaaagtgtgtcctgtgtactgcagatgtgtgttctctgggctttatgtatctgtacagtagctttcacattaaaaaaattgtggacaaacttgtccggggggtttgaggggagaatggtggtttatatcaataacgatgctgtactatagtccatgtaacaaaagatctggaagtcaccctcctctggcccacggaaaattttggtaatcttctaggttctaaaatgaagatgtatgggtactctggcagactgcatgttgtataatttgaaaaatactaaaagtggaaaataaaattgaattaaactttg

SEQ ID NO: 15439 - DNA, 5867 bp, Homo sapiens
  source 1..5867: mol_type = unassigned DNA
atggccacttacatccacgtcagcaaaactggtgccgagggagctgttcttgacgaagctaaaaatatcaataagtctttgtctgctcttggaaatgtgatctctgctttggcagaagggacaaaaacacatgtgccataccgggacagcaagatgactcggattcttcaggactctttgggtgggaactgcagaaccaccatcgtcatttgctgttctccttctgtcttcaatgaggctgagaccaagtccacactgatgttcggacagagagctaagaccatcaagaatacagtctctgtgaacctagaactgacagcagaagaatggaagaagaaatatgaaaaagagaaagagaaaaacaagactttgaagaatgttatccagcatctggagatggagctaaacaggtggaggaatggagaagctgtgcctgaggatgaacagatcagtgccaaggaccagaagaacctggagccttgtgataacacccccatcatagacaatattgctcctgttgttgctggcatctctacagaggagaaagagaagtacgatgaggagatctccagtctctacagacaactggatgacaaggatgatgaaattaaccagcagagccagctggctgaaaagctgaagcaacagatgttggatcaggatgagcttttagcttccacaagaagagactatgagaagatacaggaggagctgacacgtctccagattgaaaatgaggcagccaaggatgaggtgaaagaagttctccaggccctggaggagctggctgtcaattatgaccagaaatcacaggaagtggaggataagacccgggccaatgagcagctgacagacgagctggcccagaaaacgactacattgacaaccacacagagagagctgagccagctacaagagcttagcaaccaccagaagaaaagggcaactgagatcctgaatttgctgttgaaagatctgggggagataggtggaattattggcaccaatgatgtgaaaactttggcagatgtgaatggagtcattgaggaggagtttaccatggcccgcctgtacatcagcaagatgaagtcagaggtcaagtccctggtgaaccgcagcaaacagctcgagagcgcccagatggactccaacaggaagatgaatgccagcgagcgggagctggcagcctgccagctgctcatctcccagcacgaagccaagatcaagtctctgacagactacatgcagaacatggaacagaagaggaggcagctagaagagtcccaggactcgctcagcgaagagctggcaaagctccgagcccaggaaaaaatgcacgaagtcagcttccaggataaggagaaggaacatctgacgcggttgcaggatgctgaagaaatgaagaaggcgctggagcagcagatggagagccaccgggaagctcaccagaagcagctgtccagactccgagacgaaattgaggagaagcagaaaatcattgatgagattcgggatttgaatcagaaactgcaactggaacaggagaagcttagttctgattataacaagctgaaaatagaggaccaagagagagaaatgaagctggaaaagctcttattgctcaacgataaaagggaacaagccagagaagacctcaaagggctggaggagacagtgtctagagaattgcagacactgcacaaccttcggaaactctttgtccaggatctgaccacccgagttaaaaaaagtgtggagttggacaacgatgatggagggggcagtgctgcccagaagcagaaaatttccttcttggagaataacctggagcagctcaccaaagttcacaagcagctggtccgggacaacgcagacctgcgctgtgaactgcccaagctggagaagcggctgcgtgccacggcggagcgcgtcaaggctctggagagcgcgctgaaggaggccaaggagaacgccatgcgggaccgtaagcgctaccagcaggaggtggatcgtatcaaggaggccgtgcgggccaagaacatggccagaagggcccattcagcccagatcgccaagcccatccgccccggacactacccggcctcatctccaacggccgtccatgccattcgagggggaggaggcagctcttcaaattccactcactaccagaaataaatacaaaatatgactccacgtagcatgtcaaggactacattaatcaccaattcctttatttttccccccctacagtttccattttttttttatacttgcttactccagccatctgcagtacaccagtttcaggtcttttgagctgtgtagagtttctgtgtgtacagatgtgtgctcggacttttctctttttgagaaatctgaaggagatggttgcagaagatccacttactactgagaaccattaccaccgactcggcctccggggtgttgggtggtttctgggtggttcctggagcctcctctgggcagtgcactgtcccatctgtacgccctaatgtgccattccctagaggggaacaaccaagtgccgtggaggcagatgatcatggtctgcctcaactgtctggtttcctgtaaaataaacacattgttttatatttttagggaacaaaaagtgctgctatagggttcaaagttttccttctgaacacttttccgaaacaaattaccccaaagacacattttgaatatcctggtcacatctttggatctgtaaaatataccttttagtatggcacctgttaaaatgcaaagcaaatttctttggggcagaaaaacaatctgacagtagcagtgtagaatttgttcattcaaatacatctgtgtaaatgcaaaaagtcataaaattcacctccgagctgcttgcttttgaacctgcagcaactagtcttagccggcccggtttgaacatcgttctttcagaagtgctgaaaatgctgcaaagttggataagtggaaatgtggctgcccctctcctcactacttcctctctgatcgttctgaagcttgcattgggaatggctgctttctctaaccattttcagcttgagtgggtattgctgaagaaatccaacatcattccagcagttgaaaaaggaagccttcgggagaaagtgcttgtcaaaattttgttctttgtgcttgtgtatgagtaagttgccatgaataagttattattttaacccataattggcgactgtttatatgaattctttctttggcaccaaataggtttcatcttcttaggcacaattagaaaaaatccacatagatggatattttacatttagttattgctttatccaaatacatgaatctaaagctgaatcaacccttacttccagttgtgcttattaagaagatcaatttccaagtagtaaagttttcagggaaactgactgtgctgctatttgttttgacaaatttgggggtaagtcaatgacaaccaaaccaatctcggtggaaactcctatcctatcatgttgtgtgcccaagatgagtgagctggcactgtgccctgaagctttcaccactgtaatgaaatatatgccaggggagactttgggcttttctcatgactgtgtgggtcgaaggtagctcaagtgtgtgtgtgtgtgtgtgtgtgtgtgtgtgtgtgtgtgtgtgtgtatgtgtgtaaagtgctaagaactgtgcattgacatccaaacatttcttgtacaaaatttccctagcaaagcaaacctgctttgacttaatttatttgttaaatgttgcactttgtttatgtatgttttgtttttggtggggaataaggagagagaggacgacaaattctattgaagtatttattttgtgaagatggcaattttgcatttgtttaaatttttttcattctttaattttgttatcagtgccagcccaatatacctgctctaccattatttgcggtctgataaaagggtccttgtggggcaggttttgcaaagcttatcaggtaataacatatgccacataaccttgttgatatgtttgcttctgatttgggaagctaaacattggtgtttgagaggattgccaattattaattgtcattaccactactctccattactttttgtttggaaattgaacaaaggtcagtaatggtttttggctcttgttaatatccatcataaaatagattgttttagattctttccagggtgatttttccctgggtaccccgtttctacttctaaagaattgcttggcactttcatgtttcaaagggaaacattcgcttgtagttccattttacttgatctctacaagggactgacaacatttgctttacttttattcacagagaaagttggctttgatgtctcttaaagataattctgctagttgctgatcagccagtcagttcacctagcttcaatctttataggacttctaatctaattttcctatagtgtgactaaaagggaggcaaattattggaacggattattcaaatggatccttaaatattgctatgtataataagccagttattatatcaggaccatgttctctgtaggccactttctaaaaaagccacatatgtgcaattttcaggtttttagactattgctccctgtactttaaatgtaaaaaccacacttctgaacaactaagctcatgaatatgattttggttatatgcagcttttgactagcatgtattgtgtctttttctcctctatgaataattttatatttcatgctacttcttgaaagtttactctttgatgctctaagagaacagccagatggtttatatgaataatctttatctgcaggatggtggattggtaaattaggagaatgttgtttgagatatcaagatttatgtctgggaactaaaatatataatgccaaatgtgtttttgtcaattactagagaattctgtgcaaacatatcatctcttcaaatgctgcacactttgcttttgttaaacagcaggtagtagacagaacaataacagtttcgcgttaagacttttaaaggaaatagaatcgtgattaagaaatcagaatttatagatatattgggataaatgaagaaataaaaatgtttgtctagaatgtagcatctagtgactttttaaagccctaacgtttacataaagaagctctagttcttatagaaataacaaagcaaataaaagttcttaacaatcccctctttcgaagtgcatttttttaaagcagggcaggagacatttggactctagctatatgacatactgggaaaggcagagggtggagggaagatttcacttcattgtctagcccagaatcttgagcaagctaaagaaaccatcataatctaaaattgcttcatttaacactaacaatttagactttttaaaccaagcattgaataatggctggataactgccgaagtaagcgccgctccatgaagtctgcttacttatttaaaaattgtgtatcagttttaaatactgttcattgtgtgcagatataaggggaatagggcattctgtagaattatacatgtctagtttgtaaagtgtgtcctgtgtactgcagatgtgtgttctctgggctttatgtatctgtacagtagctttcacattaaaaaaattgtggacaaacttgtccggggggtttgaggggagaatggtggtttatatcaataacgatgctgtactatagtccatgtaacaaaagatctggaagtcaccctcctctggcccacggaaaattttggtaatcttctaggttctaaaatgaagatgtatgggtactctggcagactgcatgttgtataatttgaaaaatactaaaagtggaaaataaaattgaattaaactttg

SEQ ID NO: 15440 - DNA, 6278 bp, Homo sapiens
  source 1..6278: mol_type = unassigned DNA
atgtgggggaagctgcatgacccccagctcatggggatcatcccacgaattgcccatgatatctttgaccatatctactccatggatgagaacctggagtttcacataaaggtttcctattttgagatctacttggacaaaataagggacttacttgatgtatccaagaccaacttggctgttcatgaagataaaaacagagtcccgtatgtaaaggggtgcactgagcggtttgtgtcgagccctgaggaagtcatggatgtaatagatgaaggcaaagcaaaccgacacgtggctgtgacaaacatgaatgaacacagctctagaagtcacagtatcttcctgataaatattaaacaagagaatgtagagactgaaaaaaaactcagtgggaaactttatttggttgatttggctgggagcgaaaaggtcagcaaaactggtgccgagggagctgttcttgacgaagctaaaaatatcaataagtctttgtctgctcttggaaatgtgatctctgctttggcagaagggacaaaaacacatgtgccataccgggacagcaagatgactcggattcttcaggactctttgggtgggaactgcagaaccaccatcgtcatttgctgttctccttctgtcttcaatgaggctgagaccaagtccacactgatgttcggacagagagctaagaccatcaagaatacagtctctgtgaacctagaactgacagcagaagaatggaagaagaaatatgaaaaagagaaagagaaaaacaagactttgaagaatgttatccagcatctggagatggagctaaacaggtggaggaatggagaagctgtgcctgaggatgaacagatcagtgccaaggaccagaagaacctggagccttgtgataacacccccatcatagacaatattgctcctgttgttgctggcatctctacagaggagaaagagaagtacgatgaggagatctccagtctctacagacaactggatgacaaggatgatgaaattaaccagcagagccagctggctgaaaagctgaagcaacagatgttggatcaggatgagcttttagcttccacaagaagagactatgagaagatacaggaggagctgacacgtctccagattgaaaatgaggcagccaaggatgaggtgaaagaagttctccaggccctggaggagctggctgtcaattatgaccagaaatcacaggaagtggaggataagacccgggccaatgagcagctgacagacgagctggcccagaaaacgactacattgacaaccacacagagagagctgagccagctacaagagcttagcaaccaccagaagaaaagggcaactgagatcctgaatttgctgttgaaagatctgggggagataggtggaattattggcaccaatgatgtgaaaactttggcagatgtgaatggagtcattgaggaggagtttaccatggcccgcctgtacatcagcaagatgaagtcagaggtcaagtccctggtgaaccgcagcaaacagctcgagagcgcccagatggactccaacaggaagatgaatgccagcgagcgggagctggcagcctgccagctgctcatctcccagcacgaagccaagatcaagtctctgacagactacatgcagaacatggaacagaagaggaggcagctagaagagtcccaggactcgctcagcgaagagctggcaaagctccgagcccaggaaaaaatgcacgaagtcagcttccaggataaggagaaggaacatctgacgcggttgcaggatgctgaagaaatgaagaaggcgctggagcagcagatggagagccaccgggaagctcaccagaagcagctgtccagactccgagacgaaattgaggagaagcagaaaatcattgatgagattcgggatttgaatcagaaactgcaactggaacaggagaagcttagttctgattataacaagctgaaaatagaggaccaagagagagaaatgaagctggaaaagctcttattgctcaacgataaaagggaacaagccagagaagacctcaaagggctggaggagacagtgtctagagaattgcagacactgcacaaccttcggaaactctttgtccaggatctgaccacccgagttaaaaaaagtgtggagttggacaacgatgatggagggggcagtgctgcccagaagcagaaaatttccttcttggagaataacctggagcagctcaccaaagttcacaagcagctggtccgggacaacgcagacctgcgctgtgaactgcccaagctggagaagcggctgcgtgccacggcggagcgcgtcaaggctctggagagcgcgctgaaggaggccaaggagaacgccatgcgggaccgtaagcgctaccagcaggaggtggatcgtatcaaggaggccgtgcgggccaagaacatggccagaagggcccattcagcccagatcgccaagcccatccgccccggacactacccggcctcatctccaacggccgtccatgccattcgagggggaggaggcagctcttcaaattccactcactaccagaaataaatacaaaatatgactccacgtagcatgtcaaggactacattaatcaccaattcctttatttttccccccctacagtttccattttttttttatacttgcttactccagccatctgcagtacaccagtttcaggtcttttgagctgtgtagagtttctgtgtgtacagatgtgtgctcggacttttctctttttgagaaatctgaaggagatggttgcagaagatccacttactactgagaaccattaccaccgactcggcctccggggtgttgggtggtttctgggtggttcctggagcctcctctgggcagtgcactgtcccatctgtacgccctaatgtgccattccctagaggggaacaaccaagtgccgtggaggcagatgatcatggtctgcctcaactgtctggtttcctgtaaaataaacacattgttttatatttttagggaacaaaaagtgctgctatagggttcaaagttttccttctgaacacttttccgaaacaaattaccccaaagacacattttgaatatcctggtcacatctttggatctgtaaaatataccttttagtatggcacctgttaaaatgcaaagcaaatttctttggggcagaaaaacaatctgacagtagcagtgtagaatttgttcattcaaatacatctgtgtaaatgcaaaaagtcataaaattcacctccgagctgcttgcttttgaacctgcagcaactagtcttagccggcccggtttgaacatcgttctttcagaagtgctgaaaatgctgcaaagttggataagtggaaatgtggctgcccctctcctcactacttcctctctgatcgttctgaagcttgcattgggaatggctgctttctctaaccattttcagcttgagtgggtattgctgaagaaatccaacatcattccagcagttgaaaaaggaagccttcgggagaaagtgcttgtcaaaattttgttctttgtgcttgtgtatgagtaagttgccatgaataagttattattttaacccataattggcgactgtttatatgaattctttctttggcaccaaataggtttcatcttcttaggcacaattagaaaaaatccacatagatggatattttacatttagttattgctttatccaaatacatgaatctaaagctgaatcaacccttacttccagttgtgcttattaagaagatcaatttccaagtagtaaagttttcagggaaactgactgtgctgctatttgttttgacaaatttgggggtaagtcaatgacaaccaaaccaatctcggtggaaactcctatcctatcatgttgtgtgcccaagatgagtgagctggcactgtgccctgaagctttcaccactgtaatgaaatatatgccaggggagactttgggcttttctcatgactgtgtgggtcgaaggtagctcaagtgtgtgtgtgtgtgtgtgtgtgtgtgtgtgtgtgtgtgtgtgtgtatgtgtgtaaagtgctaagaactgtgcattgacatccaaacatttcttgtacaaaatttccctagcaaagcaaacctgctttgacttaatttatttgttaaatgttgcactttgtttatgtatgttttgtttttggtggggaataaggagagagaggacgacaaattctattgaagtatttattttgtgaagatggcaattttgcatttgtttaaatttttttcattctttaattttgttatcagtgccagcccaatatacctgctctaccattatttgcggtctgataaaagggtccttgtggggcaggttttgcaaagcttatcaggtaataacatatgccacataaccttgttgatatgtttgcttctgatttgggaagctaaacattggtgtttgagaggattgccaattattaattgtcattaccactactctccattactttttgtttggaaattgaacaaaggtcagtaatggtttttggctcttgttaatatccatcataaaatagattgttttagattctttccagggtgatttttccctgggtaccccgtttctacttctaaagaattgcttggcactttcatgtttcaaagggaaacattcgcttgtagttccattttacttgatctctacaagggactgacaacatttgctttacttttattcacagagaaagttggctttgatgtctcttaaagataattctgctagttgctgatcagccagtcagttcacctagcttcaatctttataggacttctaatctaattttcctatagtgtgactaaaagggaggcaaattattggaacggattattcaaatggatccttaaatattgctatgtataataagccagttattatatcaggaccatgttctctgtaggccactttctaaaaaagccacatatgtgcaattttcaggtttttagactattgctccctgtactttaaatgtaaaaaccacacttctgaacaactaagctcatgaatatgattttggttatatgcagcttttgactagcatgtattgtgtctttttctcctctatgaataattttatatttcatgctacttcttgaaagtttactctttgatgctctaagagaacagccagatggtttatatgaataatctttatctgcaggatggtggattggtaaattaggagaatgttgtttgagatatcaagatttatgtctgggaactaaaatatataatgccaaatgtgtttttgtcaattactagagaattctgtgcaaacatatcatctcttcaaatgctgcacactttgcttttgttaaacagcaggtagtagacagaacaataacagtttcgcgttaagacttttaaaggaaatagaatcgtgattaagaaatcagaatttatagatatattgggataaatgaagaaataaaaatgtttgtctagaatgtagcatctagtgactttttaaagccctaacgtttacataaagaagctctagttcttatagaaataacaaagcaaataaaagttcttaacaatcccctctttcgaagtgcatttttttaaagcagggcaggagacatttggactctagctatatgacatactgggaaaggcagagggtggagggaagatttcacttcattgtctagcccagaatcttgagcaagctaaagaaaccatcataatctaaaattgcttcatttaacactaacaatttagactttttaaaccaagcattgaataatggctggataactgccgaagtaagcgccgctccatgaagtctgcttacttatttaaaaattgtgtatcagttttaaatactgttcattgtgtgcagatataaggggaatagggcattctgtagaattatacatgtctagtttgtaaagtgtgtcctgtgtactgcagatgtgtgttctctgggctttatgtatctgtacagtagctttcacattaaaaaaattgtggacaaacttgtccggggggtttgaggggagaatggtggtttatatcaataacgatgctgtactatagtccatgtaacaaaagatctggaagtcaccctcctctggcccacggaaaattttggtaatcttctaggttctaaaatgaagatgtatgggtactctggcagactgcatgttgtataatttgaaaaatactaaaagtggaaaataaaattgaattaaactttg

SEQ ID NO: 15441 - DNA, 6931 bp, Homo sapiens
  source 1..6931: mol_type = unassigned DNA
gatggctgagcgcgcaggagcccgggaggtctgagccgggcgaggctcgctccctgcgcatcgcctcctccgcccgccgcgtggtcgcgggcaggtgggccggggggcgctgggcaggggcggggcagggccagggcaggccggtctgcagccggaggggccggagcggagaagctgcccaccttcccgggctcggagcggccggggctgctcagccggccgggctcgcgatgacctgctgagaagcgtcgtcggaggctgcaggaggcggcctagctgtgggcggtgcagctcgcggcctcctccctcgtcgttcccggccccggccccccacccatccccgtgccccctccctaccgccggccgagatggcggatccagccgaatgcagcatcaaagtgatgtgccggttccggcccctcaacgaagcggagatcctccgcggggacaaattcatccccaaatttaaaggcgatgagaccgtggtgatcgggcaagggaagccatatgtcttcgacagagtgctacctcccaacacgacccaagagcaggtttacaatgcatgtgcgaagcaaattgtcaaagatgtccttgaaggttataacgggacgatttttgcgtatgggcagacttcatcaggaaaaacccacaccatggaggggaagctgcatgacccccagctcatggggatcatcccacgaattgcccatgatatctttgaccatatctactccatggatgagaacctggagtttcacataaaggtttcctattttgagatctacttggacaaaataagggacttacttgatgtatccaagaccaacttggctgttcatgaagataaaaacagagtcccgtatgtaaaggggtgcactgagcggtttgtgtcgagccctgaggaagtcatggatgtaatagatgaaggcaaagcaaaccgacacgtggctgtgacaaacatgaatgaacacagctctagaagtcacagtatcttcctgataaatattaaacaagagaatgtagagactgaaaaaaaactcagtgggaaactttatttggttgatttggctgggagcgaaaaggtcagcaaaactggtgccgagggagctgttcttgacgaagctaaaaatatcaataagtctttgtctgctcttggaaatgtgatctctgctttggcagaagggacaaaaacacatgtgccataccgggacagcaagatgactcggattcttcaggactctttgggtgggaactgcagaaccaccatcgtcatttgctgttctccttctgtcttcaatgaggctgagaccaagtccacactgatgttcggacagagagctaagaccatcaagaatacagtctctgtgaacctagaactgacagcagaagaatggaagaagaaatatgaaaaagagaaagagaaaaacaagactttgaagaatgttatccagcatctggagatggagctaaacaggtggaggaatggagaagctgtgcctgaggatgaacagatcagtgccaaggaccagaagaacctggagccttgtgataacacccccatcatagacaatattgctcctgttgttgctggcatctctacagaggagaaagagaagtacgatgaggagatctccagtctctacagacaactggatgacaaggatgatgaaattaaccagcagagccagctggctgaaaagctgaagcaacagatgttggatcaggatgagcttttagcttccacaagaagagactatgagaagatacaggaggagctgacacgtctccagattgaaaatgaggcagccaaggatgaggtgaaagaagttctccaggccctggaggagctggctgtcaattatgaccagaaatcacaggaagtggaggataagacccgggccaatgagcagctgacagacgagctggcccagaaaacgactacattgacaaccacacagagagagctgagccagctacaagagcttagcaaccaccagaagaaaagggcaactgagatcctgaatttgctgttgaaagatctgggggagataggtggaattattggcaccaatgatgtgaaaactttggcagatgtgaatggagtcattgaggaggagtttaccatggcccgcctgtacatcagcaagatgaagtcagaggtcaagtccctggtgaaccgcagcaaacagctcgagagcgcccagatggactccaacaggaagatgaatgccagcgagcgggagctggcagcctgccagctgctcatctcccagcacgaagccaagatcaagtctctgacagactacatgcagaacatggaacagaagaggaggcagctagaagagtcccaggactcgctcagcgaagagctggcaaagctccgagcccaggaaaaaatgcacgaagtcagcttccaggataaggagaaggaacatctgacgcggttgcaggatgctgaagaaatgaagaaggcgctggagcagcagatggagagccaccgggaagctcaccagaagcagctgtccagactccgagacgaaattgaggagaagcagaaaatcattgatgagattcgggatttgaatcagaaactgcaactggaacaggagaagcttagttctgattataacaagctgaaaatagaggaccaagagagagaaatgaagctggaaaagctcttattgctcaacgataaaagggaacaagccagagaagacctcaaagggctggaggagacagtgtctagagaattgcagacactgcacaaccttcggaaactctttgtccaggatctgaccacccgagttaaaaaaagtgtggagttggacaacgatgatggagggggcagtgctgcccagaagcagaaaatttccttcttggagaataacctggagcagctcaccaaagttcacaagcagctggtccgggacaacgcagacctgcgctgtgaactgcccaagctggagaagcggctgcgtgccacggcggagcgcgtcaaggctctggagagcgcgctgaaggaggccaaggagaacgccatgcgggaccgtaagcgctaccagcaggaggtggatcgtatcaaggaggccgtgcgggccaagaacatggccagaagggcccattcagcccagatcgccaagcccatccgccccggacactacccggcctcatctccaacggccgtccatgccattcgagggggaggaggcagctcttcaaattccactcactaccagaaataaatacaaaatatgactccacgtagcatgtcaaggactacattaatcaccaattcctttatttttccccccctacagtttccattttttttttatacttgcttactccagccatctgcagtacaccagtttcaggtcttttgagctgtgtagagtttctgtgtgtacagatgtgtgctcggacttttctctttttgagaaatctgaaggagatggttgcagaagatccacttactactgagaaccattaccaccgactcggcctccggggtgttgggtggtttctgggtggttcctggagcctcctctgggcagtgcactgtcccatctgtacgccctaatgtgccattccctagaggggaacaaccaagtgccgtggaggcagatgatcatggtctgcctcaactgtctggtttcctgtaaaataaacacattgttttatatttttagggaacaaaaagtgctgctatagggttcaaagttttccttctgaacacttttccgaaacaaattaccccaaagacacattttgaatatcctggtcacatctttggatctgtaaaatataccttttagtatggcacctgttaaaatgcaaagcaaatttctttggggcagaaaaacaatctgacagtagcagtgtagaatttgttcattcaaatacatctgtgtaaatgcaaaaagtcataaaattcacctccgagctgcttgcttttgaacctgcagcaactagtcttagccggcccggtttgaacatcgttctttcagaagtgctgaaaatgctgcaaagttggataagtggaaatgtggctgcccctctcctcactacttcctctctgatcgttctgaagcttgcattgggaatggctgctttctctaaccattttcagcttgagtgggtattgctgaagaaatccaacatcattccagcagttgaaaaaggaagccttcgggagaaagtgcttgtcaaaattttgttctttgtgcttgtgtatgagtaagttgccatgaataagttattattttaacccataattggcgactgtttatatgaattctttctttggcaccaaataggtttcatcttcttaggcacaattagaaaaaatccacatagatggatattttacatttagttattgctttatccaaatacatgaatctaaagctgaatcaacccttacttccagttgtgcttattaagaagatcaatttccaagtagtaaagttttcagggaaactgactgtgctgctatttgttttgacaaatttgggggtaagtcaatgacaaccaaaccaatctcggtggaaactcctatcctatcatgttgtgtgcccaagatgagtgagctggcactgtgccctgaagctttcaccactgtaatgaaatatatgccaggggagactttgggcttttctcatgactgtgtgggtcgaaggtagctcaagtgtgtgtgtgtgtgtgtgtgtgtgtgtgtgtgtgtgtgtgtgtgtatgtgtgtaaagtgctaagaactgtgcattgacatccaaacatttcttgtacaaaatttccctagcaaagcaaacctgctttgacttaatttatttgttaaatgttgcactttgtttatgtatgttttgtttttggtggggaataaggagagagaggacgacaaattctattgaagtatttattttgtgaagatggcaattttgcatttgtttaaatttttttcattctttaattttgttatcagtgccagcccaatatacctgctctaccattatttgcggtctgataaaagggtccttgtggggcaggttttgcaaagcttatcaggtaataacatatgccacataaccttgttgatatgtttgcttctgatttgggaagctaaacattggtgtttgagaggattgccaattattaattgtcattaccactactctccattactttttgtttggaaattgaacaaaggtcagtaatggtttttggctcttgttaatatccatcataaaatagattgttttagattctttccagggtgatttttccctgggtaccccgtttctacttctaaagaattgcttggcactttcatgtttcaaagggaaacattcgcttgtagttccattttacttgatctctacaagggactgacaacatttgctttacttttattcacagagaaagttggctttgatgtctcttaaagataattctgctagttgctgatcagccagtcagttcacctagcttcaatctttataggacttctaatctaattttcctatagtgtgactaaaagggaggcaaattattggaacggattattcaaatggatccttaaatattgctatgtataataagccagttattatatcaggaccatgttctctgtaggccactttctaaaaaagccacatatgtgcaattttcaggtttttagactattgctccctgtactttaaatgtaaaaaccacacttctgaacaactaagctcatgaatatgattttggttatatgcagcttttgactagcatgtattgtgtctttttctcctctatgaataattttatatttcatgctacttcttgaaagtttactctttgatgctctaagagaacagccagatggtttatatgaataatctttatctgcaggatggtggattggtaaattaggagaatgttgtttgagatatcaagatttatgtctgggaactaaaatatataatgccaaatgtgtttttgtcaattactagagaattctgtgcaaacatatcatctcttcaaatgctgcacactttgcttttgttaaacagcaggtagtagacagaacaataacagtttcgcgttaagacttttaaaggaaatagaatcgtgattaagaaatcagaatttatagatatattgggataaatgaagaaataaaaatgtttgtctagaatgtagcatctagtgactttttaaagccctaacgtttacataaagaagctctagttcttatagaaataacaaagcaaataaaagttcttaacaatcccctctttcgaagtgcatttttttaaagcagggcaggagacatttggactctagctatatgacatactgggaaaggcagagggtggagggaagatttcacttcattgtctagcccagaatcttgagcaagctaaagaaaccatcataatctaaaattgcttcatttaacactaacaatttagactttttaaaccaagcattgaataatggctggataactgccgaagtaagcgccgctccatgaagtctgcttacttatttaaaaattgtgtatcagttttaaatactgttcattgtgtgcagatataaggggaatagggcattctgtagaattatacatgtctagtttgtaaagtgtgtcctgtgtactgcagatgtgtgttctctgggctttatgtatctgtacagtagctttcacattaaaaaaattgtggacaaacttgtccggggggtttgaggggagaatggtggtttatatcaataacgatgctgtactatagtccatgtaacaaaagatctggaagtcaccctcctctggcccacggaaaattttggtaatcttctaggttctaaaatgaagatgtatgggtactctggcagactgcatgttgtataatttgaaaaatactaaaagtggaaaataaaattgaattaaactttg

SEQ ID NO: 15442 - DNA, 585 bp, Homo sapiens
  source 1..585: mol_type = unassigned DNA
gatggctgagcgcgcaggagcccgggaggtctgagccgggcgaggctcgctccctgcgcatcgcctcctccgcccgccgcgtggtcgcgggcaggtgggccggggggcgctgggcaggggcggggcagggccagggcaggccggtctgcagccggaggggccggagcggagaagctgcccaccttcccgggctcggagcggccggggctgctcagccggccgggctcgcgatgacctgctgagaagcgtcgtcggaggctgcaggaggcggcctagctgtgggcggtgcagctcgcggcctcctccctcgtcgttcccggccccggccccccacccatccccgtgccccctccctaccgccggccgagatggcggatccagccgaatgcagcatcaaagtgatgtgccggttccggcccctcaacgaagcggagatcctccgcggggacaaattcatccccaaatttaaaggcgatgagaccgtggtgatcgggcaagggaagccatatgtcttcgacagagtgctacctcccaacacgacccaagagcaggtttacaatgcatgtgcgaagcaaattgtcaaag

SEQ ID NO: 15443 - DNA, 1330 bp, Homo sapiens
  source 1..1330: mol_type = unassigned DNA
ctggaagagcctggggccacctgtctggtcagagtctctctgctgtgggcctcttggagccagggctggttttgtggtctgactgaagtgacaatgaaattaataggatcctgatgctgtgactgaggccatttccctgtgtctccaaacaggaatgagagaggaaatgtcattaggatgccaggaggcttttgaaatcttcaagagggaccacgctgacagcgttaccatcgatgacaacaaacagattctgaaacagagattttctgaagccaaggccctgggagaaagtataaatgaagcaagaagtaaaattggtcacctgaaggaagaaatcacccagcggcatatacagcaagtagccctaggaatctcggaaaacatggccgtgcctctgatgccagaccagcaggaggagaagctgcgatcacaactggaggaagaaaagagaaggtataaaacaatgttcactcgcctgaaagccctgaaggtggagatcgagcacttgcagctgctcatggacaaagccaaggtgaagctacagaaagagtttgaagtctggtgggcagaggaggccaccaacctgcaggtaaattctccagcagtgaattcactcgatcacacgaagccatttctccagacatctgactcccagcatgaatggtcccaactcctctctaacaaaagttctggaggctgggaagtccaagatcaaggcactggcagattcgatgtctgtgatgtgaatgccaggaaaatcctgccctcgccttgccccagtccacacagccagaaacagagcagcaccagcaccccactggaagacagcatccccaagaggccagtgtcgtccatccctctcaccggagacagccagacggactcggacatcatcgccttcatcaaggccagacagagcattctgcagaagcaatgtttgggaagcaattgaatttccaggaaatatccatccatgaattatgccagcaagaatgaagcacagatgaaggcagcgcccctcacttgctctggcttcagaagtgaactatgggctgctgggagcaactagtgactttgattcccatggaggggactgtgtttctttaaggatgctgacctggaggccaccgagaggctggggctggggctgaccacaacatccttcctgtggttgctggagctgctggcagggccaggcaaggccagagtgctaggggcagggtgaaggcttcagctcactgttgtagtgacgttttgtgtagatctttataagcttttgagaatgtgaaatagcaccatcaaaatataatgtcagaggatgctcacacca

SEQ ID NO: 15444 - DNA, 9082 bp, Homo sapiens
  source 1..9082: mol_type = unassigned DNA
gttgctaagactgtgggtcgccggaggtggtgggagttagttttggcagcccgggcctgagagaggtcaagggtcattgcagagccagggaggagatggtgaagcagactatccagatattcgcgagggtgaagccccctgtccggaagcaccaacaagggatttattccatagatgaagatgaaaaattaatacctagcttggaaatcatcttaccacgtgatttggcagatgggtttgtgaataataagcgagaaagctacaaatttaaatttcaaagaatttttgatcaggatgcaaaccaagagaccgtttttgaaaacattgccaaaccagttgctgggagtgtcctggcaggttacaatggtaccatctttgcatatgggcaaacaggcagcgggaagacattcactatcacagggggtgcagagcgttacagtgacagaggcattatcccaaggacactgtcatacatttttgaacagttacaaaaggacagcagcaaaatatatacaacacacatttcctatttggaaatctacaatgaatgtggttatgatcttttggatccaagacatgaagcctccagtttggaagatttgccgaaagtgacaatactggaggatcctgatcagaacattcacctgaaaaacttgactctccatcaggcaaccacagaggaagaagctctgaatttgctttttttaggagacaccaaccgaatgattgcagagactcctatgaaccaagcttcaacccgttcccactgcattttcaccattcatttgtcaagcaaggaaccaggatctgcaactgtacgacatgccaaactccatctggttgacctggctggttcagagcgagttgcaaagactggagtagggggccatcttctaacagaggccaagtatatcaacttgtcactacattacttagaacaggttatcattgccctttcagaaaagcaccgttcgcacattccttatagaaactccatgatgaccagtgtcctaagagacagtttgggagggaactgcatgacaactatgattgcaacactctccttggagaaaaggaatcttgatgagtctatatcaacctgcagatttgcacagcgagtggcactcataaagaatgaagctgttcttaatgaagaaattaaccccagattagtgattaaacgcctacaaaaggaaatccaggaactgaaggatgaactggccatggtcactggggagcagaggacagaggcactcacagaagcagagctccttcagctggaaaaactaataacatcctttttggaagaccaggattcagacagtagattagaggttggcgcggatatgcgtaaagttcatcactgttttcatcatttaaagaaactattgaatgacaagaagatccttgaaaacaatacagtctcctctgaaagcaaagaccaagattgtcaagaaccattaaaagaagaagaatatagaaagctacgagatattctgaaacagagagataacgaaatcaatatcctggtcaacatgttaaaaaaagaaaagaagaaagctcaggaggctctccacttggctggcatggatagacgtgaattcagacagtcccagagcccacccttccgcctaggaaacccagaagaaggtcaaagaatgcgactatcctcagctccctcacaggcccaggacttcagcattttggggaaaagatccagtttgctccacaagaaaataggaatgagagaggaaatgtcattaggatgccaggaggcttttgaaatcttcaagagggaccacgctgacagcgttaccatcgatgacaacaaacagattctgaaacagagattttctgaagccaaggccctgggagaaagtataaatgaagcaagaagtaaaattggtcacctgaaggaagaaatcacccagcggcatatacagcaagtagccctaggaatctcggaaaacatggccgtgcctctgatgccagaccagcaggaggagaagctgcgatcacaactggaggaagaaaagagaaggtataaaacaatgttcactcgcctgaaagccctgaaggtggagatcgagcacttgcagctgctcatggacaaagccaaggtgaagctacagaaagagtttgaagtctggtgggcagaggaggccaccaacctgcaggtaaattctccagcagtgaattcactcgatcacacgaagccatttctccagacatctgactcccagcatgaatggtcccaactcctctctaacaaaagttctggaggctgggaagtccaagatcaaggcactggcagattcgatgtctgtgatgtgaatgccaggaaaatcctgccctcgccttgccccagtccacacagccagaaacagagcagcaccagcaccccactggaagacagcatccccaagaggccagtgtcgtccatccctctcaccggagacagccagacggactcggacatcatcgccttcatcaaggccagacagagcattctgcagaagcaatgtttgggaagcaattgaatttccaggaaatatccatccatgaattatgccagcaagaatgaagcacagatgaaggcagcgcccctcacttgctctggcttcagaagtgaactatgggctgctgggagcaactagtgactttgattcccatggaggggactgtgtttctttaaggatgctgacctggaggccaccgagaggctggggctggggctgaccacaacatccttcctgtggttgctggagctgctggcagggccaggcaaggccagagtgctaggggcagggtgaaggcttcagctcactgttgtagtgacgttttgtgtagatctttataagcttttgagaatgtgaaatagcaccatcaaaatataatgtcagaggatgctcacaccagtggaatgtggggggaatatttttatttttaacgatttgccagctctctcccttggcccgtgctctggtttggaagcccagaaatggccatgacaggtccaggcaggatgtcccagccacaggcaaggcagtggaatgcagggcatcctgaaggccaatcctgatctcccagaccacatctttcaccatcagcctcttggccaggatgacctggaggcagtgcctgaacagctgtgtctccagggagccatctgccctgcagggtctaaggacatcatagcacccagagaacagtgggcagctcccaggggctctgctgagagcttgagagagggcagtgtgggtaccttgggcctcacaaccttcacccagccacttgggaggatttgggctgacactccccacttccacagggaaaaacatagctgcctgggggtcttgtctccatgggccctctccatgacagatccaagggaaggtgggcagccctcaaggaggttcttgaagaactgccccctgggccagggggttccaacccagctgcagccagggaggggcagcggagggtgagcaggagtggcacctggaaatgaagctaactggataaaagtgctggtccactgctcctggtgtctctgtcctataaatacaggacctgatgaccctggaggggagcagagtggtaatatagtataattggcttgattttctttttcgttttttaggactgggtaacaggatcatgcaggagaagattaaaccattacatttctaagctaggcaggcccatcgagctcctctaatccacacccctattttatataattagaaggccagagtgaaggggagattcagcttgctgttctatgccactgacaaatgtcccctcttcagggggcttcccctgaccactccatctcgagtcaccccctagttatcccctatcccattaccattttttctgcatcactatctgacatgttatccttccgaacttgcctatttttgaaatacctgcaaccccccataatactaagagctccaatgcaacagggacctgtttgtcttgctcattgctgtgtcccaagcacagagtcgctgttcagtaaacggtccttcagttcatgagtagacgagccagaacccagatgtgtttctcaggctggtgtcactctgacttcccccaggctctgactgaatcccatcgggacaggggccagcatctctggtccactcctggccctcacagttcaatggaacatagtaagccctctgtaaagtctgtagaaccagaggaagaccaaattctgattctagaagcctccccaagagtccatggaacacacatgtaactgcacacacacacacacatacacacacacactctcaagagccctgaagatggcatggcatttgccccagtcccctatgtagcagcagcagtattcttggcatgccttagtgccctcagccctctagagctgggtagagtctactaacttttattttcttttatttttactttcttttatttattttttgagatggggggggtctctgtcagccaggctggggtgcagtggtgcgaccatacctcactagtcagcctccaactcctgggctcaagccatactcagcctccaactcctgggctcaagcgatcctctcacctcagcctccaaagtagctggaactacaggcatgcaccaccacacctagctcgttttaaattttttgtagagacagggtctcactgtgtggctcaggatggtctcaaattcctggccttaagcgatgctcccgccttggcctcccaaagtgctgggattgcaggcatgagccacataccctgccagagtctttcaacattagatctcccactgagacatcatctcctggatccaaaggccttactgacagagatgtgtggcatggccccatgcggggtgtgaaccagcctcctggggcaatcactaagacaggaaaggaaatgaagacagaaaaacacacaacatgggatctggggccactggtgtccagagcatatgcaaagtgtgtgcagcaactggccaaggggccttttgctccgaacatcccctaatggaagcccagcctttgatatggacacatgcttgacagcagtgcaccttcccagagttcactggcctctgcaaatgggagaaattgatgcaatgttttgaaaagactttccagcaatccacctgggatcagtggagccacggatgacaagaagtatctgagttcactctaggccaaaatgtgggattttcaaaaacattttctggaaagcagcctagccagtgactccagcccagtccctgctagaattcaactggctctaccaatcccttgacaagaagtagggtggacggaggttggaggagggaagttaaaatgtagcttgcccagatcttgctaaaaaggagttttagaaagcagatagagaaattgtggtatactgaatacatcattttaattcttcaccaccagtatagaattacacatccaaagctttgtcatggcccactttgactaatgtggtgttggcaaacctgatccaggcagaggcttgaattgtgctctcatggttgagcttgcctcttgctccagtgatctctcttgggatgaacatgccatgggtagctgctgccccttcagcctggaacatccagagagcagacctgagcccagtctacagcctggagcagagcctcccaggcaagcccagcccagatcagctgaactatggctcacccaaagacctattggcatgagaatatatgctgcttgtcataaaccactgaggtttagagtggtttgttatatagcattaattgtagcaatagcagactggcacagaaattggaacccagagacagtatatgactggatctaggatttctcagtgcagagttcattgtctctccatgcagcctgtggaaaggcactgagagcatcctgtatatggaaaagcaggaccaccacctacagccatgatgaagcaacaaggacctgatttaccctcctgctttaaatgactaaaaatgagacaaaatcctctatacaaaccaatggttttcagccattggataacaagcaatatagggtatgattgatccgcaagagaagggaaacaagtgaggggagccctatgattgctccaacttactgcctgcagtgagttttcaggctgcagcccaggaagggggaaccaggtagagcccagtggtttccctgagttgaggaaatggagctgggaatccagggaggacaaagtggcttaaatttgcaaggcagagtcccagggatgagagagagagaaggagagagagaggagaaaaaagagagagaaagagagagagcatgctctggagatcttcagagggttacccttgagtcttcagctaactaccgatcaacatctgcatgtgaagaaattacccaaggcaggggaaagaaccaccaggaggaagcaggtggaataatttcctgagataacactgtgttgggaagagttcatgtttccaacagccagagtggagaaacctcccaaaacagtcattgtatagagacacataaggtactgcctcagaagtggggccaaattagtcctagatgatagattgctctggtcccacctaacaaagcttaaaaagccagccccaaaggagtcaaattgtttccagtaagtttccaagtaacttcaatgagtcccaaaacaaagcttcaaaatatctaaaggaatatgaaaaacaaaccaaaaagaaaccagcatccaacaatatagaatccacaatgtctggtgtccattaaaaaataatcaggcatgcaaagaagcaggaaaatatgggccatgagaggagaaaaaaccatcaatagaaatagaggccgggtgtggtggctcactcctataatcccagcactttgggaggccgaggcaggaggatcacctgaggtcaggagttcaagaacagcctgttcaacatggggaaaccccgtctctactaaaaatacaaaaaatagccgggcatggtgttgcgtacctgtaatcccagctactcagaggctgaggcaggagaattgcttgagcccaggaggcagaggttacagtgagccgaaattgtgccattgcactccagcttgggcaacaagagtgaaactctgtctcaaaaaaaaaaaaaagaaaaaacaaatagaaacagccccaggcatggcacagttgatagagtaaatagacagaaacattttttaaaatgcaatgggtgtgtgtttcaaatctaggcagaaaaaatgctccttgtaattccttaaacataagcatgtctcattcatctggtcattgttttgacaaggatgtgccatccattgtgctaagttctgaggagtcagaggtgacagagacagagaaagtgccagcattcttggaaccttctaacgaaggagagggacaagccaggcatggtggctcacgcctgtaatcccaacactttgggagactgaggctggcggatcacgaggtcaggagtttgagaccaacctggccaacatggcgaaaccccatcgctactaaaaatacaaaaattagctgggtgtggtggtgcgcacctgtaatcccagctactctggaggctgaggcaggacaatcacttgaaccctggaggcagagtttgcagtgagctgagatcgtgccactgcactccaacctgggcaacaagagcgagactccttctctgaaaaaaaaaaaaagagagggacaataaacaagtaagcaagacaatctgattaagaaggagttggggttagctgggcatggtagcaagcgcctgtagtctcagctactcgggaggctgaggtgggaggatccttgaacccaggaggttaaggctgcagtgagctgtgatcacaccactgcactccagcctggatgacagagcaagaccctgtctcagaaaaagaagaaggagttgggggtggggtaggatgggcttggactcactatcaaggtgggtgggagtgtgagaacccggcaaggtgcaaagagagaagcagggaagggaagcttaggacaatgatggcaggttgggtattgggtgatgggaagaggcaaaggacgtggagcttggcaaaaaggggacttgtggggatttgggccatgtgagcatgtgggggagacagtgttccttccataacacgtgtccagggactgccagggctccgaggcagagcaggtgtagagaggttggctgtgaatgttggatgttgaaaacatatgtgtcaaatgtgggaggaaaaagcagtgtttccttgaatacaagctcctcctcaccttgcgaaaagtggcctctgagtgtagccctgaatgcatctcccaaggaataggaggaagcagcaaccttttcagagttaactgctttatttgggttttccatggcctcgtgccagccagcagggctgagccagtttcacccacactgagagggaactcagcaaagagcaagcagcatgccagctggtactcttccctctccattcactcagctcctgatctcaggagggcagcccctccccaggccagcacccctccccttctggccccaggtgtgggatgttgttgttttcttttctccgaaacatctcctgggtttgtcttttccatcactgtctttagactgaggcaagcagtccccatgccttcagccccatgttttgggggtaacctgtgctttgacatgctttgctaaaaactttctaagtctccctctggtgctgggaccagccatgaccaacaacgtcatccatgcaggccacccctaacatagtccaggcctcatgtgggtctcagttcccttttcttctttcaggaagttctccagtgcatgcatagggttgaccagatgtcccaaggtgctctaggacttatgcctatgaagctgttttagggcttcctagtcagtccctggttccaggaaagcagcctgatgaggagatcattcccgctggctggtgtggcatttcttttatggcactacctgggattgggccaccagacctgcgctaacatgctgatttgatggactcttaacatcataggacaaagaatcgtcatgtgaaccaattagacaataaacaaatgcctaagtgcc

SEQ ID NO: 15445 - DNA, 1220 bp, Homo sapiens
  source 1..1220: mol_type = unassigned DNA
gttgctaagactgtgggtcgccggaggtggtgggagttagttttggcagcccgggcctgagagaggtcaagggtcattgcagagccagggaggagatggtgaagcagactatccagatattcgcgagggtgaagccccctgtccggaagcaccaacaagggatttattccatagatgaagatgaaaaattaatacctagcttggaaatcatcttaccacgtgatttggcagatgggtttgtgaataataagcgagaaagctacaaatttaaatttcaaagaatttttgatcaggatgcaaaccaagagaccgtttttgaaaacattgccaaaccagttgctgggagtgtcctggcaggttacaatggtaccatctttgcatatgggcaaacaggcagcgggaagacattcactatcacagggggtgcagagcgttacagtgacagaggcattatcccaaggacactgtcatacatttttgaacagttacaaaaggacagcagcaaaatatatacaacacacatttcctatttggaaatctacaatgaatgtggttatgatcttttggatccaagacatgaagcctccagtttggaagatttgccgaaagtgacaatactggaggatcctgatcagaacattcacctgaaaaacttgactctccatcaggcaaccacagaggaagaagctctgaatttgctttttttaggagacaccaaccgaatgattgcagagactcctatgaaccaagcttcaacccgttcccactgcattttcaccattcatttgtcaagcaaggaaccaggatctgcaactgtacgacatgccaaactccatctggttgacctggctggttcagagcgagttgcaaagactggagtagggggccatcttctaacagaggccaagtatatcaacttgtcactacattacttagaacaggttatcattgccctttcagaaaagcaccgttcgcacattccttatagaaactccatgatgaccagtgtcctaagagacagtttgggagggaactgcatgacaactatgattgcaacactctccttggagaaaaggaatcttgatgagtctatatcaacctgcagatttgcacagcgagtggcactcataaagaatgaagctgttcttaatgaagaaattaaccccagattaaaagcaccaagctcctctgatggagttctcttctgcagaaaccaatga

SEQ ID NO: 15446 - DNA, 3394 bp, Homo sapiens
  source 1..3394: mol_type = unassigned DNA
atggcctctagtctgtatgacctcaagaaagtgacaatactggaggatcctgatcagaacattcacctgaaaaacttgactctccatcaggcaaccacagaggaagaagctctgaatttgctttttttaggagacaccaaccgaatgattgcagagactcctatgaaccaagcttcaacccgttcccactgcattttcaccattcatttgtcaagcaaggaaccaggatctgcaactgtacgacatgccaaactccatctggttgacctggctggttcagagcgagttgcaaagactggagtagggggccatcttctaacagaggccaagtatatcaacttgtcactacattacttagaacaggttatcattgccctttcagaaaagcaccgttcgcacattccttatagaaactccatgatgaccagtgtcctaagagacagtttgggagggaactgcatgacaactatgattgcaacactctccttggagaaaaggaatcttgatgagtctatatcaacctgcagatttgcacagcgagtggcactcataaagaatgaagctgttcttaatgaagaaattaaccccagattagtgattaaacgcctacaaaaggaaatccaggaactgaaggatgaactggccatggtcactggggagcagaggacagaggcactcacagaagcagagctccttcagctggaaaaactaataacatcctttttggaagaccaggattcagacagtagattagaggttggcgcggatatgcgtaaagttcatcactgttttcatcatttaaagaaactattgaatgacaagaagatccttgaaaacaatacagtctcctctgaaagcaaagaccaagattgtcaagaaccattaaaagaagaagaatatagaaagctacgagatattctgaaacagagagataacgaaatcaatatcctggtcaacatgttaaaaaaagaaaagaagaaagctcaggaggctctccacttggctggcatggatagacgtgaattcagacagtcccagagcccacccttccgcctaggaaacccagaagaaggtcaaagaatgcgactatcctcagctccctcacaggcccaggacttcagcattttggggaaaagatccagtttgctccacaagaaaataggaatgagagaggaaatgtcattaggatgccaggaggcttttgaaatcttcaagagggaccacgctgacagcgttaccatcgatgacaacaaacagattctgaaacagagattttctgaagccaaggccctgggagaaagtataaatgaagcaagaagtaaaattggtcacctgaaggaagaaatcacccagcggcatatacagcaagtagccctaggaatctcggaaaacatggccgtgcctctgatgccagaccagcaggaggagaagctgcgatcacaactggaggaagaaaagagaaggtataaaacaatgttcactcgcctgaaagccctgaaggtggagatcgagcacttgcagctgctcatggacaaagccaaggtgaagctacagaaagagtttgaagtctggtgggcagaggaggccaccaacctgcaggtaaattctccagcagtgaattcactcgatcacacgaagccatttctccagacatctgactcccagcatgaatggtcccaactcctctctaacaaaagttctggaggctgggaagtccaagatcaaggcactggcagattcgatgtctgtgatgtgaatgccaggaaaatcctgccctcgccttgccccagtccacacagccagaaacagagcagcaccagcaccccactggaagacagcatccccaagaggccagtgtcgtccatccctctcaccggagacagccagacggactcggacatcatcgccttcatcaaggccagacagagcattctgcagaagcaatgtttgggaagcaattgaatttccaggaaatatccatccatgaattatgccagcaagaatgaagcacagatgaaggcagcgcccctcacttgctctggcttcagaagtgaactatgggctgctgggagcaactagtgactttgattcccatggaggggactgtgtttctttaaggatgctgacctggaggccaccgagaggctggggctggggctgaccacaacatccttcctgtggttgctggagctgctggcagggccaggcaaggccagagtgctaggggcagggtgaaggcttcagctcactgttgtagtgacgttttgtgtagatctttataagcttttgagaatgtgaaatagcaccatcaaaatataatgtcagaggatgctcacaccagtggaatgtggggggaatatttttatttttaacgatttgccagctctctcccttggcccgtgctctggtttggaagcccagaaatggccatgacaggtccaggcaggatgtcccagccacaggcaaggcagtggaatgcagggcatcctgaaggccaatcctgatctcccagaccacatctttcaccatcagcctcttggccaggatgacctggaggcagtgcctgaacagctgtgtctccagggagccatctgccctgcagggtctaaggacatcatagcacccagagaacagtgggcagctcccaggggctctgctgagagcttgagagagggcagtgtgggtaccttgggcctcacaaccttcacccagccacttgggaggatttgggctgacactccccacttccacagggaaaaacatagctgcctgggggtcttgtctccatgggccctctccatgacagatccaagggaaggtgggcagccctcaaggaggttcttgaagaactgccccctgggccagggggttccaacccagctgcagccagggaggggcagcggagggtgagcaggagtggcacctggaaatgaagctaactggataaaagtgctggtccactgctcctggtgtctctgtcctataaatacaggacctgatgaccctggaggggagcagagtggtaatatagtataattggcttgattttctttttcgttttttaggactgggtaacaggatcatgcaggagaagattaaaccattacatttctaagctaggcaggcccatcgagctcctctaatccacacccctattttatataattagaaggccagagtgaaggggagattcagcttgctgttctatgccactgacaaatgtcccctcttcagggggcttcccctgaccactccatctcgagtcaccccctagttatcccctatcccattaccattttttctgcatcactatctgacatgttatccttccgaacttgcctatttttgaaatacctgcaaccccccataatactaagagctccaatgcaacagg

SEQ ID NO: 15447 - DNA, 2488 bp, Homo sapiens
  source 1..2488: mol_type = unassigned DNA
gggtcattgcagagccagggaggagatggtgaagcagactatccagatattcgcgagggtgaagccccctgtccggaagcaccaacaagggatttattccatagatgaagatgaaaaattaatacctagcttggaaatcatcttaccacgtgatttggcagatgggtttgtgaataataagcgagaaagctacaaatttaaatttcaaagaatttttgatcaggatgcaaaccaagagaccgtttttgaaaacattgccaaaccagttgctgggagtgtcctggcaggttacaatggtaccatctttgcatatgggcaaacaggcagcgggaagacattcactatcacagggggtgcagagcgttacagtgacagaggcattatcccaaggacactgtcatacatttttgaacagttacaaaaggacagcagcaaaatatatacaacacacatttcctatttggaaatctacaatgaatgtggttatgatcttttggatccaagacatgaagcctccagtttggaagatttgccgaaagtgacaatactggaggatcctgatcagaacattcacctgaaaaacttgactctccatcaggcaaccacagaggaagaagctctgaatttgctttttttaggagacaccaaccgaatgattgcagagactcctatgaaccaagcttcaacccgttcccactgcattttcaccattcatttgtcaagcaaggaaccaggatctgcaactgtacgacatgccaaactccatctggttgacctggctggttcagagcgagttgcaaagactggagtagggggccatcttctaacagaggccaagtatatcaacttgtcactacattacttagaacaggttatcattgccctttcagaaaagcaccgttcgcacattccttatagaaactccatgatgaccagtgtcctaagagacagtttgggagggaactgcatgacaactatgattgcaacactctccttggagaaaaggaatcttgatgagtctatatcaacctgcagatttgcacagcgagtggcactcataaagaatgaagctgttcttaatgaagaaattaaccccagattagtgattaaacgcctacaaaaggaaatccaggaactgaaggatgaactggccatggtcactggggagcagaggacagaggcactcacagaagcagagctccttcagctggaaaaactaataacatcctttttggaagaccaggattcagacagtagattagaggttggcgcggatatgcgtaaagttcatcactgttttcatcatttaaagaaactattgaatgacaagaagatccttgaaaacaatacagtctcctctgaaagcaaagaccaagattgtcaagaaccattaaaagaagaagaatatagaaagctacgagatattctgaaacagagagataacgaaatcaatatcctggtcaacatgttaaaaaaagaaaagaagaaagctcaggaggctctccacttggctggcatggatagacgtgaattcagacagtcccagagcccacccttccgcctaggaaacccagaagaaggtcaaagaatgcgactatcctcagctccctcacaggcccaggacttcagcattttggggaaaagatccagtttgctccacaagaaaataggaatgagagaggaaatgtcattaggatgccaggaggcttttgaaatcttcaagagggaccacgctgacagcgttaccatcgatgacaacaaacagattctgaaacagagattttctgaagccaaggccctgggagaaagtataaatgaagcaagaagtaaaattggaatctcggaaaacatggccgtgcctctgatgccagaccagcaggaggagaagctgcgatcacaactggaggaagaaaagagaaggtataaaacaatgttcactcgcctgaaagccctgaaggtggagatcgagcacttgcagctgctcatggacaaagccaaggtgaagctacagaaagagtttgaagtctggtgggcagaggaggccaccaacctgcaggtaaattctccagcagtgaattcactcgatcacacgaagccatttctccagacatctgactcccagcatgaatggtcccaactcctctctaacaaaagttctggaggctgggaagtccaagatcaaggcactggcagattcgatgtctgtgatgtgaatgccaggaaaatcctgccctcgccttgccccagtccacacagccagaaacagagcagcaccagcaccccactggaagacagcatccccaagaggccagtgtcgtccatccctctcaccggagacagccagacggactcggacatcatcgccttcatcaaggccagacagagcattctgcagaagcaatgtttgggaagcaattgaatttccaggaaatatccatccatgaattatgccagcaagaatgaagcacagatgaaggcagcgcccctc

SEQ ID NO: 15448 - DNA, 3921 bp, Homo sapiens
  source 1..3921: mol_type = unassigned DNA
gttgctaagactgtgggtcgccggaggtggtgggagttagttttggcagcccgggcctgagagaggtcaagggtcattgcagagccagggaggagatggtgaagcagactatccagatattcgcgagggtgaagccccctgtccggaagcaccaacaagggatttattccatagatgaagatgaaaaattaatacctagcttggaaatcatcttaccacgtgatttggcagatgggtttgtgaataataagcgagaaagctacaaatttaaatttcaaagaatttttgatcaggatgcaaaccaagagaccgtttttgaaaacattgccaaaccagttgctgggagtgtcctggcaggttacaatggtaccatctttgcatatgggcaaacaggcagcgggaagacattcactatcacagggggtgcagagcgttacagtgacagaggcattatcccaaggacactgtcatacatttttgaacagttacaaaaggacagcagcaaaatatatacaacacacatttcctatttggaaatctacaatgaatgtggttatgatcttttggatccaagacatgaagcctccagtttggaagatttgccgaaagtgacaatactggaggatcctgatcagaacattcacctgaaaaacttgactctccatcaggcaaccacagaggaagaagctctgaatttgctttttttaggagacaccaaccgaatgattgcagagactcctatgaaccaagcttcaacccgttcccactgcattttcaccattcatttgtcaagcaaggaaccaggatctgcaactgtacgacatgccaaactccatctggttgacctggctggttcagagcgagttgcaaagactggagtagggggccatcttctaacagaggccaagtatatcaacttgtcactacattacttagaacaggttatcattgccctttcagaaaagcaccgttcgcacattccttatagaaactccatgatgaccagtgtcctaagagacagtttgggagggaactgcatgacaactatgattgcaacactctccttggagaaaaggaatcttgatgagtctatatcaacctgcagatttgcacagcgagtggcactcataaagaatgaagctgttcttaatgaagaaattaaccccagattagtgattaaacgcctacaaaaggaaatccaggaactgaaggatgaactggccatggtcactggggagcagaggacagaggcactcacagaagcagagctccttcagctggaaaaactaataacatcctttttggaagaccaggattcagacagtagattagaggttggcgcggatatgcgtaaagttcatcactgttttcatcatttaaagaaactattgaatgacaagaagatccttgaaaacaatacagtctcctctgaaagcaaagaccaagattgtcaagaaccattaaaagaagaagaatatagaaagctacgagatattctgaaacagagagataacgaaatcaatatcctggtcaacatgttaaaaaaagaaaagaagaaagctcaggaggctctccacttggctggcatggatagacgtgaattcagacagtcccagagcccacccttccgcctaggaaacccagaagaaggtcaaagaatgcgactatcctcagctccctcacaggcccaggacttcagcattttggggaaaagatccagtttgctccacaagaaaataggaatgagagaggaaatgtcattaggatgccaggaggcttttgaaatcttcaagagggaccacgctgacagcgttaccatcgatgacaacaaacagattctgaaacagagattttctgaagccaaggccctgggagaaagtataaatgaagcaagaagtaaaattggtcacctgaaggaagaaatcacccagcggcatatacagcaagtagccctaggaatctcggaaaacatggccgtgcctctgatgccagaccagcaggaggagaagctgcgatcacaactggaggaagaaaagagaaggtataaaacaatgttcactcgcctgaaagccctgaaggtggagatcgagcacttgcagctgctcatggacaaagccaaggtgaagctacagaaagagtttgaagtctggtgggcagaggaggccaccaacctgcaggtaaattctccagcagtgaattcactcgatcacacgaagccatttctccagacatctgactcccagcatgaatggtcccaactcctctctaacaaaagtgatgtgaatgccaggaaaatcctgccctcgccttgccccagtccacacagccagaaacagagcagcaccagcaccccactggaagacagcatccccaagaggccagtgtcgtccatccctctcaccggagacagccagacggactcggacatcatcgccttcatcaaggccagacagagcattctgcagaagcaatgtttgggaagcaattgaatttccaggaaatatccatccatgaattatgccagcaagaatgaagcacagatgaaggcagcgcccctcacttgctctggcttcagaagtgaactatgggctgctgggagcaactagtgactttgattcccatggaggggactgtgtttctttaaggatgctgacctggaggccaccgagaggctggggctggggctgaccacaacatccttcctgtggttgctggagctgctggcagggccaggcaaggccagagtgctaggggcagggtgaaggcttcagctcactgttgtagtgacgttttgtgtagatctttataagcttttgagaatgtgaaatagcaccatcaaaatataatgtcagaggatgctcacaccagtggaatgtggggggaatatttttatttttaacgatttgccagctctctcccttggcccgtgctctggtttggaagcccagaaatggccatgacaggtccaggcaggatgtcccagccacaggcaaggcagtggaatgcagggcatcctgaaggccaatcctgatctcccagaccacatctttcaccatcagcctcttggccaggatgacctggaggcagtgcctgaacagctgtgtctccagggagccatctgccctgcagggtctaaggacatcatagcacccagagaacagtgggcagctcccaggggctctgctgagagcttgagagagggcagtgtgggtaccttgggcctcacaaccttcacccagccacttgggaggatttgggctgacactccccacttccacagggaaaaacatagctgcctgggggtcttgtctccatgggccctctccatgacagatccaagggaaggtgggcagccctcaaggaggttcttgaagaactgccccctgggccagggggttccaacccagctgcagccagggaggggcagcggagggtgagcaggagtggcacctggaaatgaagctaactggataaaagtgctggtccactgctcctggtgtctctgtcctataaatacaggacctgatgaccctggaggggagcagagtggtaatatagtataattggcttgattttctttttcgttttttaggactgggtaacaggatcatgcaggagaagattaaaccattacatttctaagctaggcaggcccatcgagctcctctaatccacacccctattttatataattagaaggccagagtgaaggggagattcagcttgctgttctatgccactgacaaatgtcccctcttcagggggcttcccctgaccactccatctcgagtcaccccctagttatcccctatcccattaccattttttctgcatcactatctgacatgttatccttccgaacttgcctatttttgaaatacctgcaaccccccataatactaagagctccaatgcaacagg

SEQ ID NO: 15449 - DNA, 2394 bp, Homo sapiens
  source 1..2394: mol_type = unassigned DNA
acagtcctgaggggtgcagcgggtggcactggaagggcctcctcagcaggttgtcagccagctggaagagcctggggccacctgtctggtcagagtctctctgctgtgggcctcttggagccagggctggttttgtggtctgactgaagtgacaatgaaattaataggatcctgatgctgtgactgaggccatttccctgtgtctccaaacaggaatgagagaggaaatgtcattaggatgccaggaggcttttgaaatcttcaagagggaccacgctgacagcgttaccatcgatgacaacaaacagattctgaaacagagattttctgaagccaaggccctgggagaaagtataaatgaagcaagaagtaaaattggtcacctgaaggaagaaatcacccagcggcatatacagcaagtagccctaggaatctcggaaaacatggccgtgcctctgatgccagaccagcaggaggagaagctgcgatcacaactggaggaagaaaagagaaggtataaaacaatgttcactcgcctgaaagccctgaaggtggagatcgagcacttgcagctgctcatggacaaagccaaggtgaagctacagaaagagtttgaagtctggtgggcagaggaggccaccaacctgcaggtaaattctccagcagtgaattcactcgatcacacgaagccatttctccagacatctgactcccagcatgaatggtcccaactcctctctaacaaaagtgatgtgaatgccaggaaaatcctgccctcgccttgccccagtccacacagccagaaacagagcagcaccagcaccccactggaagacagcatccccaagaggccagtgtcgtccatccctctcaccggagacagccagacggactcggacatcatcgccttcatcaaggccagacagagcattctgcagaagcaatgtttgggaagcaattgaatttccaggaaatatccatccatgaattatgccagcaagaatgaagcacagatgaaggcagcgcccctcacttgctctggcttcagaagtgaactatgggctgctgggagcaactagtgactttgattcccatggaggggactgtgtttctttaaggatgctgacctggaggccaccgagaggctggggctggggctgaccacaacatccttcctgtggttgctggagctgctggcagggccaggcaaggccagagtgctaggggcagggtgaaggcttcagctcactgttgtagtgacgttttgtgtagatctttataagcttttgagaatgtgaaatagcaccatcaaaatataatgtcagaggatgctcacaccagtggaatgtggggggaatatttttatttttaacgatttgccagctctctcccttggcccgtgctctggtttggaagcccagaaatggccatgacaggtccaggcaggatgtcccagccacaggcaaggcagtggaatgcagggcatcctgaaggccaatcctgatctcccagaccacatctttcaccatcagcctcttggccaggatgacctggaggcagtgcctgaacagctgtgtctccagggagccatctgccctgcagggtctaaggacatcatagcacccagagaacagtgggcagctcccaggggctctgctgagagcttgagagagggcagtgtgggtaccttgggcctcacaaccttcacccagccacttgggaggatttgggctgacactccccacttccacagggaaaaacatagctgcctgggggtcttgtctccatgggccctctccatgacagatccaagggaaggtgggcagccctcaaggaggttcttgaagaactgccccctgggccagggggttccaacccagctgcagccagggaggggcagcggagggtgagcaggagtggcacctggaaatgaagctaactggataaaagtgctggtccactgctcctggtgtctctgtcctataaatacaggacctgatgaccctggaggggagcagagtggtaatatagtataattggcttgattttctttttcgttttttaggactgggtaacaggatcatgcaggagaagattaaaccattacatttctaagctaggcaggcccatcgagctcctctaatccacacccctattttatataattagaaggccagagtgaaggggagattcagcttgctgttctatgccactgacaaatgtcccctcttcagggggcttcccctgaccactccatctcgagtcaccccctagttatcccctatcccattaccattttttctgcatcactatctgacatgttatccttccgaacttgcctatttttgaaatacctgcaaccccccataatactaagagctccaatgcaacagg

SEQ ID NO: 15450 - DNA, 743 bp, Homo sapiens
  source 1..743: mol_type = unassigned DNA
actcctatgaaccaagcttcaacccgttcccactgcattttcaccattcatttgtcaagcaaggaaccaggatctgcaactgtacgacatgccaaactccatctggttgacctggctggttcagagcgagttgcaaagactggagtagggggccatcttctaacagaggccaagtatatcaacttgtcactacattacttagaacaggttatcattgccctttcagaaaagcaccgttcgcacattccttatagaaactccatgatgaccagtgtcctaagagacagtttgggagggaactgcatgacaactatgattgcaacactctccttggagaaaaggaatcttgatgagtctatatcaacctgcagatttgcacagcgagtggcactcataaagaatgaagctgttcttaatgaagaaattaaccccagattaaaagcaccaagctcctctgatggagttctcttctgcagaaaccaatgagtgaggcaggatctgtttcagcaaaggccctggtcaggtatcagcatcacacagtgttcctgctggagagaggagacagcatgcaaagtcaagattcaggtggaactgaactgctagggtggattttgttgctgtccctacccttccagaagccctatagcattacagtgctgaatgagaaagagagttaacaaagttattagccccaagacaaaaactagttcagaatttaaggaaaataaacatattagacattg

SEQ ID NO: 15451 - DNA, 8611 bp, Homo sapiens
  source 1..8611: mol_type = unassigned DNA
ggggtgcagagcgttacagtgacagaggcattatcccaaggacactgtcatacatttttgaacagttacaaaaggacagcagcaaaatatatacaacacacatttcctatttggaaatctacaatgaatgtggttatgatcttttggatccaagacatgaagcctccagtttggaagatttgccgaaagtgacaatactggaggatcctgatcagaacattcacctgaaaaacttgactctccatcaggcaaccacagaggaagaagctctgaatttgctttttttaggagacaccaaccgaatgattgcagagactcctatgaaccaagcttcaacccgttcccactgcattttcaccattcatttgtcaagcaaggaaccaggatctgcaactgtacgacatgccaaactccatctggttgacctggctggttcagagcgagttgcaaagactggagtagggggccatcttctaacagaggccaagtatatcaacttgtcactacattacttagaacaggttatcattgccctttcagaaaagcaccgttcgcacattccttatagaaactccatgatgaccagtgtcctaagagacagtttgggagggaactgcatgacaactatgattgcaacactctccttggagaaaaggaatcttgatgagtctatatcaacctgcagatttgcacagcgagtggcactcataaagaatgaagctgttcttaatgaagaaattaaccccagattagtgattaaacgcctacaaaaggaaatccaggaactgaaggatgaactggccatggtcactggggagcagaggacagaggcactcacagaagcagagctccttcagctggaaaaactaataacatcctttttggaagaccaggattcagacagtagattagaggttggcgcggatatgcgtaaagttcatcactgttttcatcatttaaagaaactattgaatgacaagaagatccttgaaaacaatacagtctcctctgaaagcaaagaccaagattgtcaagaaccattaaaagaagaagaatatagaaagctacgagatattctgaaacagagagataacgaaatcaatatcctggtcaacatgttaaaaaaagaaaagaagaaagctcaggaggctctccacttggctggcatggatagacgtgaattcagacagtcccagagcccacccttccgcctaggaaacccagaagaaggtcaaagaatgcgactatcctcagctccctcacaggcccaggacttcagcattttggggaaaagatccagtttgctccacaagaaaataggaatgagagaggaaatgtcattaggatgccaggaggcttttgaaatcttcaagagggaccacgctgacagcgttaccatcgatgacaacaaacagattctgaaacagagattttctgaagccaaggccctgggagaaagtataaatgaagcaagaagtaaaattggtcacctgaaggaagaaatcacccagcggcatatacagcaagtagccctaggaatctcggaaaacatggccgtgcctctgatgccagaccagcaggaggagaagctgcgatcacaactggaggaagaaaagagaaggtataaaacaatgttcactcgcctgaaagccctgaaggtggagatcgagcacttgcagctgctcatggacaaagccaaggtgaagctacagaaagagtttgaagtctggtgggcagaggaggccaccaacctgcaggtaaattctccagcagtgaattcactcgatcacacgaagccatttctccagacatctgactcccagcatgaatggtcccaactcctctctaacaaaagtgatgtgaatgccaggaaaatcctgccctcgccttgccccagtccacacagccagaaacagagcagcaccagcaccccactggaagacagcatccccaagaggccagtgtcgtccatccctctcaccggagacagccagacggactcggacatcatcgccttcatcaaggccagacagagcattctgcagaagcaatgtttgggaagcaattgaatttccaggaaatatccatccatgaattatgccagcaagaatgaagcacagatgaaggcagcgcccctcacttgctctggcttcagaagtgaactatgggctgctgggagcaactagtgactttgattcccatggaggggactgtgtttctttaaggatgctgacctggaggccaccgagaggctggggctggggctgaccacaacatccttcctgtggttgctggagctgctggcagggccaggcaaggccagagtgctaggggcagggtgaaggcttcagctcactgttgtagtgacgttttgtgtagatctttataagcttttgagaatgtgaaatagcaccatcaaaatataatgtcagaggatgctcacaccagtggaatgtggggggaatatttttatttttaacgatttgccagctctctcccttggcccgtgctctggtttggaagcccagaaatggccatgacaggtccaggcaggatgtcccagccacaggcaaggcagtggaatgcagggcatcctgaaggccaatcctgatctcccagaccacatctttcaccatcagcctcttggccaggatgacctggaggcagtgcctgaacagctgtgtctccagggagccatctgccctgcagggtctaaggacatcatagcacccagagaacagtgggcagctcccaggggctctgctgagagcttgagagagggcagtgtgggtaccttgggcctcacaaccttcacccagccacttgggaggatttgggctgacactccccacttccacagggaaaaacatagctgcctgggggtcttgtctccatgggccctctccatgacagatccaagggaaggtgggcagccctcaaggaggttcttgaagaactgccccctgggccagggggttccaacccagctgcagccagggaggggcagcggagggtgagcaggagtggcacctggaaatgaagctaactggataaaagtgctggtccactgctcctggtgtctctgtcctataaatacaggacctgatgaccctggaggggagcagagtggtaatatagtataattggcttgattttctttttcgttttttaggactgggtaacaggatcatgcaggagaagattaaaccattacatttctaagctaggcaggcccatcgagctcctctaatccacacccctattttatataattagaaggccagagtgaaggggagattcagcttgctgttctatgccactgacaaatgtcccctcttcagggggcttcccctgaccactccatctcgagtcaccccctagttatcccctatcccattaccattttttctgcatcactatctgacatgttatccttccgaacttgcctatttttgaaatacctgcaaccccccataatactaagagctccaatgcaacagggacctgtttgtcttgctcattgctgtgtcccaagcacagagtcgctgttcagtaaacggtccttcagttcatgagtagacgagccagaacccagatgtgtttctcaggctggtgtcactctgacttcccccaggctctgactgaatcccatcgggacaggggccagcatctctggtccactcctggccctcacagttcaatggaacatagtaagccctctgtaaagtctgtagaaccagaggaagaccaaattctgattctagaagcctccccaagagtccatggaacacacatgtaactgcacacacacacacacatacacacacacactctcaagagccctgaagatggcatggcatttgccccagtcccctatgtagcagcagcagtattcttggcatgccttagtgccctcagccctctagagctgggtagagtctactaacttttattttcttttatttttactttcttttatttattttttgagatggggggggtctctgtcagccaggctggggtgcagtggtgcgaccatacctcactagtcagcctccaactcctgggctcaagccatactcagcctccaactcctgggctcaagcgatcctctcacctcagcctccaaagtagctggaactacaggcatgcaccaccacacctagctcgttttaaattttttgtagagacagggtctcactgtgtggctcaggatggtctcaaattcctggccttaagcgatgctcccgccttggcctcccaaagtgctgggattgcaggcatgagccacataccctgccagagtctttcaacattagatctcccactgagacatcatctcctggatccaaaggccttactgacagagatgtgtggcatggccccatgcggggtgtgaaccagcctcctggggcaatcactaagacaggaaaggaaatgaagacagaaaaacacacaacatgggatctggggccactggtgtccagagcatatgcaaagtgtgtgcagcaactggccaaggggccttttgctccgaacatcccctaatggaagcccagcctttgatatggacacatgcttgacagcagtgcaccttcccagagttcactggcctctgcaaatgggagaaattgatgcaatgttttgaaaagactttccagcaatccacctgggatcagtggagccacggatgacaagaagtatctgagttcactctaggccaaaatgtgggattttcaaaaacattttctggaaagcagcctagccagtgactccagcccagtccctgctagaattcaactggctctaccaatcccttgacaagaagtagggtggacggaggttggaggagggaagttaaaatgtagcttgcccagatcttgctaaaaaggagttttagaaagcagatagagaaattgtggtatactgaatacatcattttaattcttcaccaccagtatagaattacacatccaaagctttgtcatggcccactttgactaatgtggtgttggcaaacctgatccaggcagaggcttgaattgtgctctcatggttgagcttgcctcttgctccagtgatctctcttgggatgaacatgccatgggtagctgctgccccttcagcctggaacatccagagagcagacctgagcccagtctacagcctggagcagagcctcccaggcaagcccagcccagatcagctgaactatggctcacccaaagacctattggcatgagaatatatgctgcttgtcataaaccactgaggtttagagtggtttgttatatagcattaattgtagcaatagcagactggcacagaaattggaacccagagacagtatatgactggatctaggatttctcagtgcagagttcattgtctctccatgcagcctgtggaaaggcactgagagcatcctgtatatggaaaagcaggaccaccacctacagccatgatgaagcaacaaggacctgatttaccctcctgctttaaatgactaaaaatgagacaaaatcctctatacaaaccaatggttttcagccattggataacaagcaatatagggtatgattgatccgcaagagaagggaaacaagtgaggggagccctatgattgctccaacttactgcctgcagtgagttttcaggctgcagcccaggaagggggaaccaggtagagcccagtggtttccctgagttgaggaaatggagctgggaatccagggaggacaaagtggcttaaatttgcaaggcagagtcccagggatgagagagagagaaggagagagagaggagaaaaaagagagagaaagagagagagcatgctctggagatcttcagagggttacccttgagtcttcagctaactaccgatcaacatctgcatgtgaagaaattacccaaggcaggggaaagaaccaccaggaggaagcaggtggaataatttcctgagataacactgtgttgggaagagttcatgtttccaacagccagagtggagaaacctcccaaaacagtcattgtatagagacacataaggtactgcctcagaagtggggccaaattagtcctagatgatagattgctctggtcccacctaacaaagcttaaaaagccagccccaaaggagtcaaattgtttccagtaagtttccaagtaacttcaatgagtcccaaaacaaagcttcaaaatatctaaaggaatatgaaaaacaaaccaaaaagaaaccagcatccaacaatatagaatccacaatgtctggtgtccattaaaaaataatcaggcatgcaaagaagcaggaaaatatgggccatgagaggagaaaaaaccatcaatagaaatagaggccgggtgtggtggctcactcctataatcccagcactttgggaggccgaggcaggaggatcacctgaggtcaggagttcaagaacagcctgttcaacatggggaaaccccgtctctactaaaaatacaaaaaatagccgggcatggtgttgcgtacctgtaatcccagctactcagaggctgaggcaggagaattgcttgagcccaggaggcagaggttacagtgagccgaaattgtgccattgcactccagcttgggcaacaagagtgaaactctgtctcaaaaaaaaaaaaaagaaaaaacaaatagaaacagccccaggcatggcacagttgatagagtaaatagacagaaacattttttaaaatgcaatgggtgtgtgtttcaaatctaggcagaaaaaatgctccttgtaattccttaaacataagcatgtctcattcatctggtcattgttttgacaaggatgtgccatccattgtgctaagttctgaggagtcagaggtgacagagacagagaaagtgccagcattcttggaaccttctaacgaaggagagggacaagccaggcatggtggctcacgcctgtaatcccaacactttgggagactgaggctggcggatcacgaggtcaggagtttgagaccaacctggccaacatggcgaaaccccatcgctactaaaaatacaaaaattagctgggtgtggtggtgcgcacctgtaatcccagctactctggaggctgaggcaggacaatcacttgaaccctggaggcagagtttgcagtgagctgagatcgtgccactgcactccaacctgggcaacaagagcgagactccttctctgaaaaaaaaaaaaagagagggacaataaacaagtaagcaagacaatctgattaagaaggagttggggttagctgggcatggtagcaagcgcctgtagtctcagctactcgggaggctgaggtgggaggatccttgaacccaggaggttaaggctgcagtgagctgtgatcacaccactgcactccagcctggatgacagagcaagaccctgtctcagaaaaagaagaaggagttgggggtggggtaggatgggcttggactcactatcaaggtgggtgggagtgtgagaacccggcaaggtgcaaagagagaagcagggaagggaagcttaggacaatgatggcaggttgggtattgggtgatgggaagaggcaaaggacgtggagcttggcaaaaaggggacttgtggggatttgggccatgtgagcatgtgggggagacagtgttccttccataacacgtgtccagggactgccagggctccgaggcagagcaggtgtagagaggttggctgtgaatgttggatgttgaaaacatatgtgtcaaatgtgggaggaaaaagcagtgtttccttgaatacaagctcctcctcaccttgcgaaaagtggcctctgagtgtagccctgaatgcatctcccaaggaataggaggaagcagcaaccttttcagagttaactgctttatttgggttttccatggcctcgtgccagccagcagggctgagccagtttcacccacactgagagggaactcagcaaagagcaagcagcatgccagctggtactcttccctctccattcactcagctcctgatctcaggagggcagcccctccccaggccagcacccctccccttctggccccaggtgtgggatgttgttgttttcttttctccgaaacatctcctgggtttgtcttttccatcactgtctttagactgaggcaagcagtccccatgccttcagccccatgttttgggggtaacctgtgctttgacatgctttgctaaaaactttctaagtctccctctggtgctgggaccagccatgaccaacaacgtcatccatgcaggccacccctaacatagtccaggcctcatgtgggtctcagttcccttttcttctttcaggaagttctccagtgcatgcatagggttgaccagatgtcccaaggtgctctaggacttatgcctatgaagctgttttagggcttcctagtcagtccctggttccaggaaagcagcctgatgaggagatcattcccgctggctggtgtggcatttcttttatggcactacctgggattgggccaccagacctgcgctaacatgctgatttgatggactcttaacatcataggacaaagaatcgtcatgtgaaccaattagacaataaacaaatgcctaagtgcc

SEQ ID NO: 15452 - DNA, 2361 bp, Homo sapiens
  source 1..2361: mol_type = unassigned DNA
gggtcattgcagagccagggaggagatggtgaagcagactatccagatattcgcgagggtgaagccccctgtccggaagcaccaacaagggatttattccatagatgaagatgaaaaattaatacctagcttggaaatcatcttaccacgtgatttggcagatgggtttgtgaataataagcgagaaagctacaaatttaaatttcaaagaatttttgatcaggatgcaaaccaagagaccgtttttgaaaacattgccaaaccagttgctgggagtgtcctggcaggttacaatggtaccatctttgcatatgggcaaacaggcagcgggaagacattcactatcacagggggtgcagagcgttacagtgacagaggcattatcccaaggacactgtcatacatttttgaacagttacaaaaggacagcagcaaaatatatacaacacacatttcctatttggaaatctacaatgaatgtggttatgatcttttggatccaagacatgaagcctccagtttggaagatttgccgaaagtgacaatactggaggatcctgatcagaacattcacctgaaaaacttgactctccatcaggcaaccacagaggaagaagctctgaatttgctttttttaggagacaccaaccgaatgattgcagagactcctatgaaccaagcttcaacccgttcccactgcattttcaccattcatttgtcaagcaaggaaccaggatctgcaactgtacgacatgccaaactccatctggttgacctggctggttcagagcgagttgcaaagactggagtagggggccatcttctaacagaggccaagtatatcaacttgtcactacattacttagaacaggttatcattgccctttcagaaaagcaccgttcgcacattccttatagaaactccatgatgaccagtgtcctaagagacagtttgggagggaactgcatgacaactatgattgcaacactctccttggagaaaaggaatcttgatgagtctatatcaacctgcagatttgcacagcgagtggcactcataaagaatgaagctgttcttaatgaagaaattaaccccagattagtgattaaacgcctacaaaaggaaatccaggaactgaaggatgaactggccatggtcactggggagcagaggacagaggcactcacagaagcagagctccttcagctggaaaaactaataacatcctttttggaagaccaggattcagacagtagattagaggttggcgcggatatgcgtaaagttcatcactgttttcatcatttaaagaaactattgaatgacaagaagatccttgaaaacaatacagtctcctctgaaagcaaagaccaagattgtcaagaaccattaaaagaagaagaatatagaaagctacgagatattctgaaacagagagataacgaaatcagtatcctttctgaagtgatgaagaaacttcctctatcctggtttgaaaggggaatgagagaggaaatgtcattaggatgccaggaggcttttgaaatcttcaagagggaccacgctgacagcgttaccatcgatgacaacaaacagattctgaaacagagattttctgaagccaaggccctgggagaaagtataaatgaagcaagaagtaaaattggtcacctgaaggaagaaatcacccagcggcatatacagcaagtagccctaggaatctcggaaaacatggccgtgcctctgatgccagaccagcaggaggagaagctgcgatcacaactggaggaagaaaagagaaggtataaaacaatgttcactcgcctgaaagccctgaaggtggagatcgagcacttgcagctgctcatggacaaagccaaggtgaagctacagaaagagtttgaagtctggtgggcagaggaggccaccaacctgcaggtaaattctccagcagtgaattcactcgatcacacgaagccatttctccagacatctgactcccagcatgaatggtcccaactcctctctaacaaaagttctggaggctgggaagtccaagatcaaggcactggcagattcgatgtctgtgatgtgaatgccaggaaaatcctgccctcgccttgccccagtccacacagccagaaacagagcagcaccagcaccccactggaagacagcatccccaagaggccagtgtcgtccatccctctcaccggagacagccagacggactcggacatcatcgccttcatcaaggccagacagagcattctgcagaagcaatgtttgggaagcaattgaatttccaggaaatatccatccatgaattatgccagcaagaatgaagcacagatgaaggc

SEQ ID NO: 15453 - DNA, 2258 bp, Homo sapiens
  source 1..2258: mol_type = unassigned DNA
gttgctaagactgtgggtcgccggaggtggtgggagttagttttggcagcccgggcctgagagaggtcaagggtcattgcagagccagggaggagatggtgaagcagactatccagatattcgcgagggtgaagccccctgtccggaagcaccaacaagggatttattccatagatgaagatgaaaaattaatacctagcttggaaatcatcttaccacgtgatttggcagatgggtttgtgaataataagcgagaaagctacaaatttaaatttcaaagaatttttgatcaggatgcaaaccaagagaccgtttttgaaaacattgccaaaccagttgctgggagtgtcctggcaggttacaatggtaccatctttgcatatgggcaaacaggcagcgggaagacattcactatcacagggggtgcagagcgttacagtgacagaggcattatcccaaggacactgtcatacatttttgaacagttacaaaaggacagcagcaaaatatatacaacacacatttcctatttggaaatctacaatgaatgtggttatgatcttttggatccaagacatgaagcctccagtttggaagatttgccgaaagtgacaatactggaggatcctgatcagaacattcacctgaaaaacttgactctccatcaggcaaccacagaggaagaagctctgaatttgctttttttaggagacaccaaccgaatgattgcagagactcctatgaaccaagcttcaacccgttcccactgcattttcaccattcatttgtcaagcaaggaaccaggatctgcaactgtacgacatgccaaactccatctggttgacctggctggttcagagcgagttgcaaagactggagtagggggccatcttctaacagaggccaagtatatcaacttgtcactacattacttagaacaggttatcattgccctttcagaaaagcaccgttcgcacattccttatagaaactccatgatgaccagtgtcctaagagacagtttgggagggaactgcatgacaactatgattgcaacactctccttggagaaaaggaatcttgatgagtctatatcaacctgcagatttgcacagcgagtggcactcataaagaatgaagctgttcttaatgaagaaattaaccccagattagtgattaaacgcctacaaaaggaaatccaggaactgaaggatgaactggccatggtcactggggagcagaggacagaggcactcacagaagcagagctccttcagctggaaaaactaataacatcctttttggaagaccaggattcagacagtagattagaggttggcgcggatatgcgtaaagttcatcactgttttcatcatttaaagaaactattgaatgacaagaagatccttgaaaacaatacagtctcctctgaaagcaaagaccaagattgtcaagaaccattaaaagaagaagaatatagaaagctacgagatattctgaaacagagagataacgaaatcaatatcctggtcaacatgttaaaaaaagaaaagaagaaagctcaggaggctctccacttggctggcatggatagacgtgaattcagacagtcccagagcccacccttccgcctaggaaacccagaagaaggtcaaagaatgcgactatcctcagctccctcacaggcccaggacttcagcattttggggaaaagatccagtttgctccacaagaaaataggaatgagagaggaaatgtcattaggatgccaggaggcttttgaaatcttcaagagggaccacgctgacagcgttaccatcgatgacaacaaacagattctgaaacagagattttctgaagccaaggccctgggagaaagtataaatgaagcaagaagtaaaattggtcacctgaaggaagaaatcacccagcggcatatacagcaagtagccctaggaatctcggaaaacatggccgtgcctctgatgccagaccagcaggaggagaagctgcgatcacaactggaggaagaaaagagaaggtataaaacaatgttcactcgcctgaaagccctgaaggtggagatcgagcacttgcagctgctcatggacaaagccaaggtgaagctacagaaagagtttgaagtctggtgggcagaggaggccaccaacctgcaggtaaattctccagcagtgaattcactcgatcacacgaagtccaagatcaaggcactggcagattcgatgtctggactctaa

SEQ ID NO: 15454 - DNA, 1755 bp, Homo sapiens
  source 1..1755: mol_type = unassigned DNA
ctcagcaggttgtcagccagctggaagagcctggggccacctgtctggtcagagtctctctgctgtgggcctcttggagccagggctggttttgtggtctgactgaagtgacaatgaaattaataggatcctgatgctgtgactgaggccatttccctgtgtctccaaacaggaatgagagaggaaatgtcattaggatgccaggaggcttttgaaatcttcaagagggaccacgctgacagcgttaccatcgatgacaacaaacagattctgaaacagagattttctgaagccaaggccctgggagaaagtataaatgaagcaagaagtaaaattggtcacctgaaggaagaaatcacccagcggcatatacagcaagtagccctaggaatctcggaaaacatggccgtgcctctgatgccagaccagcaggaggagaagctgcgatcacaactggaggaagaaaagagaaggtataaaacaatgttcactcgcctgaaagccctgaaggtggagatcgagcacttgcagctgctcatggacaaagccaaggtgaagctacagaaagagtttgaagtctggtgggcagaggaggccaccaacctgcaggtaaattctccagcagtgaattcactcgatcacacgaagccatttctccagacatctgactcccagcatgaatggtcccaactcctctctaacaaaagttctggaggctgggaagtccaagatcaaggcactggcagattcgatgtctgtgatgtgaatgccaggaaaatcctgccctcgccttgccccagtccacacagccagaaacagagcagcaccagcaccccactggaagacagcatccccaagaggccagtgtcgtccatccctctcaccggagacagccagacggactcggacatcatcgccttcatcaaggccagacagagcattctgcagaagcaatatcttcagctcctttgttctctgttcccaaagtcagctgtctcctctgctcaggcttctacaaacaggaaggggctgagtgatgttttggtaactcgttgaacccctggcttaaagtctcactcccctatcagagtgtggttcttgccaaagagctgtgagtgtaaacactgcttgaaggcccaggcccgaggacaccataacaatcacagaggaagtaagagtggcgtgtcagacaacaggaagagaagaaggctcttcttggtctgcatcactgccccctccacccccagccccgtcctcttggcagctgcccatctcccatctgctgtggctgggccttttctctttctgccttccatccccaacacacccacagggcaagccccagggccccttaccccaggcctgcattttgtcttagcctcctccccataacccaaaggctactaggcaggcttaacattgccttcacattgccagaaaggcgcccccaccgtgatggtatgggctggcagattcgatgtataatgactgatgcctgccctgtggcgcctgcactcagcttctccaccagccgtgtgcagtttgggcaggaagaggtttgtgcatggatggagcgccgcaactgagagccggccttggtcctgtactcgccttgcttggccgccagcctgcttatttactatcctctcttcaccaccaggaccagcagcctcagcaacactgtcaggtcctttcttaagcctgagacagccccacctctgctgtgatcttgtctcattctcagtttccttgtct

SEQ ID NO: 15455 - DNA, 4551 bp, Homo sapiens
  source 1..4551: mol_type = unassigned DNA
ctggggatggaaacctgactgcctggcccgggacggcgcttgcagccaggcagggcccagagcagtcctccctcggcatggggctggaggctcagaggctgccaggggctgaggaggccccagtgcgggttgccctgcgagttcgaccactgctgcccaaggagctgctgcacgggcatcagagctgcctgcaggtggagccagggcttggccgcgtcactctgggccgtgaccgacactttggcttccacgtggtgctggccgaggatgcggggcaggaggccgtgtaccaggcctgcgttcagcccctccttgaggccttcttcgagggcttcaatgccactgtctttgcctatggtcagacgggctcagggaagacatacaccatgggggaggccagtgtggcctccctccttgaggatgagcagggcattgtcccgagggccatggccgaggccttcaagctcatcgatgagaacgacctgcttgactgtctggtacatgtgtcctacctggaagtgtacaaggaggagttccgagacctgctcgaggtgggcactgccagccgtgacatccagctccgggaagatgagcgcgggaatgttgtgctgtgcggggtgaaggaggtcgacgtggagggcctggatgaggtgctgagcctcctggagatgggcaacgcggcgcggcacacgggagccacgcacctcaaccacctgtctagccgctcacacacggtcttcaccgtgaccctggagcagcgggggcgcgcccccagccgcctaccccgccccgccccgggccagctgctcgtctccaagttccacttcgtggacctggcgggctcagagagggtgctcaagacgggcagcaccggcgagcggctcaaggagagcatccagatcaacagcagcctcctggcgctgggcaacgtcatcagcgccctgggggaccctcagcgccggggcagccacataccctaccgcgactccaagatcacccggatcctcaaagactcgctgggcgggaacgccaagacggtgatgatcgcctgcgtcagcccttcctcctccgacttcgacgagaccctcaacaccctcaactacgccagccgcgcccagaacatccgcaaccgcgccacggtcaactggcggcccgaggccgagcggccacccgaagagacggcgagcggcgcgcggggtccgccacggcaccgctccgagacccgcatcatccaccgcggccggcgcgccccaggcccagccaccgcctccgcggcggccgccatgcgcctgggcgccgagtgcgcgcgctaccgggcctgcaccgacgccgcctacagcctcttgcgcgagctgcaggccgagcccgggctgcccggcgccgccgcccgcaaggtgcgcgactggctgtgcgccgtcgagggcgagcgcagcgccctgagctccgcctccgggcccgatagcggcatcgagagcgcctccgtcgaggaccaggcggcgcagggggccggcgggcgaaaggaggatgagggggcgcagcagctgctgaccctgcagaaccaggtggcgcggctggaggaggagaaccgagactttctggctgcgctggaggacgccatggagcagtacaaactgcagagcgaccggctgcgtgagcagcaggaggagatggtggaactgcggctgcggttagagctggtgcggccaggctgggggggcccgcggctcctgaatggcctgcctcccgggtcctttgtgcctcgacctcatacagcccccctggggggtgcccacgcccatgtgctgggcatggtgccgcctgcctgcctccctggagatgaagttggctctgagcagaggggagagcaggtgacaaatggcagggaggctggagctgagttgctgactgaggtgaacaggctgggaagtggctcttcagctgcttcagaggaggaagaggaggaggaggagccgcccaggcggaccttacacctgcgcagaaataggatcagcaactgcagtcagagggcgggggcacgcccagggagtctgccagagaggaagggcccagagctttgccttgaggagttggatgcagccattccagggtccagagcagttggtgggagcaaggcccgagttcaggcccgccaggtcccccctgccacagcctcagagtggcggctggcccaggcccagcagaagatccgggagctggctatcaacatccgcatgaaggaggagcttattggcgagctggtccgcacaggaaaggcagctcaggccctgaaccgccagcacagccagcgtatccgggagctggagcaggaggcagagcaggtgcgggccgagctgagtgaaggccagaggcagctgcgggagctcgagggcaaggagctccaggatgctggcgagcggtctcggctccaggagttccgcaggagggtcgctgcggcccagagccaggtgcaggtgctgaaggagaagaagcaggctacggagcggctggtgtcactgtcggcccagagtgagaagcgactgcaggagctcgagcggaacgtgcagctcatgcggcagcagcagggacagctgcagaggcggcttcgcgaggagacggagcagaagcggcgcctggaggcagaaatgagcaagcggcagcaccgcgtcaaggagctggagctgaagcatgagcaacagcagaagatcctgaagattaagacggaagagatcgcggcattccagaggaagaggcgcagtggcagcaacggctctgtggtcagcctggaacagcagcagaagattgaggagcagaagaagtggctggaccaggagatggagaaggtgctacagcagcggcgggcgctggaggagctgggggaggagctccacaagcgggaggccatcctggccaagaaggaggccctgatgcaggagaagacggggctggagagcaagcgcctgagatccagccaggccctcaacgaggacatcgtgcgagtgtccagccggctggagcacctggagaaggagctgtccgagaagagcgggcagctgcggcagggcagcgcccagagccagcagcagatccgcggggagatcgacagcctgcgccaggagaaggactcgctgctcaagcagcgcctggagatcgacggcaagctgaggcaggggagtctgctgtcccccgaggaggagcggacgctgttccagttggatgaggccatcgaggccctggatgctgccattgagtataagaatgaggccatcacatgccgccagcgggtgcttcgggcctcagcctcgttgctgtcccagtgcgagatgaacctcatggccaagctcagctacctctcatcctcagagaccagagccctcctctgcaagtattttgacaaggtggtgacgctccgagaggagcagcaccagcagcagattgccttctcggaactggagatgcagctggaggagcagcagaggctggtgtactggctggaggtggccctggagcggcagcgcctggagatggaccgccagctgaccctgcagcagaaggagcacgagcagaacatgcagctgctcctgcagcagagtcgagaccacctcggtgaagggttagcagacagcaggaggcagtatgaggcccggattcaagctctggagaaggaactgggccgttacatgtggataaaccaggaactgaaacagaagctcggcggtgtgaacgctgtaggccacagcaggggtggggagaagaggagcctgtgctcggagggcagacaggctcctggaaatgaagatgagctccacctggcacccgagcttctctggctgtcccccctcactgagggggccccccgcacccgggaggagacgcgggacttggtccacgctccgttacccttgacctggaaacgctcgagcctgtgtggtgaggagcaggggtcccccgaggaactgaggcagcgggaggcggctgagcccctggtggggcgggtgcttcctgtgggtgaggcaggcctgccctggaactttgggcctttgtccaagccccggcgggaactgcgacgagccagcccggggatgattgatgtccggaaaaaccccctgtaagccctcggggcagaccctgccttggagggagactccgagcctgctgaaaggggcagctgcctgttttgcttctgtgaagggcagtccttaccgcacaccctaaatccaggccctcatctgtaccctcactgggatcaacaaatttgggccatggcccaaaagaactggaccctcatttaacaaaataatatgcaaattcccaccacttacttccatgaagctgtggtacccaattgccgccttgtgtcttgctcgaatctcaggacaattctggtttcaggcgtaaatggatgtgcttgtagttcaggggtttggccaagaatcatcacgaaagggtcggtggtaaccaggttgtggtttaaatggtcttatgtatataggggaaactgggagactttaggatcttaaaaaaccatttaataaaaaaaaatctttgaaggga

SEQ ID NO: 15456 - DNA, 2694 bp, Homo sapiens
  source 1..2694: mol_type = unassigned DNA
gcggcgacgtccacgcattttctgacgtagcgagcgacggcggggagccgagcggaagtccagcactattgccgctagaggaggggaggggtgagaagcataagtggcaccggaagtggaattaatccgcctacctctcctgcgcctgcgaaacagaaaagacaaggcgcctgtcgggcggggtgtggcttcgggtggcggagaacgctgcgattggccctcggctgtggcgacagcgacgattggtccctgcgtgcagagcgcggtgagagtgggtggtggccgttggaattcaaaagtggcgggtgtggcgcggggctggtagcggccggagccgtgcgagttctctaccctgcttcgcgagcgggcgagagaacgcgagtcccaggatccccggcacccagttctcttccactgcattcccccggcgcgtgtgggaccgaggtggacatggatccgcagaggtcccccctattggaagtaaaggggaacatagaactgaagagacctctgattaaggccccttcccagctgcctctctcaggaagcagactcaagaggaggcctgaccagatggaagatggcctggagcctgagaagaaacggacaagaggcctgggtgcaacgaccaaaattaccacatcccacccaagagttccatccctcactacagtgccacagacacaaggccagaccacagctcaaaaagtttccaagaagacaggaccccggtgttccacagctattgccacagggttgaagaaccagaagccagttcctgctgttcctgtccagaagtctggcacatcaggtgttcctcccatggcaggagggaagaaacccagcaaacgtccagcctgggacttaaagggtcagttatgtgacctaaatgcagaactaaaacggtgccgtgagaggactcaaacgttggaccaagagaaccagcagcttcaggaccagctcagagatgcccagcagcaggtcaaggccctggggacagagcgcacaacactggaggggcatttagccaaggtacaggcccaggctgagcagggccaacaggagctgaagaacttgcgtgcttgtgtcctggagctggaagagcggctgagcacgcaggagggcttggtgcaagagcttcagaaaaaacaggtggaattgcaggaagaacggaggggactgatgtcccaactagaggagaaggagaggaggctgcagacatcagaagcagccctgtcaagcagccaagcagaggtggcatctctgcggcaggagactgtggcccaggcagccttactgactgagcgggaagaacgtcttcatgggctagaaatggagcgccggcgactgcacaaccagctgcaggaactcaagggcaacatccgtgtattctgccgggtccgccctgtcctgccgggggagcccactccaccccctggcctcctcctgtttccctctggccctggtgggccctctgatcctccaacccgccttagcctctcccggtctgacgagcggcgtgggaccctgagtggggcaccagctcccccaactcgccatgatttttcctttgaccgggtattcccaccaggaagtggacaggatgaagtgtttgaagagattgccatgcttgtccagtcagccctggatggctatccagtatgcatctttgcctatggccagacaggcagtggcaagaccttcacaatggagggtgggcctgggggagacccccagttggaggggctgatccctcgggccctgcggcacctcttctctgtggctcaggagctgagtggtcagggctggacctacagctttgtagcaagctacgtagagatctacaatgagactgtccgggacctgctggccactggaacccggaagggtcaagggggcgagtgtgagattcgccgtgcagggccagggagtgaggagctcactgtcaccaatgctcgatatgtccctgtctcctgtgagaaagaagtggacgccctgcttcatctggcccgccagaatcgggctgtggcccgcacagcccagaatgaacggtcatcacgcagccacagtgtattccagctacagatttctggggagcactccagccgaggcctgcagtgtggggcccccctcagtcttgtggacctggccgggagtgagcgacttgaccccggcttagccctcggccccggggagcgggaacgccttcgggaaacacaggccattaacagcagcctgtccacgctggggctggttatcatggccctgagcaacaaggagtcccacgtgccttaccggaacagcaaactgacctacctgctgcagaactctctgggtggtagtgctaagatgctcatgtttgtgaacatttctccactggaagagaacgtctccgagtccctcaactctctacgctttgcctccaaggtgaaccagtgtgttattggtactgctcaggccaacaggaagtgaagacggatccagatctgtgtgtgtgtgtgtgtgtgtgtgtgtgtgtgtgtgtccctatgtctatgtatcgggtgaggggtgggagggttgctggagggtgctttattgggtggagggcaccatgtcccagggctatcaaataaagaatagtttggttttttttttaaataaaggttttattagcatttgcccaagaaggcagatactttcatatctgtaaaa

SEQ ID NO: 15457 - DNA, 734 bp, Homo sapiens
  source 1..734: mol_type = unassigned DNA
cggccggagccgtgcgagttctctaccctgcttcgcgagcgggcgagagaacgcgagtcccaggatccccggcacccagttctcttccactgcattcccccggcgcgtgtgggaccgaggtggacatggatccgcagaggtcccccctattggaagtaaaggggaacatagaactgaagagacctctgattaaggccccttcccagctgcctctctcaggaagcagactcaagaggaggcctgaccagatggaagatggcctggagcctgagaagaaacggacaagaggcctgggtgcaacgaccaaaattaccacatcccacccaagagttccatccctcactacagtgccacagacacaaggccagaccacaggcccttccagtcacccgttgccttggcaatgtcatcaccaaccttttttggtgacagacccagggggccgatcttgggggccagggcagaagtggcaccgacttcacctctggtgcacctcagctcaaaaagtttccaagaagacaggaccccggtgttccacagctattgccacagggttgaagaaccagaagccagttcctgctgttcctgtccagaagtctggcacatcaggtgttcctcccatggcaggagggaagaaacccagcaaacgtccagcctgggacttaaagggtcagttatgtgacctaaatgcagaactaaaacggtgccgtgagaggactcaaacgttggaccaa

SEQ ID NO: 15458 - DNA, 734 bp, Homo sapiens
  source 1..734: mol_type = unassigned DNA
cggccggagccgtgcgagttctctaccctgcttcgcgagcgggcgagagaacgcgagtcccaggatccccggcacccagttctcttccactgcattcccccggcgcgtgtgggaccgaggtggacatggatccgcagaggtcccccctattggaagtaaaggggaacatagaactgaagagacctctgattaaggccccttcccagctgcctctctcaggaagcagactcaagaggaggcctgaccagatggaagatggcctggagcctgagaagaaacggacaagaggcctgggtgcaacgaccaaaattaccacatcccacccaagagttccatccctcactacagtgccacagacacaaggccagaccacaggcccttccagtcacccgttgccttggcaatgtcatcaccaaccttttttggagacagacccagggggccgatcttgggggccagggcagaagtggcaccgacttcacctctggtgcacctcagctcaaaaagtttccaagaagacaggaccccggtgttccacagctattgccacagggttgaagaaccagaagccagttcctgctgttcctgtccagaagtctggcacatcaggtgttcctcccatggcaggagggaagaaacccagcaaacgtccagcctgggacttaaagggtcagttatgtgacctaaatgcagaactaaaacggtgccgtgagaggactcaaacgttggaccaa

SEQ ID NO: 15459 - DNA, 2706 bp, Homo sapiens
  source 1..2706: mol_type = unassigned DNA
gcggcgacgtccacgcattttctgacgtagcgagcgacggcggggagccgagcggaagtccagcactattgccgctagaggaggggaggggtgagaagcataagtggcaccggaagtggaattaatccgcctacctctcctgcgcctgcgaaacagaaaagacaaggcgcctgtcgggcggggtgtggcttcgggtggcggagaacgctgcgattggccctcggctgtggcgacagcgacgattggtccctgcgtgcagagcgcggtgagagtgggtggtggccgttggaattcaaaagtggcgggtgtggcgcggggctggtagcggccggagccgtgcgagttctctaccctgcttcgcgagcgggcgagagaacgcgagtcccaggatccccggcacccagttctcttccactgcattcccccggcgcgtgtgggaccgaggtggacatggatccgcagaggtcccccctattggaagtaaaggggaacatagaactgaagagacctctgattaaggccccttcccagctgcctctctcaggaagcagactcaagaggaggcctgaccagatggaagatggcctggagcctgagaagaaacggacaagaggcctgggtgcaacgaccaaaattaccacatcccacccaagagttccatccctcactacagtgccacagacacaaggccagaccacagctcaaaaagtttccaagaagacaggaccccggtgttccacagctattgccacagggttgaagaaccagaagccagttcctgctgttcctgtccagaagtctggcacatcaggtgttcctcccatggcaggagggaagaaacccagcaaacgtccagcctgggacttaaagggtcagttatgtgacctaaatgcagaactaaaacggtgccgtgagaggactcaaacgttggaccaagagaaccagcagcttcaggaccagctcagagatgcccagcagcaggtcaaggccctggggacagagcgcacaacactggaggggcatttagccaaggtacaggcccaggctgagcagggccaacaggagctgaagaacttgcgtgcttgtgtcctggagctggaagagcggctgagcacgcaggagggcttggtgcaagagcttcagaaaaaacaggtggaattgcaggaagaacggaggggactgatgtcccaactagaggagaaggagaggaggctgcagacatcagaagcagccctgtcaagcagccaagcagaggtggcatctctgcggcaggagactgtggcccaggcagccttactgactgagcgggaagaacgtcttcatgggctagaaatggagcgccggcgactgcacaaccagctgcaggaactcaagggcaacatccgtgtattctgccgggtccgccctgtcctgccgggggagcccactccaccccctggcctcctcctgtttccctctggccctggtgggccctctgatcctccaacccgccttagcctctcccggtctgacgagcggcgtgggaccctgagtggggcaccagctcccccaactcgccatgatttttcctttgaccgggtattcccaccaggaagtggacaggatgaagtgtttgaagagattgccatgcttgtccagtcagccctggatggctatccagtatgcatctttgcctatggccagacaggcagtggcaagaccttcacaatggagggtgggcctgggggagacccccagttggaggggctgatccctcgggccctgcggcacctcttctctgtggctcaggagctgagtggtcagggctggacctacagctttgtagcaagctacgtagagatctacaatgagactgtccgggacctgctggccactggaacccggaagggtcaagggggcgagtgtgagattcgccgtgcagggccagggagtgaggagctcactgtcaccaatgctcgatatgtccctgtctcctgtgagaaagaagtggacgccctgcttcatctggcccgccagaatcgggctgtggcccgcacagcccagaatgaacggtcatcacgcagccacagtgtattccagctacagatttctggggagcactccagccgaggcctgcagtgtggggcccccctcagtcttgtggacctggccgggagtgagcgacttgaccccggcttagccctcggccccggggagcgggaacgccttcgggaaacacaggccattaacagcagcctgtccacgctggggctggttatcatggccctgagcaacaaggagtcccacgtgccttaccggaacagcaaactgacctacctgctgcagaactctctgggtggtagtgctaagatgctcatgtttgtgaacatttctccactggaagagaacgtctccgagtccctcaactctctacgctttgcctccaaggtgaaccagtgtgttattggtactgctcaggccaacaggaagtgaagacggatccagatctgtgtgtgtgtgtgtgtgtgtgtgtgtgtgtgtgtgtgtgtgtgtgtgtccctatgtctatgtatcgggtgaggggtgggagggttgctggagggtgctttattgggtggagggcaccatgtcccagggctatcaaataaagaatagtttggttttttttttaaataaaggttttattagcatttgcccaagaaggcagatactttcatatctgtaaaa

SEQ ID NO: 15460 - DNA, 2706 bp, Homo sapiens; identical to SEQ ID NO: 15459
  source 1..2706: mol_type = unassigned DNA

SEQ ID NO: 15461 - DNA, 734 bp, Homo sapiens; identical to SEQ ID NO: 15458
  source 1..734: mol_type = unassigned DNA

SEQ ID NO: 15462 - DNA, 3362 bp, Homo sapiens
  source 1..3362: mol_type = unassigned DNA
gagttaatcatttcctgtggaaagtgtgcgggaggggcgcgagcgggctggccgaggaggaggcggcggcgtggagctgcctcctgccggcgggccgggccgggccgagccccgggcgctgcggcgacgcctggatcctgcctccgccaggccggctgcctggtgccccgaggaggctgctgagccccaggccatggtcccctctcgcaggacgtggaacctgggagccacgccctcgctgcggggcctgtggagagtgggccgggccccggagcccgagccggggatggctcgccccgccccagccccagccagcccggccgcccgccctttcccacacaccggcccggggaggttgagaactgggcgtggaaaagataccccagtctgcggtgacgaggactccagtgcccgaagtgcagctcgcccagccctagctcagtgccgagcccttagcgtggactgggctggccccggaagcccccacgggctctacctgaccctgcaggtagaacacctgaaggagaagctcattagccaggcccaggaagtgagccgactgcgatctgagctggggggcaccgacttggagaagcaccgggacctgctgatggtggagaatgagcgactgaggcaggagatgcggcgctgtgaggccgagctgcaagagctgcgcacaaagccagcaggtccctgcccaggttgtgagcacagccaggagagcgcccagctccgtgacaagctgtcccagctgcagctggagatggcggaaagcaaaggcatgctgtcagagctgaacctagaggtgcagcagaagaccgaccggctggctgaggtggagctgcgactcaaggactgcctggctgagaaggcacaggaggaggagcggcttagtcggcgcctgcgtgacagccacgagaccattgccagcctgcgggcccagtccccacctgtcaagtatgtcatcaagacagtggaggtggagtcgtccaagaccaagcaggccctcagcgagtcccaggcccggaaccagcacctgcaggagcaggtggctatgcagaggcaggtgctgaaggagatggaacagcagctgcagagctcacaccagctgaccgcgcggctccgggcgcagattgccatgtacgagtcagagctggagcgggcccatgggcagatgctggaggagatgcagtccctggaagaggacaagaaccgggccattgaggaggcctttgccagagcccaggtggagatgaaggctgtgcacgagaatctagcaggcgtccggaccaacttgctgaccttgcagccggcactgcggaccctcaccaacgactacaatgggctcaagcggcaggtgcgcggcttcccactgctgctgcaggaggccctcaggagtgtcaaggccgagataggccaggccatcgaggaggtcaacagcaacaaccaggagctgctgcgcaagtaccgccgcgagctgcagctgcgtaagaagtgccacaatgagctcgtgcggctgaaagggaacatccgagtgattgctcgtgtccggccagtcaccaaagaggatggggaaggacctgaggccaccaatgctgtgactttcgatgccgacgacgactccatcatccacctgctgcacaagggcaagcctgtgtccttcgagctggacaaggtcttctccccacaggcctcgcagcaggacgtgttccaggaggtgcaggccctggtcacctcttgcattgatggcttcaatgtctgcatctttgcgtacggccagacgggcgccggcaagacgtacacgatggaggggaccgctgagaacccaggtatcaaccagcgggccctgcagctgctcttctccgaggtgcaggagaaggcgtctgactgggagtacaccatcaccgtcagcgctgcggagatctacaatgaggtcctcagggacctgctagggaaagagcctcaggaaaaactggagatccggctgtgcccagacggcagtgggcagctgtatgtaccagggctgactgagttccaagtgcagagcgtggacgacatcaacaaggtgtttgagtttggccacactaatcgcacgaccgagttcaccaacctgaacgagcacagctcccgctcgcacgcgctgctcatcgtgacggtgcgaggcgtggactgcagcacaggcctccgcaccacggggaagctgaacctggtggacttggctggctcggagcgcgtgggcaagtcgggggccgagggcagccgcctgcgggaggcgcagcacatcaacaagtcgctgtcggctctgggggacgtcattgctgccctgcgctcccgccagggccacgtgcccttccgcaactccaagctcacctacctgctgcaggattcgcttagtggtgacagcaagaccctcatggtggtacaggtgtcccccgtggagaagaacactagcgagacgctctattccctcaagtttgctgagagggtgcgctctgtggagctggggcctgggctacgcagggcagagcttgggtcctggtcaagccaggagcatctagagtgggagccggcttgtcagacgccacagccctcggcacgggcccactcagcccccagctctgggaccagtagccgccctggatccatccggaggaagctgcagccctcggggaagtcgcggccactgcctgtgtgacggatgtgaccccgctgggcctgaagctgggccctcactggcctgtccctgctgcagcgccaggacccccggaggtagaggcgagagtggaggctcttcttctgccccgtctcccctcaaagatgagaaacatgttcagaaggaaacggtgtctctcggctgtggctctgagtgcaaattgcatgggcggaaaggcgggggtggctgctcttcctggcaggcctgggccatcagcgaactgggccccgtgaggagggcgggagtgtggaggagggtgggcctctcacccaggctttctcggcccctctcctcagcttgcagagctggccagccccctccttagggggtgggcgaggagcctctgggcagacccaagaaccatggggactggggtgggttggtggcaccaatggcagccctccccgcccctctccttcaaggagggttcccgcagctggggggtgtgcggaggcgcatggcctcccgccacggggccgtgctgtgtttatggctggcagaggcagccagcgggtgggggattctgctgctcgctcacctgcctggctcgctggtctctcgaattttcttccctctgaaatcctatttaagaacttttggaagcttagccatttttacttattaaaataaaagaagcctttttacacaa

SEQ ID NO: 15463 - DNA, 3335 bp, Homo sapiens
  source 1..3335: mol_type = unassigned DNA
agagatgagactgaggtttctcaccggttcctaagcccagtcagagctgtcaggtaattacagggtaaccgacagcccagagccaggcgggcgtggagccggagcgtcagtctcgccgggcgctccttccctgcgcccctgtctggaaaagaggagacctggaagccgggttaaactttaacacgggtcgggcacagagcagggggaatcagctgcattccctctggccaagctggtcagagctctgcgggctgccgtccttggccaagagcgtgtgggctagctccggtctctgcccaggctggtaaacaagggcgtggaaaagataccccagtctgcggtgacgaggactccagtgcccgaagtgcagctcgcccagccctagctcagtgccgagcccttagcgtggactgggctggccccggaagcccccacgggctctacctgaccctgcaggtagaacacctgaaggagaagctcattagccaggcccaggaagtgagccgactgcgatctgagctggggggcaccgacttggagaagcaccgggacctgctgatggtggagaatgagcgactgaggcaggagatgcggcgctgtgaggccgagctgcaagagctgcgcacaaagccagcaggtccctgcccaggttgtgagcacagccaggagagcgcccagctccgtgacaagctgtcccagctgcagctggagatggcggaaagcaaaggcatgctgtcagagctgaacctagaggtgcagcagaagaccgaccggctggctgaggtggagctgcgactcaaggactgcctggctgagaaggcacaggaggaggagcggcttagtcggcgcctgcgtgacagccacgagaccattgccagcctgcgggcccagtccccacctgtcaagtatgtcatcaagacagtggaggtggagtcgtccaagaccaagcaggccctcagcgagtcccaggcccggaaccagcacctgcaggagcaggtggctatgcagaggcaggtgctgaaggagatggaacagcagctgcagagctcacaccagctgaccgcgcggctccgggcgcagattgccatgtacgagtcagagctggagcgggcccatgggcagatgctggaggagatgcagtccctggaagaggacaagaaccgggccattgaggaggcctttgccagagcccaggtggagatgaaggctgtgcacgagaatctagcaggcgtccggaccaacttgctgaccttgcagccggcactgcggaccctcaccaacgactacaatgggctcaagcggcaggtgcgcggcttcccactgctgctgcaggaggccctcaggagtgtcaaggccgagataggccaggccatcgaggaggtcaacagcaacaaccaggagctgctgcgcaagtaccgccgcgagctgcagctgcgtaagaagtgccacaatgagctcgtgcggctgaaagggaacatccgagtgattgctcgtgtccggccagtcaccaaagaggatggggaaggacctgaggccaccaatgctgtgactttcgatgccgacgacgactccatcatccacctgctgcacaagggcaagcctgtgtccttcgagctggacaaggtcttctccccacaggcctcgcagcaggacgtgttccaggaggtgcaggccctggtcacctcttgcattgatggcttcaatgtctgcatctttgcgtacggccagacgggcgccggcaagacgtacacgatggaggggaccgctgagaacccaggtatcaaccagcgggccctgcagctgctcttctccgaggtgcaggagaaggcgtctgactgggagtacaccatcaccgtcagcgctgcggagatctacaatgaggtcctcagggacctgctagggaaagagcctcaggaaaaactggagatccggctgtgcccagacggcagtgggcagctgtatgtaccagggctgactgagttccaagtgcagagcgtggacgacatcaacaaggtgtttgagtttggccacactaatcgcacgaccgagttcaccaacctgaacgagcacagctcccgctcgcacgcgctgctcatcgtgacggtgcgaggcgtggactgcagcacaggcctccgcaccacggggaagctgaacctggtggacttggctggctcggagcgcgtgggcaagtcgggggccgagggcagccgcctgcgggaggcgcagcacatcaacaagtcgctgtcggctctgggggacgtcattgctgccctgcgctcccgccagggccacgtgcccttccgcaactccaagctcacctacctgctgcaggattcgcttagtggtgacagcaagaccctcatggtggtacaggtgtcccccgtggagaagaacactagcgagacgctctattccctcaagtttgctgagagggtgcgctctgtggagctggggcctgggctacgcagggcagagcttgggtcctggtcaagccaggagcatctagagtgggagccggcttgtcagacgccacagccctcggcacgggcccactcagcccccagctctgggaccagtagccgccctggatccatccggaggaagctgcagccctcggcctgacggctggggctgcagagtctctagggaagtcgcggccactgcctgtgtgacggatgtgaccccgctgggcctgaagctgggccctcactggcctgtccctgctgcagcgccaggacccccggaggtagaggcgagagtggaggctcttcttctgccccgtctcccctcaaagatgagaaacatgttcagaaggaaacggtgtctctcggctgtggctctgagtgcaaattgcatgggcggaaaggcgggggtggctgctcttcctggcaggcctgggccatcagcgaactgggccccgtgaggagggcgggagtgtggaggagggtgggcctctcacccaggctttctcggcccctctcctcagcttgcagagctggccagccccctccttagggggtgggcgaggagcctctgggcagacccaagaaccatggggactggggtgggttggtggcaccaatggcagccctccccgcccctctccttcaaggagggttcccgcagctggggggtgtgcggaggcgcatggcctcccgccacggggccgtgctgtgtttatggctggcagaggcagccagcgggtgggggattctgctgctcgctcacctgcctggctcgctggtctctcgaattttcttccctctgaaatcctatttaagaacttttggaagcttagccatttttacttattaaaataaaagaagcctttttac

SEQ ID NO: 15464 - DNA, 3391 bp, Homo sapiens
  source 1..3391: mol_type = unassigned DNA
gcccgagttaatcatttcctgtggaaagtgtgcgggaggggcgcgagcgggctggccgaggaggaggcggcggcgtggagctgcctcctgccggcgggccgggccgggccgagccccgggcgctgcggcgacgcctggatcctgcctccgccaggccggctgcctggtgccccgaggaggctgctgagccccaggccatggtcccctctcgcaggacgtggaacctgggagccacgccctcgctgcggggcctgtggagagtgggccgggccccggagcccgagccggggatggctcgccccgccccagccccagccagcccggccgcccgccctttcccacacaccggcccggggaggttgagaactgggcgtggaaaagataccccagtctgcggtgacgaggactccagtgcccgaagtgcagctcgcccagccctagctcagtgccgagcccttagcgtggactgggctggccccggaagcccccacgggctctacctgaccctgcaggtagaacacctgaaggagaagctcattagccaggcccaggaagtgagccgactgcgatctgagctggggggcaccgacttggagaagcaccgggacctgctgatggtggagaatgagcgactgaggcaggagatgcggcgctgtgaggccgagctgcaagagctgcgcacaaagccagcaggtccctgcccaggttgtgagcacagccaggagagcgcccagctccgtgacaagctgtcccagctgcagctggagatggcggaaagcaaaggcatgctgtcagagctgaacctagaggtgcagcagaagaccgaccggctggctgaggtggagctgcgactcaaggactgcctggctgagaaggcacaggaggaggagcggcttagtcggcgcctgcgtgacagccacgagaccattgccagcctgcgggcccagtccccacctgtcaagtatgtcatcaagacagtggaggtggagtcgtccaagaccaagcaggccctcagcgagtcccaggcccggaaccagcacctgcaggagcaggtggctatgcagaggcaggtgctgaaggagatggaacagcagctgcagagctcacaccagctgaccgcgcggctccgggcgcagattgccatgtacgagtcagagctggagcgggcccatgggcagatgctggaggagatgcagtccctggaagaggacaagaaccgggccattgaggaggcctttgccagagcccaggtggagatgaaggctgtgcacgagaatctagcaggcgtccggaccaacttgctgaccttgcagccggcactgcggaccctcaccaacgactacaatgggctcaagcggcaggtgcgcggcttcccactgctgctgcaggaggccctcaggagtgtcaaggccgagataggccaggccatcgaggaggtcaacagcaacaaccaggagctgctgcgcaagtaccgccgcgagctgcagctgcgtaagaagtgccacaatgagctcgtgcggctgaaagggaacatccgagtgattgctcgtgtccggccagtcaccaaagaggatggggaaggacctgaggccaccaatgctgtgactttcgatgccgacgacgactccatcatccacctgctgcacaagggcaagcctgtgtccttcgagctggacaaggtcttctccccacaggcctcgcagcaggacgtgttccaggaggtgcaggccctggtcacctcttgcattgatggcttcaatgtctgcatctttgcgtacggccagacgggcgccggcaagacgtacacgatggaggggaccgctgagaacccaggtatcaaccagcgggccctgcagctgctcttctccgaggtgcaggagaaggcgtctgactgggagtacaccatcaccgtcagcgctgcggagatctacaatgaggtcctcagggacctgctagggaaagagcctcaggaaaaactggagatccggctgtgcccagacggcagtgggcagctgtatgtaccagggctgactgagttccaagtgcagagcgtggacgacatcaacaaggtgtttgagtttggccacactaatcgcacgaccgagttcaccaacctgaacgagcacagctcccgctcgcacgcgctgctcatcgtgacggtgcgaggcgtggactgcagcacaggcctccgcaccacggggaagctgaacctggtggacttggctggctcggagcgcgtgggcaagtcgggggccgagggcagccgcctgcgggaggcgcagcacatcaacaagtcgctgtcggctctgggggacgtcattgctgccctgcgctcccgccagggccacgtgcccttccgcaactccaagctcacctacctgctgcaggattcgcttagtggtgacagcaagaccctcatggtggtacaggtgtcccccgtggagaagaacactagcgagacgctctattccctcaagtttgctgagagggtgcgctctgtggagctggggcctgggctacgcagggcagagcttgggtcctggtcaagccaggagcatctagagtgggagccggcttgtcagacgccacagccctcggcacgggcccactcagcccccagctctgggaccagtagccgccctggatccatccggaggaagctgcagccctcggcctgacggctggggctgcagagtctctagggaagtcgcggccactgcctgtgtgacggatgtgaccccgctgggcctgaagctgggccctcactggcctgtccctgctgcagcgccaggacccccggaggtagaggcgagagtggaggctcttcttctgccccgtctcccctcaaagatgagaaacatgttcagaaggaaacggtgtctctcggctgtggctctgagtgcaaattgcatgggcggaaaggcgggggtggctgctcttcctggcaggcctgggccatcagcgaactgggccccgtgaggagggcgggagtgtggaggagggtgggcctctcacccaggctttctcggcccctctcctcagcttgcagagctggccagccccctccttagggggtgggcgaggagcctctgggcagacccaagaaccatggggactggggtgggttggtggcaccaatggcagccctccccgcccctctccttcaaggagggttcccgcagctggggggtgtgcggaggcgcatggcctcccgccacggggccgtgctgtgtttatggctggcagaggcagccagcgggtgggggattctgctgctcgctcacctgcctggctcgctggtctctcgaattttcttccctctgaaatcctatttaagaacttttggaagcttagccatttttacttattaaaataaaagaagcctttttac

SEQ ID NO: 15465 - DNA, 2729 bp, Homo sapiens
  source 1..2729: mol_type = unassigned DNA
gaatcagctgcattccctctggccaagctggtcagagctctgcgggctgccgtccttggccaagagcgtgtgggctagctccggtctctgcccaggctggtaaacaagggcgtggaaaagataccccagtctgcggtgacgaggactccagtgcccgaagtgcagctcgcccagccctagctcagtgccgagcccttagcgtggactgggctggccccggaagcccccacgggctctacctgaccctgcaggtgggcgtctctttggcagcaggaggtgctcgagcttgtcggggccaccaggtgcggcccccatggtgcttaggatggtggaggccatgtcccagctccaggacgagaagacccagctacaggaggagctggtggtcctacaggagaggctggccctccgcgacagtgaccagcaggccacgtccacccagctgcagaaccaggtagaacacctgaaggagaagctcattagccaggcccaggaagtgagccgactgcgatctgagctggggggcaccgacttggagaagcaccgggacctgctgatggtggagaatgagcgactgaggcaggagatgcggcgctgtgaggccgagctgcaagagctgcgcacaaagccagcaggtccctgcccaggttgtgagcacagccaggagagcgcccagctccgtgacaagctgtcccagctgcagctggagatggcggaaagcaaaggcatgctgtcagagctgaacctagaggtgcagcagaagaccgaccggctggctgaggtggagctgcgactcaaggactgcctggctgagaaggcacaggaggaggagcggcttagtcggcgcctgcgtgacagccacgagaccattgccagcctgcgggcccagtccccacctgtcaagtatgtcatcaagacagtggaggtggagtcgtccaagaccaagcaggccctcagcgagtcccaggcccggaaccagcacctgcaggagcaggtggctatgcagaggcaggtgctgaaggagatggaacagcagctgcagagctcacaccagctgaccgcgcggctccgggcgcagattgccatgtacgagtcagagctggagcgggcccatgggcagatgctggaggagatgcagtccctggaagaggacaagaaccgggccattgaggaggcctttgccagagcccaggtggagatgaaggctgtgcacgagaatctagcaggcgtccggaccaacttgctgaccttgcagccggcactgcggaccctcaccaacgactacaatgggctcaagcggcaggtgcgcggcttcccactgctgctgcaggaggccctcaggagtgtcaaggccgagataggccaggccatcgaggaggtcaacagcaacaaccaggagctgctgcgcaagtaccgccgcgagctgcagctgcgtaagaagtgccacaatgagctcgtgcggctgaaagggaacatccgagtgattgctcgtgtccggccagtcaccaaagaggatggggaaggacctgaggccaccaatgctgtgactttcgatgccgacgacgactccatcatccacctgctgcacaagggcaagcctgtgtccttcgagctggacaaggtcttctccccacaggcctcgcagcaggacgtgttccaggaggtgcaggccctggtcacctcttgcattgatggcttcaatgtctgcatctttgcgtacggccagacgggcgccggcaagacgtacacgatggaggggaccgctgagaacccaggtatcaaccagcgggccctgcagctgctcttctccgaggtgcaggagaaggcgtctgactgggagtacaccatcaccgtcagcgctgcggagatctacaatgaggtcctcagggacctgctagggaaagagcctcaggaaaaactggagatccggctgtgcccagacggcagtgggcagctgtatgtaccagggctgactgagttccaagtgcagagcgtggacgacatcaacaaggtgtttgagtttggccacactaatcgcacgaccgagttcaccaacctgaacgagcacagctcccgctcgcacgcgctgctcatcgtgacggtgcgaggcgtggactgcagcacaggcctccgcaccacggggaagctgaacctggtggacttggctggctcggagcgcgtgggcaagtcgggggccgagggcagccgcctgcgggaggcgcagcacatcaacaagtcgctgtcggctctgggggacgtcattgctgccctgcgctcccgccagggccacgtgcccttccgcaactccaagctcacctacctgctgcaggattcgcttagtggtgacagcaagaccctcatggtggtacaggtgtcccccgtggagaagaacactagcgagacgctctattccctcaagtttgctgagagggtgcgctctgtggagctggggcctgggctacgcagggcagagcttgggtcctggtcaagccaggagcatctagagtgggagccggcttgtcagacgccacagccctcggcacgggcccactcagcccccagctctgggaccagtagccgccctggatccatccggaggaagctgcagccctcggcctgacggctggggctgcagagtctctagggaagtcgcggccactgcctgtgtgacggatgtgaccccgctgggcctgaagctgggccctcactggcctgtccctgctgcagcg

SEQ ID NO: 15466 - DNA, 2770 bp, Homo sapiens
  source 1..2770: mol_type = unassigned DNA
agaaccctgggccgcaggcaggtggctggtgggtatcccgcctcccacccccagcaaacactggcaaaccccactctccctgcatcagggtctgagtgcctggcaggggcggcagtggagatgatcaaggtagaacacctgaaggagaagctcattagccaggcccaggaagtgagccgactgcgatctgagctggggggcaccgacttggagaagcaccgggacctgctgatggtggagaatgagcgactgaggcaggagatgcggcgctgtgaggccgagctgcaagagctgcgcacaaagccagcaggtccctgcccaggttgtgagcacagccaggagagcgcccagctccgtgacaagctgtcccagctgcagctggagatggcggaaagcaaaggcatgctgtcagagctgaacctagaggtgcagcagaagaccgaccggctggctgaggtggagctgcgactcaaggactgcctggctgagaaggcacaggaggaggagcggcttagtcggcgcctgcgtgacagccacgagaccattgccagcctgcgggcccagtccccacctgtcaagtatgtcatcaagacagtggaggtggagtcgtccaagaccaagcaggccctcagcgagtcccaggcccggaaccagcacctgcaggagcaggtggctatgcagaggcaggtgctgaaggagatggaacagcagctgcagagctcacaccagctgaccgcgcggctccgggcgcagattgccatgtacgagtcagagctggagcgggcccatgggcagatgctggaggagatgcagtccctggaagaggacaagaaccgggccattgaggaggcctttgccagagcccaggtggagatgaaggctgtgcacgagaatctagcaggcgtccggaccaacttgctgaccttgcagccggcactgcggaccctcaccaacgactacaatgggctcaagcggcaggtgcgcggcttcccactgctgctgcaggaggccctcaggagtgtcaaggccgagataggccaggccatcgaggaggtcaacagcaacaaccaggagctgctgcgcaagtaccgccgcgagctgcagctgcgtaagaagtgccacaatgagctcgtgcggctgaaagggaacatccgagtgattgctcgtgtccggccagtcaccaaagaggatggggaaggacctgaggccaccaatgctgtgactttcgatgccgacgacgactccatcatccacctgctgcacaagggcaagcctgtgtccttcgagctggacaaggtcttctccccacaggcctcgcagcaggacgtgttccaggaggtgcaggccctggtcacctcttgcattgatggcttcaatgtctgcatctttgcgtacggccagacgggcgccggcaagacgtacacgatggaggggaccgctgagaacccaggtatcaaccagcgggccctgcagctgctcttctccgaggtgcaggagaaggcgtctgactgggagtacaccatcaccgtcagcgctgcggagatctacaatgaggtcctcagggacctgctagggaaagagcctcaggaaaaactggagatccggctgtgcccagacggcagtgggcagctgtatgtaccagggctgactgagttccaagtgcagagcgtggacgacatcaacaaggtgtttgagtttggccacactaatcgcacgaccgagttcaccaacctgaacgagcacagctcccgctcgcacgcgctgctcatcgtgacggtgcgaggcgtggactgcagcacaggcctccgcaccacggggaagctgaacctggtggacttggctggctcggagcgcgtgggcaagtcgggggccgagggcagccgcctgcgggaggcgcagcacatcaacaagtcgctgtcggctctgggggacgtcattgctgccctgcgctcccgccagggccacgtgcccttccgcaactccaagctcacctacctgctgcaggattcgcttagtggtgacagcaagaccctcatggtggtacaggtgtcccccgtggagaagaacactagcgagacgctctattccctcaagtttgctgagagggtgcgctctgtggagctggggcctgggctacgcagggcagagcttgggtcctggtcaagccaggagcatctagagtgggagccggcttgtcagacgccacagccctcggcacgggcccactcagcccccagctctgggaccagtagccgccctggatccatccggaggaagctgcagccctcggcctgacggctggggctgcagagtctctagggaagtcgcggccactgcctgtgtgacggatgtgaccccgctgggcctgaagctgggccctcactggcctgtccctgctgcagcgccaggacccccggaggtagaggcgagagtggaggctcttcttctgccccgtctcccctcaaagatgagaaacatgttcagaaggaaacggtgtctctcggctgtggctctgagtgcaaattgcatgggcggaaaggcgggggtggctgctcttcctggcaggcctgggccatcagcgaactgggccccgtgaggagggcgggagtgtggaggagggtgggcctctcacccaggctttctcggcccctctcctcagcttgcagagctggccagccccctccttagggggtgggcgaggagcctctgggcagacccaagaaccatggggactggggtgggttggtggcaccaatggcagccctccccg

SEQ ID NO: 15467 - DNA, 3047 bp, Homo sapiens
  source 1..3047: mol_type = unassigned DNA
agtgtgagtgcatgtgcgccagcgcgtgcaaggacacggctgcctggtgccccgaggaggctgctgagccccaggccatggtcccctctcgcaggacgtggaacctgggagccacgccctcgctgcggggcctgtggagagtgggccgggccccggagcccgagccggggatggctcgccccgccccagccccagccagcccggccgcccgccctttcccacacaccggcccggggaggttgagaactgggcgtggaaaagataccccagtctgcggtgacgaggactccagtgcccgaagtgcagctcgcccagccctagctcagtgccgagcccttagcgtggactgggctggccccggaagcccccacgggctctacctgaccctgcaggtagaacacctgaaggagaagctcattagccaggcccaggaagtgagccgactgcgatctgagctggggggcaccgacttggagaagcaccgggacctgctgatggtggagaatgagcgactgaggcaggagatgcggcgctgtgaggccgagctgcaagagctgcgcacaaagccagcaggtccctgcccaggttgtgagcacagccaggagagcgcccagctccgtgacaagctgtcccagctgcagctggagatggcggaaagcaaaggcatgctgtcagagctgaacctagaggtgcagcagaagaccgaccggctggctgaggtggagctgcgactcaaggactgcctggctgagaaggcacaggaggaggagcggcttagtcggcgcctgcgtgacagccacgagaccattgccagcctgcgggcccagtccccacctgtcaagtatgtcatcaagacagtggaggtggagtcgtccaagaccaagcaggccctcagcgagtcccaggcccggaaccagcacctgcaggagcaggtggctatgcagaggcaggtgctgaaggagatggaacagcagctgcagagctcacaccagctgaccgcgcggctccgggcgcagattgccatgtacgagtcagagctggagcgggcccatgggcagatgctggaggagatgcagtccctggaagaggacaagaaccgggccattgaggaggcctttgccagagcccaggtggagatgaaggctgtgcacgagaatctagcaggcgtccggaccaacttgctgaccttgcagccggcactgcggaccctcaccaacgactacaatgggctcaagcggcaggtgcgcggcttcccactgctgctgcaggaggccctcaggagtgtcaaggccgagataggccaggccatcgaggaggtcaacagcaacaaccaggagctgctgcgcaagtaccgccgcgagctgcagctgcgtaagaagtgccacaatgagctcgtgcggctgaaagggaacatccgagtgattgctcgtgtccggccagtcaccaaagaggatggggaaggacctgaggccaccaatgctgtgactttcgatgccgacgacgactccatcatccacctgctgcacaagggcaagcctgtgtccttcgagctggacaaggtcttctccccacaggcctcgcagcaggacgtgttccaggaggtgcaggccctggtcacctcttgcattgatggcttcaatgtctgcatctttgcgtacggccagacgggcgccggcaagacgtacacgatggaggggaccgctgagaacccaggtatcaaccagcgggccctgcagctgctcttctccgaggtgcaggagaaggcgtctgactgggagtacaccatcaccgtcagcgctgcggagatctacaatgaggtcctcagggacctgctagggaaagagcctcaggaaaaactggagatccggctgtgcccagacggcagtgggcagctgtatgtaccagggctgactgagttccaagtgcagagcgtggacgacatcaacaaggtgtttgagtttggccacactaatcgcacgaccgagttcaccaacctgaacgagcacagctcccgctcgcacgcgctgctcatcgtgacggtgcgaggcgtggactgcagcacaggcctccgcaccacggggaagctgaacctggtggacttggctggctcggagcgcgtgggcaagtcgggggccgagggcagccgcctgcgggaggcgcagcacatcaacaagtcgctgtcggctctgggggacgtcattgctgccctgcgctcccgccagggccacgtgcccttccgcaactccaagctcacctacctgctgcaggattcgcttagtggtgacagcaagaccctcatggtggtacaggtgtcccccgtggagaagaacactagcgagacgctctattccctcaagtttgctgagagggtgcgctctgtggagctggggcctgggctacgcagggcagagcttgggtcctggtcaagccaggagcatctagagtgggagccggcttgtcagacgccacagccctcggcacgggcccactcagcccccagctctgggaccagtagccgccctggatccatccggaggaagctgcagccctcggcctgacggctggggctgcagagtctctagggaagtcgcggccactgcctgtgtgacggatgtgaccccgctgggcctgaagctgggccctcactggcctgtccctgctgcagcgccaggacccccggaggtagaggcgagagtggaggctcttcttctgccccgtctcccctcaaagatgagaaacatgttcagaaggaaacggtgtctctcggctgtggctctgagtgcaaattgcatgggcggaaaggcgggggtggctgctcttcctggcaggcctgggccatcagcgaactgggccccgtgaggagggcgggagtgtggaggagggtgggcctctcacccaggctttctcggcccctctcctcagcttgcagagctggccagccccctccttagggggtgggcgaggagcctctgggcagacccaagaaccatggggactggggtgggttggtggcaccaatggcagccctccccgcccctctccttcaa

SEQ ID NO: 15468 - DNA, 3018 bp, Homo sapiens
  source 1..3018: mol_type = unassigned DNA
agctgggcagctgtaggaagtcacttcctctctgagccttcacttcccagtctctaaactggggctcacaaatgtcgcattgcagtttgggggtggatctgttgtaagaatggacagaaaaaagatggtcaactgtaatgtgtggtgcatcgtgagctgtcactcccgtgtgccctggtctcctgctggcctcactgtggtttgactcagacttggactttcctggaattctgaactttgcctctctaagcaaagcccgccagggggtacactctgccttgttttccatggtgccgtgtttccagccctatccaccactggcttctgatcggctgctttctcacactgctgttcctgcaaggctgtgtggccccatggttaagggtgagggttctgcaagggtcagccagatgcgagttccggtcctaggtccaccacttactggtcaggtgacctcaagtagaacacctgaaggagaagctcattagccaggcccaggaagtgagccgactgcgatctgagctggggggcaccgacttggagaagcaccgggacctgctgatggtggagaatgagcgactgaggcaggagatgcggcgctgtgaggccgagctgcaagagctgcgcacaaagccagcaggtccctgcccaggttgtgagcacagccaggagagcgcccagctccgtgacaagctgtcccagctgcagctggagatggcggaaagcaaaggcatgctgtcagagctgaacctagaggtgcagcagaagaccgaccggctggctgaggtggagctgcgactcaaggactgcctggctgagaaggcacaggaggaggagcggcttagtcggcgcctgcgtgacagccacgagaccattgccagcctgcgggcccagtccccacctgtcaagtatgtcatcaagacagtggaggtggagtcgtccaagaccaagcaggccctcagcgagtcccaggcccggaaccagcacctgcaggagcaggtggctatgcagaggcaggtgctgaaggagatggaacagcagctgcagagctcacaccagctgaccgcgcggctccgggcgcagattgccatgtacgagtcagagctggagcgggcccatgggcagatgctggaggagatgcagtccctggaagaggacaagaaccgggccattgaggaggcctttgccagagcccaggtggagatgaaggctgtgcacgagaatctagcaggcgtccggaccaacttgctgaccttgcagccggcactgcggaccctcaccaacgactacaatgggctcaagcggcaggtgcgcggcttcccactgctgctgcaggaggccctcaggagtgtcaaggccgagataggccaggccatcgaggaggtcaacagcaacaaccaggagctgctgcgcaagtaccgccgcgagctgcagctgcgtaagaagtgccacaatgagctcgtgcggctgaaagggaacatccgagtgattgctcgtgtccggccagtcaccaaagaggatggggaaggacctgaggccaccaatgctgtgactttcgatgccgacgacgactccatcatccacctgctgcacaagggcaagcctgtgtccttcgagctggacaaggtcttctccccacaggcctcgcagcaggacgaggtgcaggccctggtcacctcttgcattgatggcttcaatgtctgcatctttgcgtacggccagacgggcgccggcaagacgtacacgatggaggggaccgctgagaacccaggtatcaaccagcgggccctgcagctgctcttctccgaggtgcaggagaaggcgtctgactgggagtacaccatcaccgtcagcgctgcggagatctacaatgaggtcctcagggacctgctagggaaagagcctcaggaaaaactggagatccggctgtgcccagacggcagtgggcagctgtatgtaccagggctgactgagttccaagtgcagagcgtggacgacatcaacaaggtgtttgagtttggccacactaatcgcacgaccgagttcaccaacctgaacgagcacagctcccgctcgcacgcgctgctcatcgtgacggtgcgaggcgtggactgcagcacaggcctccgcaccacggggaagctgaacctggtggacttggctggctcggagcgcgtgggcaagtcgggggccgagggcagccgcctgcgggaggcgcagcacatcaacaagtcgctgtcggctctgggggacgtcattgctgccctgcgctcccgccagggccacgtgcccttccgcaactccaagctcacctacctgctgcaggattcgcttagtggtgacagcaagaccctcatggtggtacaggtgtcccccgtggagaagaacactagcgagacgctctattccctcaagtttgctgagagggtgcgctctgtggagctggggcctgggctacgcagggcagagcttgggtcctggtcaagccaggagcatctagagtgggagccggcttgtcagacgccacagccctcggcacgggcccactcagcccccagctctgggaccagtagccgccctggatccatccggaggaagctgcagccctcggcctgacggctggggctgcagagtctctagggaagtcgcggccactgcctgtgtgacggatgtgaccccgctgggcctgaagctgggccctcactggcctgtccctgctgcagcgccaggacccccggaggtagaggcgagagtggaggctcttcttctgccccgtctcccctcaaagatgagaaacatgttcagaaggaaacggtgtctctcggctgtggctctgagtgcaaattgcatgggcggaaaggcgggggtggctgctcttcctggcaggcctgggccatcagcgaactgggccccgtgaggagggcgggagtgtggaggagggtgggcctctcacccaggctttctcggcccctctcctcagcttgcagagctggccagccccctccttagggggtgggc

SEQ ID NO: 15469 - DNA, 2294 bp, Homo sapiens
  source 1..2294: mol_type = unassigned DNA
cgagcgggactggctgggtcggctgggctgctggtgcgaggagccgcggggctgtgctcggcggccaaggggacagcgcgtgggtggccgaggatgctgcggggcggtagctccggcgcccctagctggtgactgctgcgccgtgcctcacacagccgaggcgggctcggcgcacagtcgctgctccgcgcgcgcgcccggcggcgctccaggtgctgacagcgcgagagagcgcggccctcaggagcaaggcgaatgtatgacaacatgtccacaatggtgtacataaaggaagacaagttggagaagcttacacaggatgaaattatttctaagacaaagcaagtaattcaggggctggaagctttgaagaatgagcacaattccattttacaaagtttgctggagacactgaagtgtttgaagaaagatgatgaaagtaatttggtggaggagaaatcaaacatgatccggaagtcactggagatgttggagctcggcctgagtgaggcacaggttatgatggctttgtcaaatcacctgaatgctgtggagtccgagaagcagaaactgcgtgcgcaggttcgtcgtctgtgccaggagaatcagtggctacgggatgaactggccaacacgcagcagaaactgcagaagagtgagcagtctgtggctcaactggaggaggagaagaagcatctggagtttatgaatcagctaaaaaaatatgatgacgacatttccccatccgaggacaaagacactgattctaccaaagagcctctggatgaccttttccccaatgatgaagacgacccagggcaaggaatccagcagcagcacagcagtgcagccgcggctgcccagcagggcggctacgagatccccgcgcggctgcggacgctccacaacctggtgatccagtacgcctcgcaggggcgctacgaggtagctgtgcccctctgcaagcaggccctggaggacctggagaagacttcaggacacgaccacccggacgtggccaccatgctcaacatcctggccttggtgtacagggatcagaataaatacaaagatgcagctaacctactgaatgatgccttggctattcgtgagaaaactttgggcaaagatcatcctgcggtggcggcgactttgaataaccttgcagtcctttatggtaaaagagggaagtacaaagaagcagagccgttgtgtaaaagagctctggaaatccgagaaaaggttttggggaaggatcaccccgatgttgccaagcagttaaataacttggccttactgtgccagaaccagggcaagtatgaagaagtagaatattattatcaaagagccctcgagatctaccagacaaaactgggacctgatgaccccaacgtggctaagacgaaaaataacctggcatcctgctatttgaaacaaggaaagttcaagcaagcagaaacactgtacaaagagattctcactcgtgcacatgaaagggagtttggttctgtagatgatgaaaataaacccatctggatgcatgctgaagaaagagaagaatgcaaaggaaagcaaaaggatgggacatcttttggagagtatggcggctggtacaaagcctgcaaagttgatagtccaactgttacaaccactctaaaaaaccttggggcactttacagacgtcaaggcaaatttgaagctgcagaaacgttagaagaagctgctatgaggtctcgtaaacagggtcttgacaatgttcacaaacagagggtggcagaagtgctcaatgaccctgagaacatggagaagcgcaggagccgtgagagcctcaacgtggacgtggtcaagtacgagagtggccctgacggaggggaggaagtgagtatgagcgtagagtggaacggggatggcactggatctttaaaacgcagtggttcctttagcaaactccgggcttccattagacgcagcagtgagaagctggttaggaagctgaagggaggaagttcacgagagagtgagccaaagaaccccggcatgaagcgtgccagctctctgaatgtccttaacgtgggtggcaaggctgctgaagatcgctttcaagaacgaaataattgtctggccgactcgcgagctctgagtgccagccacactgacctggcccactgagagccagcagggctaggtaacctgtcttgggagtgtgagaccgccccgccctgccacgcccctcaccgccctgcccggaggcgccagccgcactccttggcttcctttcctagatagtgacgtcc

SEQ ID NO: 15470 - DNA, 2524 bp, Homo sapiens
  source 1..2524: mol_type = unassigned DNA
cggccgagcgggactggctgggtcggctgggctgctggtgcgaggagccgcggggctgtgctcggcggccaaggggacagcgcgtgggtggccgaggatgctgcggggcggtagctccggcgcccctagctggtgactgctgcgccgtgcctcacacagccgaggcgggctcggcgcacagtcgctgctccgcgcgcgcgcccggcggcgctccaggtgctgacagcgcgagagagcgcggccctcaggagcaaggcgaatgtatgacaacatgtccacaatggtgtacataaaggaagacaagttggagaagcttacacaggatgaaattatttctaagacaaagcaagtaattcaggggctggaagctttgaagaatgagcacaattccattttacaaagtttgctggagacactgaagtgtttgaagaaagatgatgaaagtaatttggtggaggagaaatcaaacatgatccggaagtcactggagatgttggagctcggcctgagtgaggcacaggttatgatggctttgtcaaatcacctgaatgctgtggagtccgagaagcagaaactgcgtgcgcaggttcgtcgtctgtgccaggagaatcagtggctacgggatgaactggccaacacgcagcagaaactgcagaagagtgagcagtctgtggctcaactggaggaggagaagaagcatctggagtttatgaatcagctaaaaaaatatgatgacgacatttccccatccgaggacaaagacactgattctaccaaagagcctctggatgaccttttccccaatgatgaagacgacccagggcaaggaatccagcagcagcacagcagtgcagccgcggctgcccagcagggcggctacgagatccccgcgcggctgcggacgctccacaacctggtgatccagtacgcctcgcaggggcgctacgaggtagctgtgcccctctgcaagcaggccctggaggacctggagaagacttcaggacacgaccacccggacgtggccaccatgctcaacatcctggccttggtgtacagggatcagaataaatacaaagatgcagctaacctactgaatgatgccttggctattcgtgagaaaactttgggcaaagatcatcctgcggtggcggcgactttgaataaccttgcagtcctttatggtaaaagagggaagtacaaagaagcagagccgttgtgtaaaagagctctggaaatccgagaaaaggttttggggaaggatcaccccgatgttgccaagcagttaaataacttggccttactgtgccagaaccagggcaagtatgaagaagtagaatattattatcaaagagccctcgagatctaccagacaaaactgggacctgatgaccccaacgtggctaagacgaaaaataacctggcatcctgctatttgaaacaaggaaagttcaagcaagcagaaacactgtacaaagagattctcactcgtgcacatgaaagggagtttggttctgtagatgatgaaaataaacccatctggatgcatgctgaagaaagagaagaatgcaaaggaaagcaaaaggatgggacatcttttggagagtatggcggctggtacaaagcctgcaaagttgatagtccaactgttacaaccactctaaaaaaccttggggcactttacagacgtcaaggcaaatttgaagctgcagaaacgttagaagaagctgctatgaggtctcgtaaacagggtcttgacaatgttcacaaacagagggtggcagaagtgctcaatgaccctgagaacatggagaagcgcaggagccgtgagagcctcaacgtggacgtggtcaagtacgagagtggccctgacggaggggaggaagtgagtatgagcgtagagtggaacggggatggcactggatctttaaaacgcagtggttcctttagcaaactccgggcttccattagacgcagcagtgagaagctggttaggaagctgaagggaggaagttcacgagagagtgagccaaagaaccccggcatgaagcgtgccagctctctgaatgtccttaacgtgggtggcaaggctgctgaagatcgctttcaaggcgtctctggccgagcctctttttgtggaaaacgacagcagcagcagtggcctggaagacgccaccgctaactgaccccgacctggccccgctccaggatgggactgccgagtgtggcccggagctggcccgggacagccagggcggcagggagggcccctggccgggagccgcagcgctcactcatttctcctgcgtctgtgtgcataggacatgatactaataaccacacggctggcgtgaccttggggctggggctgggcctaagctggtgccctggtgcggcgtggtctctcccaggagacctggggcatgagctgggcccacggctcccttcccatgtgtaacttcctcacgttgtgtgcgataacgtattttattgtacatttttttaaattaaaagtttatatgcctta

SEQ ID NO: 15471 - DNA, 2271 bp, Homo sapiens
  source 1..2271: mol_type = unassigned DNA
cggccgagcgggactggctgggtcggctgggctgctggtgcgaggagccgcggggctgtgctcggcggccaaggggacagcgcgtgggtggccgaggatgctgcggggcggtagctccggcgcccctagctggtgactgctgcgccgtgcctcacacagccgaggcgggctcggcgcacagtcgctgctccgcgcgcgcgcccggcggcgctccaggtgctgacagcgcgagagagcgcggccctcaggagcaaggcgaatgtatgacaacatgtccacaatggtgtacataaaggaagacaagttggagaagcttacacaggatgaaattatttctaagacaaagcaagtaattcaggggctggaagctttgaagaatgagcacaattccattttacaaagtttgctggagacactgaagtgtttgaagaaagatgatgaaagtaatttggtggaggagaaatcaaacatgatccggaagtcactggagatgttggagctcggcctgagtgaggcacaggttatgatggctttgtcaaatcacctgaatgctgtggagtccgagaagcagaaactgcgtgcgcaggttcgtcgtctgtgccaggagaatcagtggctacgggatgaactggccaacacgcagcagaaactgcagaagagtgagcagtctgtggctcaactggaggaggagaagaagcatctggagtttatgaatcagctaaaaaaatatgatgacgacatttccccatccgaggacaaagacactgattctaccaaagagcctctggatgaccttttccccaatgatgaagacgacccagggcaaggaatccagcagcagcacagcagtgcagccgcggctgcccagcagggcggctacgagatccccgcgcggctgcggacgctccacaacctggtgatccagtacgcctcgcaggggcgctacgaggtagctgtgcccctctgcaagcaggccctggaggacctggagaagacttcaggacacgaccacccggacgtggccaccatgctcaacatcctggccttggtgtacagggatcagaataaatacaaagatgcagctaacctactgaatgatgccttggctattcgtgagaaaactttgggcaaagatcatcctgcggtggcggcgactttgaataaccttgcagtcctttatggtaaaagagggaagtacaaagaagcagagccgttgtgtaaaagagctctggaaatccgagaaaaggttttggggaaggatcaccccgatgttgccaagcagttaaataacttggccttactgtgccagaaccagggcaagtatgaagaagtagaatattattatcaaagagccctcgagatctaccagacaaaactgggacctgatgaccccaacgtggctaagacgaaaaataacctggcatcctgctatttgaaacaaggaaagttcaagcaagcagaaacactgtacaaagagattctcactcgtgcacatgaaagggagtttggttctgtagatgatgaaaataaacccatctggatgcatgctgaagaaagagaagaatgcaaaggaaagcaaaaggatgggacatcttttggagagtatggcggctggtacaaagcctgcaaagttgatagtccaactgttacaaccactctaaaaaaccttggggcactttacagacgtcaaggcaaatttgaagctgcagaaacgttagaagaagctgctatgaggtctcgtaaacagggtcttgacaatgttcacaaacagagggtggcagaagtgctcaatgaccctgagaacatggagaagcgcaggagccgtgagagcctcaacgtggacgtggtcaagtacgagagtggccctgacggaggggaggaagatggcactggatctttaaaacgcagtggttcctttagcaaactccgggcttccattagacgcagcagtgagaagctggttaggaagctgaagggaggaagttcacgagagagtgagccaaagaaccccggcatgaagcgtgccagctctctgaatgtccttaacgtgggtggcaaggctgctgaagatcgctttcaagaacgaaataattgtctggccgactcgcgagctctgagtgccagccacactgacctggcccactgagagccagcagggctaggtaacctgtcttgggagtgtgagaccgccccgccctgccacgcccctcaccgccctgcccggaggcgccagccgcactccttggcttcctttcctagatagtgacgtcc

SEQ ID NO: 15472 - DNA, 2393 bp, Homo sapiens
  source 1..2393: mol_type = unassigned DNA
ggcggggcgccggggggagcaacactgagacgccattttcggcggcgggagcggcgcaggcggccgagcgggactggctgggtcggctgggctgctggtgcgaggagccgcggggctgtgctcggcggccaaggggacagcgcgtgggtggccgaggatgctgcggggcggtagctccggcgcccctagctggtgactgctgcgccgtgcctcacacagccgaggcgggctcggcgcacagtcgctgctccgcgcgcgcgcccggcggcgctccaggtgctgacagcgcgagagagcgcggccctcaggagcaaggcgaatgtatgacaacatgtccacaatggtgtacataaaggaagacaagttggagaagcttacacaggatgaaattatttctaagacaaagcaagtaattcaggggctggaagctttgaagaatgagcacaattccattttacaaagtttgctggagacactgaagtgtttgaagaaagatgatgaaagtaatttggtggaggagaaatcaaacatgatccggaagtcactggagatgttggagctcggcctgagtgaggcacaggttatgatggctttgtcaaatcacctgaatgctgtggagtccgagaagcagaaactgcgtgcgcaggttcgtcgtctgtgccaggagaatcagtggctacgggatgaactggccaacacgcagcagaaactgcagaagagtgagcagtctgtggctcaactggaggaggagaagaagcatctggagtttatgaatcagctaaaaaaatatgatgacgacatttccccatccgaggacaaagacactgattctaccaaagagcctctggatgaccttttccccaatgatgaagacgacccagggcaaggaatccagcagcagcacagcagtgcagccgcggctgcccagcagggcggctacgagatccccgcgcggctgcggacgctccacaacctggtgatccagtacgcctcgcaggggcgctacgaggtagctgtgcccctctgcaagcaggccctggaggacctggagaagacttcaggacacgaccacccggacgtggccaccatgctcaacatcctggccttggtgtacagggatcagaataaatacaaagatgcagctaacctactgaatgatgccttggctattcgtgagaaaactttgggcaaagatcatcctgcggtggcggcgactttgaataaccttgcagtcctttatggtaaaagagggaagtacaaagaagcagagccgttgtgtaaaagagctctggaaatccgagaaaaggttttggggaaggatcaccccgatgttgccaagcagttaaataacttggccttactgtgccagaaccagggcaagtatgaagaagtagaatattattatcaaagagccctcgagatctaccagacaaaactgggacctgatgaccccaacgtggctaagacgaaaaataacctggcatcctgctatttgaaacaaggaaagttcaagcaagcagaaacactgtacaaagagattctcactcgtgcacatgaaagggagtttggttctgtagatgatgaaaataaacccatctggatgcatgctgaagaaagagaagaatgcaaaggaaagcaaaaggatgggacatcttttggagagtatggcggctggtacaaagcctgcaaagttgatagtccaactgttacaaccactctaaaaaaccttggggcactttacagacgtcaaggcaaatttgaagctgcagaaacgttagaagaagctgctatgaggtctcgtaaacagggtcttgacaatgttcacaaacagagggtggcagaagtgctcaatgaccctgagaacatggagaagcgcaggagccgtgagagcctcaacgtggacgtggtcaagtacgagagtggccctgacggaggggaggaagtgagtatgagcgtagagtggaacgggggcgtctctggccgagcctctttttgtggaaaacgacagcagcagcagtggcctggaagacgccaccgctaactgaccccgacctggccccgctccaggatgggactgccgagtgtggcccggagctggcccgggacagccagggcggcagggagggcccctggccgggagccgcagcgctcactcatttctcctgcgtctgtgtgcataggacatgatactaataaccacacggctggcgtgaccttggggctggggctgggcctaagctggtgccctggtgcggcgtggtctctcccaggagacctggggcatgagctgggcccacggctcccttcccatgtgtaacttcctcacgttgtgtgcgataacgtattttattgtacatttttttaaattaaaagtttatatgccttatgcttta

SEQ ID NO: 15473 - DNA, 2322 bp, Homo sapiens
  source 1..2322: mol_type = unassigned DNA
gagacgccattttcggcggcgggagcggcgcaggcggccgagcgggactggctgggtcggctgggctgctggtgcgaggagccgcggggctgtgctcggcggccaaggggacagcgcgtgggtggccgaggatgctgcggggcggtagctccggcgcccctagctggtgactgctgcgccgtgcctcacacagccgaggcgggctcggcgcacagtcgctgctccgcgcgcgcgcccggcggcgctccaggtgctgacagcgcgagagagcgcggccctcaggagcaaggcgaatgtatgacaacatgtccacaatggtgtacataaaggaagacaagttggagaagcttacacaggatgaaattatttctaagacaaagcaagtaattcaggggctggaagctttgaagaatgagcacaattccattttacaaagtttgctggagacactgaagtgtttgaagaaagatgatgaaagtaatttggtggaggagaaatcaaacatgatccggaagtcactggagatgttggagctcggcctgagtgaggcacaggttatgatggctttgtcaaatcacctgaatgctgtggagtccgagaagcagaaactgcgtgcgcaggttcgtcgtctgtgccaggagaatcagtggctacgggatgaactggccaacacgcagcagaaactgcagaagagtgagcagtctgtggctcaactggaggaggagaagaagcatctggagtttatgaatcagctaaaaaaatatgatgacgacatttccccatccgaggacaaagacactgattctaccaaagagcctctggatgaccttttccccaatgatgaagacgacccagggcaaggaatccagcagcagcacagcagtgcagccgcggctgcccagcagggcggctacgagatccccgcgcggctgcggacgctccacaacctggtgatccagtacgcctcgcaggggcgctacgaggtagctgtgcccctctgcaagcaggccctggaggacctggagaagacttcaggacacgaccacccggacgtggccaccatgctcaacatcctggccttggtgtacagggatcagaataaatacaaagatgcagctaacctactgaatgatgccttggctattcgtgagaaaactttgggcaaagatcatcctgcggtggcggcgactttgaataaccttgcagtcctttatggtaaaagagggaagtacaaagaagcagagccgttgtgtaaaagagctctggaaatccgagaaaaggttttggggaaggatcaccccgatgttgccaagcagttaaataacttggccttactgtgccagaaccagggcaagtatgaagaagtagaatattattatcaaagagccctcgagatctaccagacaaaactgggacctgatgaccccaacgtggctaagacgaaaaataacctggcatcctgctatttgaaacaaggaaagttcaagcaagcagaaacactgtacaaagagattctcactcgtgcacatgaaagggagtttggttctgtagatgatgaaaataaacccatctggatgcatgctgaagaaagagaagaatgcaaaggaaagcaaaaggatgggacatcttttggagagtatggcggctggtacaaagcctgcaaagttgatagtccaactgttacaaccactctaaaaaaccttggggcactttacagacgtcaaggcaaatttgaagctgcagaaacgttagaagaagctgctatgaggtctcgtaaacagcgaagtatctcagaaatacctaagaaaatcttaagtgctaatgggtcaaaccattttcccctgcctggctcacagggtcttgacaatgttcacaaacagagggtggcagaagtgctcaatgaccctgagaacatggagaagcgcaggagccgtgagagcctcaacgtggacgtggtcaagtacgagagtggccctgacggaggggaggaaatgaggaaaatgaagctcgggctggttaactgacttgctcagcgtcccatggtgagtccgagcgggcggggcgcaggccctgccgtctggcgcttctgtcgagacgtcggctttccaacctggcaggacccaggacgcattgctgcctgtggaaattaattttcttttggattatcaactgcatgtttaaaatgggctgtagacttttaaagtccgtggtttcctaaagtttctgaaatgtctaaaatgtgtttttaagagaatgaaagtcatacctgtagcctttattttggtccctatgtttttcattgcataatctccttatatacag

SEQ ID NO: 15474 - DNA, 2558 bp, Homo sapiens
  source 1..2558: mol_type = unassigned DNA
gcggcgcaggcggccgagcgggactggctgggtcggctgggctgctggtgcgaggagccgcggggctgtgctcggcggccaaggggacagcgcgtgggtggccgaggatgctgcggggcggtagctccggcgcccctagctggtgactgctgcgccgtgcctcacacagccgaggcgggctcggcgcacagtcgctgctccgcgcgcgcgcccggcggcgctccaggtgctgacagcgcgagagagcgcggccctcaggagcaaggcgaatgtatgacaacatgtccacaatggtgtacataaaggaagacaagttggagaagcttacacaggatgaaattatttctaagacaaagcaagtaattcaggggctggaagctttgaagaatgagcacaattccattttacaaagtttgctggagacactgaagtgtttgaagaaagatgatgaaagtaatttggtggaggagaaatcaaacatgatccggaagtcactggagatgttggagctcggcctgagtgaggcacaggttatgatggctttgtcaaatcacctgaatgctgtggagtccgagaagcagaaactgcgtgcgcaggttcgtcgtctgtgccaggagaatcagtggctacgggatgaactggccaacacgcagcagaaactgcagaagagtgagcagtctgtggctcaactggaggaggagaagaagcatctggagtttatgaatcagctaaaaaaatatgatgacgacatttccccatccgaggacaaagacactgattctaccaaagagcctctggatgaccttttccccaatgatgaagacgacccagggcaaggaatccagcagcagcacagcagtgcagccgcggctgcccagcagggcggctacgagatccccgcgcggctgcggacgctccacaacctggtgatccagtacgcctcgcaggggcgctacgaggtagctgtgcccctctgcaagcaggccctggaggacctggagaagacttcaggacacgaccacccggacgtggccaccatgctcaacatcctggccttggtgtacagggatcagaataaatacaaagatgcagctaacctactgaatgatgccttggctattcgtgagaaaactttgggcaaagatcatcctgcggtggcggcgactttgaataaccttgcagtcctttatggtaaaagagggaagtacaaagaagcagagccgttgtgtaaaagagctctggaaatccgagaaaaggttttggggaaggatcaccccgatgttgccaagcagttaaataacttggccttactgtgccagaaccagggcaagtatgaagaagtagaatattattatcaaagagccctcgagatctaccagacaaaactgggacctgatgaccccaacgtggctaagacgaaaaataacctggcatcctgctatttgaaacaaggaaagttcaagcaagcagaaacactgtacaaagagattctcactcgtgcacatgaaagggagtttggttctgtagatgatgaaaataaacccatctggatgcatgctgaagaaagagaagaatgcaaaggaaagcaaaaggatgggacatcttttggagagtatggcggctggtacaaagcctgcaaagttgatagtccaactgttacaaccactctaaaaaaccttggggcactttacagacgtcaaggcaaatttgaagctgcagaaacgttagaagaagctgctatgaggtctcgtaaacagggtcttgacaatgttcacaaacagagggtggcagaagtgctcaatgaccctgagaacatggagaagcgcaggagccgtgagagcctcaacgtggacgtggtcaagtacgagagtggccctgacggaggggaggaagtgagtatgagcgtagagtggaacgggatgaggaaaatgaagctcgggctggttaactgacttgctcagcgtcccatggcctagccgcccgtgactctcacactgtctcctgcatgacgggtggcgcctcccgcagcttcccttctctctccagtgctgcccgctgtgtctagcagcctctaggatcttgtcagagctgcacctctctgtgaactggccattcctttcggtgctgctgtcctttttgggggggttcctgatttctgtatacatgtagctttgccagatatgtacttagtaatataaactgtattaataaaatccatttactgtgtaatacacgagtttaaaaattaagagcgattagctgttcactttggtaacaggtagttaagtgtcacacaaggtgttgttgcaatggcatgacggtgacctgttgacgtaactaagccttacagcaaggcatgtgccgcacgtgctccgtggtacttagagccctgggggccccgctcggactccgggtctccctaggatatgccccagtagcatttgctgtgtagtctgtgtgtgaaatttgggcattctgcttttctctactaatcttgaagtgctcagtgatttgtgtatttgtgtctttctaacttctaataaactcactccgactga

SEQ ID NO: 15475 - DNA, 2063 bp, Homo sapiens
  source 1..2063: mol_type = unassigned DNA
ggggggagcaacactgagacgccattttcggcggcgggagcggcgcaggcggccgagcgggactggctgggtcggctgggctgctggtgcgaggagccgcggggctgtgctcggcggccaaggggacagcgcgtgggtggccgaggatgctgcggggcggtagctccggcgcccctagctggtgactgctgcgccgtgcctcacacagccgaggcgggctcggcgcacagtcgctgctccgcgcgcgcgcccggcggcgctccaggtgctgacagcgcgagagagcgcggccctcaggagcaaggcgaatgtatgacaacatgtccacaatggtgtacataaaggaagacaagttggagaagcttacacaggatgaaattatttctaagacaaagcaagtaattcaggggctggaagctttgaagaatgagcacaattccattttacaaagtttgctggagacactgaagtgtttgaagaaagatgatgaaagtaatttggtggaggagaaatcaaacatgatccggaagtcactggagatgttggagctcggcctgagtgaggcacaggttatgatggctttgtcaaatcacctgaatgctgtggagtccgagaagcagaaactgcgtgcgcaggttcgtcgtctgtgccaggagaatcagtggctacgggatgaactggccaacacgcagcagaaactgcagaagagtgagcagtctgtggctcaactggaggaggagaagaagcatctggagtttatgaatcagctaaaaaaatatgatgacgacatttccccatccgaggacaaagacactgattctaccaaagagcctctggatgaccttttccccaatgatgaagacgacccagggcaaggaatccagcagcagcacagcagtgcagccgcggctgcccagcagggcggctacgagatccccgcgcggctgcggacgctccacaacctggtgatccagtacgcctcgcaggggcgctacgaggtagctgtgcccctctgcaagcaggccctggaggacctggagaagacttcaggacacgaccacccggacgtggccaccatgctcaacatcctggccttggtgtacagggatcagaataaatacaaagatgcagctaacctactgaatgatgccttggctattcgtgagaaaactttgggcaaagatcatcctgcggtggcggcgactttgaataaccttgcagtcctttatggtaaaagagggaagtacaaagaagcagagccgttgtgtaaaagagctctggaaatccgagaaaaggttttggggaaggatcaccccgatgttgccaagcagttaaataacttggccttactgtgccagaaccagggcaagtatgaagaagtagaatattattatcaaagagccctcgagatctaccagacaaaactgggacctgatgaccccaacgtggctaagacgaaaaataacctggcatcctgctatttgaaacaaggaaagttcaagcaagcagaaacactgtacaaagagattctcactcgtgcacatgaaagggagtttggttctgtagatgatgaaaataaacccatctggatgcatgctgaagaaagagaagaatgcaaaggaaagcaaaaggatgggacatcttttggagagtatggcggctggtacaaagcctgcaaagttgatagtccaactgttacaaccactctaaaaaaccttggggcactttacagacgtcaaggcaaatttgaagctgcagaaacgttagaagaagctgctatgaggtctcgtaaacagggtcttgacaatgttcacaaacagagggtggcagaagtgctcaatgaccctgagaacatggagaagcgcaggagccgtgagagcctcaacgtggacgtggtcaagtacgagagtggccctgacggaggggaggaaatgaagcgtgccagctctctgaatgtccttaacgtgggtggcaaggctgctgaagatcgctttcaagaacgaaataattgtctggccgactcgcgagctctgagtgccagccacactgacctggcccactga

SEQ ID NO: 15476 - DNA, 2453 bp, Homo sapiens
  source 1..2453: mol_type = unassigned DNA
cgagcgggactggctgggtcggctgggctgctggtgcgaggagccgcggggctgtgctcggcggccaaggggacagcgcgtgggtggccgaggatgctgcggggcggtagctccggcgcccctagctggtgactgctgcgccgtgcctcacacagccgaggcgggctcggcgcacagtcgctgctccgcgcgcgcgcccggcggcgctccaggtgctgacagcgcgagagagcgcggccctcaggagcaaggcgaatgtatgacaacatgtccacaatggtgtacataaaggaagacaagttggagaagcttacacaggatgaaattatttctaagacaaagcaagtaattcaggggctggaagctttgaagaatgagcacaattccattttacaaagtttgctggagacactgaagtgtttgaagaaagatgatgaaagtaatttggtggaggagaaatcaaacatgatccggaagtcactggagatgttggagctcggcctgagtgaggcacaggttatgatggctttgtcaaatcacctgaatgctgtggagtccgagaagcagaaactgcgtgcgcaggttcgtcgtctgtgccaggagaatcagtggctacgggatgaactggccaacacgcagcagaaactgcagaagagtgagcagtctgtggctcaactggaggaggagaagaagcatctggagtttatgaatcagctaaaaaaatatgatgacgacatttccccatccgaggacaaagacactgattctaccaaagagcctctggatgaccttttccccaatgatgaagacgacccagggcaaggaatccagcagcagcacagcagtgcagccgcggctgcccagcagggcggctacgagatccccgcgcggctgcggacgctccacaacctggtgatccagtacgcctcgcaggggcgctacgaggtagctgtgcccctctgcaagcaggccctggaggacctggagaagacttcaggacacgaccacccggacgtggccaccatgctcaacatcctggccttggtgtacagggatcagaataaatacaaagatgcagctaacctactgaatgatgccttggctattcgtgagaaaactttgggcaaagatcatcctgcggtggcggcgactttgaataaccttgcagtcctttatggtaaaagagggaagtacaaagaagcagagccgttgtgtaaaagagctctggaaatccgagaaaaggttttggggaaggatcaccccgatgttgccaagcagttaaataacttggccttactgtgccagaaccagggcaagtatgaagaagtagaatattattatcaaagagccctcgagatctaccagacaaaactgggacctgatgaccccaacgtggctaagacgaaaaataacctggcatcctgctatttgaaacaaggaaagttcaagcaagcagaaacactgtacaaagagattctcactcgtgcacatgaaagggagtttggttctgtagatgatgaaaataaacccatctggatgcatgctgaagaaagagaagaatgcaaaggaaagcaaaaggatgggacatcttttggagagtatggcggctggtacaaagcctgcaaagttgatagtccaactgttacaaccactctaaaaaaccttggggcactttacagacgtcaaggcaaatttgaagctgcagaaacgttagaagaagctgctatgaggtctcgtaaacagggtcttgacaatgttcacaaacagagggtggcagaagtgctcaatgaccctgagaacatggagaagcgcaggagccgtgagagcctcaacgtggacgtggtcaagtacgagagtggccctgacggaggggaggaagtgagtatgagcgtagagtggaacggggatggcactggatctttaaaacgcagtggttcctttagcaaactccgggcttccattagacgcagcagtgagaagctggttaggaagctgaagggaggaagttcacgagagagtgagccaaagaaccccggggcgtctctggccgagcctctttttgtggaaaacgacagcagcagcagtggcctggaagacgccaccgctaactgaccccgacctggccccgctccaggatgggactgccgagtgtggcccggagctggcccgggacagccagggcggcagggagggcccctggccgggagccgcagcgctcactcatttctcctgcgtctgtgtgcataggacatgatactaataaccacacggctggcgtgaccttggggctggggctgggcctaagctggtgccctggtgcggcgtggtctctcccaggagacctggggcatgagctgggcccacggctcccttcccatgtgtaacttcctcacgttgtgtgcgataacgtattttattgtacatttttttaaattaaaagtttatatgcctta

SEQ ID NO: 15477 - DNA, 3135 bp, Homo sapiens
  source 1..3135: mol_type = unassigned DNA
cggccgagcgggactggctgggtcggctgggctgctggtgcgaggagccgcggggctgtgctcggcggccaaggggacagcgcgtgggtggccgaggatgctgcggggcggtagctccggcgcccctagctggtgactgctgcgccgtgcctcacacagccgaggcgggctcggcgcacagtcgctgctccgcgcgcgcgcccggcggcgctccaggtgctgacagcgcgagagagcgcggccctcaggagcaaggcgaatgtatgacaacatgtccacaatggtgtacataaaggaagacaagttggagaagcttacacaggatgaaattatttctaagacaaagcaagtaattcaggggctggaagctttgaagaatgagcacaattccattttacaaagtttgctggagacactgaagtgtttgaagaaagatgatgaaagtaatttggtggaggagaaatcaaacatgatccggaagtcactggagatgttggagctcggcctgagtgaggcacaggttatgatggctttgtcaaatcacctgaatgctgtggagtccgagaagcagaaactgcgtgcgcaggttcgtcgtctgtgccaggagaatcagtggctacgggatgaactggccaacacgcagcagaaactgcagaagagtgagcagtctgtggctcaactggaggaggagaagaagcatctggagtttatgaatcagctaaaaaaatatgatgacgacatttccccatccgaggacaaagacactgattctaccaaagagcctctggatgaccttttccccaatgatgaagacgacccagggcaaggaatccagcagcagcacagcagtgcagccgcggctgcccagcagggcggctacgagatccccgcgcggctgcggacgctccacaacctggtgatccagtacgcctcgcaggggcgctacgaggtagctgtgcccctctgcaagcaggccctggaggacctggagaagacttcaggacacgaccacccggacgtggccaccatgctcaacatcctggccttggtgtacagggatcagaataaatacaaagatgcagctaacctactgaatgatgccttggctattcgtgagaaaactttgggcaaagatcatcctgcggtggcggcgactttgaataaccttgcagtcctttatggtaaaagagggaagtacaaagaagcagagccgttgtgtaaaagagctctggaaatccgagaaaaggttttggggaaggatcaccccgatgttgccaagcagttaaataacttggccttactgtgccagaaccagggcaagtatgaagaagtagaatattattatcaaagagccctcgagatctaccagacaaaactgggacctgatgaccccaacgtggctaagacgaaaaataacctggcatcctgctatttgaaacaaggaaagttcaagcaagcagaaacactgtacaaagagattctcactcgtgcacatgaaagggagtttggttctgtagatgatgaaaataaacccatctggatgcatgctgaagaaagagaagaatgcaaaggaaagcaaaaggatgggacatcttttggagagtatggcggctggtacaaagcctgcaaagttgatagtccaactgttacaaccactctaaaaaaccttggggcactttacagacgtcaaggcaaatttgaagctgcagaaacgttagaagaagctgctatgaggtctcgtaaacagggtcttgacaatgttcacaaacagagggtggcagaagtgctcaatgaccctgagaacatggagaagcgcaggagccgtgagagcctcaacgtggacgtggtcaagtacgagagtggccctgacggaggggaggaagtgagtatgagcgtagagtggaacgggatgaggaaaatgaagctcgggctggttaactgacttgctcagcgtcccatggtgagtccgagcgggcggggcgcaggccctgccgtctggcgcttctgtcgagacgtcggctttccaacctggcaggacccaggacgcattgctgcctgtggaaattaattttcttttggattatcaactgcatgtttaaaatgggctgtagacttttaaagtccgtggtttcctaaagtttctgaaatgtctaaaatgtgtttttaagagaatgaaagtcatacctgtagcctttattttggtccctatgtttttcattgcataatctccttatatacagttacttgtaaagccttttacaccaagtgtcaaggagatttctaatacgttgccaatctttacgcttaaagtgttgacatttactttgatgaccattgggaatggaccagtctggattctgtgaaatgcaccatgaggcccagcacctgctttatgctggactggtagaagcaggcagaaggtcatcccagtcctaaagccactcagaaggctgctgagacttgtgacctagaaatactgtaagccaggctgttatgcagagcctgttgcctttcctcgccgcggtttcacgtgggttttctctctcctttctgtctgacaggcctagccgcccgtgactctcacactgtctcctgcatgacgggtggcgcctcccgcagcttcccttctctctccagtgctgcccgctgtgtctagcagcctctaggatcttgtcagagctgcacctctctgtgaactggccattcctttcggtgctgctgtcctttttgggggggttcctgatttctgtatacatgtagctttgccagatatgtacttagtaatataaactgtattaataaaatccatttactgtgtaatacacgagtttaaaaattaagagcgattagctgttcactttggtaacaggtagttaagtgtcacacaaggtgttgttgcaatggcatgacggtgacctgttgacgtaactaagccttacagcaaggcatgtgccgcacgtgctccgtggtacttagagccctgggggccccgctcggactccgggtctccctaggatatgccccagtagcatttgctgtgtagtctgtgtgtgaaatttgggcattctgcttttctctactaatcttgaagtgctcagtgatttgtgtatttgtgtctttctaacttctaataaa

SEQ ID NO: 15478 - DNA, 976 bp, Homo sapiens
  source 1..976: mol_type = unassigned DNA
atgaaaataaacccatctggatgcatgctgaagaaagagaagaatgcaaaggaaagcaaaaggatgggacatcttttggagagtatggcggctggtacaaagcctgcaaagttgatagtccaactgttacaaccactctaaaaaaccttggggcactttacagacgtcaaggcaaatttgaagctgcagaaacgttagaagaagctgctatgaggtctcgtaaacagggtcttgacaatgttcacaaacagagggtggcagaagtgctcaatgaccctgagaacatggagaagcgcaggagccgtgagagcctcaacgtggacgtggtcaagtacgagagtggccctgacggaggggaggaaatgaggaaaatgaagctcgggctggttaactgacttgctcagcgtcccatggcctagccgcccgtgactctcacactgtctcctgcatgacgggtggcgcctcccgcagcttcccttctctctccagtgctgcccgctgtgtctagcagcctctaggatcttgtcagagctgcacctctctgtgaactggccattcctttcggtgctgctgtcctttttgggggggttcctgatttctgtatacatgtagctttgccagatatgtacttagtaatataaactgtattaataaaatccatttactgtgtaatacacgagtttaaaaattaagagcgattagctgttcactttggtaacaggtagttaagtgtcacacaaggtgttgttgcaatggcatgacggtgacctgttgacgtaactaagccttacagcaaggcatgtgccgcacgtgctccgtggtacttagagccctgggggccccgctcggactccgggtctccctaggatatgccccagtagcatttgctgtgtagtctgtgtgtgaaatttgggcattctgcttttctctactaatcttgaagtgctcagtgatttgtgtatttgtgtctttctaa

SEQ ID NO: 15479 - DNA, 2467 bp, Homo sapiens
  source 1..2467: mol_type = unassigned DNA
cggccgagcgggactggctgggtcggctgggctgctggtgcgaggagccgcggggctgtgctcggcggccaaggggacagcgcgtgggtggccgaggatgctgcggggcggtagctccggcgcccctagctggtgactgctgcgccgtgcctcacacagccgaggcgggctcggcgcacagtcgctgctccgcgcgcgcgcccggcggcgctccaggtgctgacagcgcgagagagcgcggccctcaggagcaaggcgaatgtatgacaacatgtccacaatggtgtacataaaggaagacaagttggagaagcttacacaggatgaaattatttctaagacaaagcaagtaattcaggggctggaagctttgaagaatgagcacaattccattttacaaagtttgctggagacactgaagtgtttgaagaaagatgatgaaagtaatttggtggaggagaaatcaaacatgatccggaagtcactggagatgttggagctcggcctgagtgaggcacaggttatgatggctttgtcaaatcacctgaatgctgtggagtccgagaagcagaaactgcgtgcgcaggttcgtcgtctgtgccaggagaatcagtggctacgggatgaactggccaacacgcagcagaaactgcagaagagtgagcagtctgtggctcaactggaggaggagaagaagcatctggagtttatgaatcagctaaaaaaatatgatgacgacatttccccatccgaggacaaagacactgattctaccaaagagcctctggatgaccttttccccaatgatgaagacgacccagggcaaggaatccagcagcagcacagcagtgcagccgcggctgcccagcagggcggctacgagatccccgcgcggctgcggacgctccacaacctggtgatccagtacgcctcgcaggggcgctacgaggtagctgtgcccctctgcaagcaggccctggaggacctggagaagacttcaggacacgaccacccggacgtggccaccatgctcaacatcctggccttggtgtacagggatcagaataaatacaaagatgcagctaacctactgaatgatgccttggctattcgtgagaaaactttgggcaaagatcatcctgcggtggcggcgactttgaataaccttgcagtcctttatggtaaaagagggaagtacaaagaagcagagccgttgtgtaaaagagctctggaaatccgagaaaaggttttggggaaggatcaccccgatgttgccaagcagttaaataacttggccttactgtgccagaaccagggcaagtatgaagaagtagaatattattatcaaagagccctcgagatctaccagacaaaactgggacctgatgaccccaacgtggctaagacgaaaaataacctggcatcctgctatttgaaacaaggaaagttcaagcaagcagaaacactgtacaaagagattctcactcgtgcacatgaaagggagtttggttctgtagatgatgaaaataaacccatctggatgcatgctgaagaaagagaagaatgcaaaggaaagcaaaaggatgggacatcttttggagagtatggcggctggtacaaagcctgcaaagttgatagtccaactgttacaaccactctaaaaaaccttggggcactttacagacgtcaaggcaaatttgaagctgcagaaacgttagaagaagctgctatgaggtctcgtaaacagggtcttgacaatgttcacaaacagagggtggcagaagtgctcaatgaccctgagaacatggagaagcgcaggagccgtgagagcctcaacgtggacgtggtcaagtacgagagtggccctgacggaggggaggaagatggcactggatctttaaaacgcagtggttcctttagcaaactccgggcttccattagacgcagcagtgagaagctggttaggaagctgaagggaggaagttcacgagagagtgagccaaagaaccccggcatgaagcgtgccagctctctgaatgtccttaacgtgggtggcaaggctgctgaagatcgctttcaaggcgtctctggccgagcctctttttgtggaaaacgacagcagcagcagtggcctggaagacgccaccgctaactgaccccgacctggccccgctccaggatgggactgccgagtgtggcccggagctggcccgggacagccagggcggcagggagggcccctggccgggagccgcagcgctcactcatttctcctgcgtctgtgtgcataggacatgatactaataaccacacggctggcgtgaccttggggctggggctgggcctaagctggtgccctggtgcggcgtggtctctcccaggagacctggggcatgagctgggcccacggctcccttcccatgtgtaacttcctcacgttgtgtgcgataacgtattttattgtaca

SEQ ID NO: 15480 - DNA, 540 bp, Homo sapiens
  source 1..540: mol_type = unassigned DNA
ataattcattcactcgcctcccactgggagtccacaatggcctaatgcacgtttcaagctcttggtttctatcaaacggctcgctcaagaatgtatgacaacatgtccacaatggtgtacataaaggaagacaagttggagaagcttacacaggatgaaattatttctaagacaaagcaagtaattcaggggctggaagctttgaagaatgagcacaattccattttacaaagtttgctggagacactgaagtgtttgaagaaagatgatgaaagtaatttggtggaggagaaatcaaacatgatccggaagtcactggagatgttggagctcggcctgagtgaggcacaggttatgatggctttgtcaaatcacctgaatgctgtggagtccgagaagcagaaactgcgtgcgcaggttcgtcgtctgtgccaggagaatcagtggctacgggatgaactggccaacacgcagcagaaactgcagaagagtgagcagtctgtggctcaactggaggaggagaagaagcatctggagttt

SEQ ID NO: 15481 - DNA, 2265 bp, Homo sapiens
  source 1..2265: mol_type = unassigned DNA
cgagcgggactggctgggtcggctgggctgctggtgcgaggagccgcggggctgtgctcggcggccaaggggacagcgcgtgggtggccgaggatgctgcggggcggtagctccggcgcccctagctggtgactgctgcgccgtgcctcacacagccgaggcgggctcggcgcacagtcgctgctccgcgcgcgcgcccggcggcgctccaggtgctgacagcgcgagagagcgcggccctcaggagcaaggcgaatgtatgacaacatgtccacaatggtgtacataaaggaagacaagttggagaagcttacacaggatgaaattatttctaagacaaagcaagtaattcaggggctggaagctttgaagaatgagcacaattccattttacaaagtttgctggagacactgaagtgtttgaagaaagatgatgaaagtaatttggtggaggagaaatcaaacatgatccggaagtcactggagatgttggagctcggcctgagtgaggcacaggttatgatggctttgtcaaatcacctgaatgctgtggagtccgagaagcagaaactgcgtgcgcaggttcgtcgtctgtgccaggagaatcagtggctacgggatgaactggccaacacgcagcagaaactgcagaagagtgagcagtctgtggctcaactggaggaggagaagaagcatctggagtttatgaatcagctaaaaaaatatgatgacgacatttccccatccgaggacaaagacactgattctaccaaagagcctctggatgaccttttccccaatgatgaagacgacccagggcaaggaatccagcagcagcacagcagtgcagccgcggctgcccagcagggcggctacgagatccccgcgcggctgcggacgctccacaacctggtgatccagtacgcctcgcaggggcgctacgaggtagctgtgcccctctgcaagcaggccctggaggacctggagaagacttcaggacacgaccacccggacgtggccaccatgctcaacatcctggccttggtgtacagggatcagaataaatacaaagatgcagctaacctactgaatgatgccttggctattcgtgagaaaactttgggcaaagatcatcctgcggtggcggcgactttgaataaccttgcagtcctttatggtaaaagagggaagtacaaagaagcagagccgttgtgtaaaagagctctggaaatccgagaaaaggttttggggaaggatcaccccgatgttgccaagcagttaaataacttggccttactgtgccagaaccagggcaagtatgaagaagtagaatattattatcaaagagccctcgagatctaccagacaaaactgggacctgatgaccccaacgtggctaagacgaaaaataacctggcatcctgctatttgaaacaaggaaagttcaagcaagcagaaacactgtacaaagagattctcactcgtgcacatgaaagggagtttggttctgtagatgatgaaaataaacccatctggatgcatgctgaagaaagagaagaatgcaaaggaaagcaaaaggatgggacatcttttggagagtatggcggctggtacaaagcctgcaaagttgatagtccaactgttacaaccactctaaaaaaccttggggcactttacagacgtcaaggcaaatttgaagctgcagaaacgttagaagaagctgctatgaggtctcgtaaacagggtcttgacaatgttcacaaacagagggtggcagaagtgctcaatgaccctgagaacatggagaagcgcaggagccgtgagagcctcaacgtggacgtggtcaagtacgagagtggccctgacggaggggaggaaggcgtctctggccgagcctctttttgtggaaaacgacagcagcagcagtggcctggaagacgccaccgctaactgaccccgacctggccccgctccaggatgggactgccgagtgtggcccggagctggcccgggacagccagggcggcagggagggcccctggccgggagccgcagcgctcactcatttctcctgcgtctgtgtgcataggacatgatactaataaccacacggctggcgtgaccttggggctggggctgggcctaagctggtgccctggtgcggcgtggtctctcccaggagacctggggcatgagctgggcccacggctcccttcccatgtgtaacttcctcacgttgtgtgcgataacgtattttattgtaca

SEQ ID NO: 15482 - DNA, 2990 bp, Homo sapiens
  source 1..2990: mol_type = unassigned DNA
gtgtttcgccccctccgacgccaccgaggtagcggcttcacctttaaggcggcgcgggggctgctgggaaggccggcgggatggaggcggcgggaccggctcgcgggtgcgggtccgggtgaagcgggaggcagccagagtcggagccgggcccgagcaccaggcgcaggcccggcgcccgcctgcccgcaccctcgtcctcacagacgccacagccatggccatgatggtgtttccgcgggaggagaagctgagccaggatgagatcgtgctgggcaccaaggctgtcatccagggactggagactctgcgtggggagcatcgtgccctgctggctcctctggttgcacctgaggccggcgaagccgagcctggctcgcaggagcgctgcatcctcctgcgtcgctccctggaagccattgagcttgggctgggggaggcccaggtgatcttggcattgtcgagccacctgggggctgtagaatcagagaagcagaagctgcgggcgcaggtgcggcgtctggtgcaggagaaccagtggctgcgtgaggagctggcggggacacagcagaagctgcagcgcagtgagcaggccgtggcccagctcgaggaggagaagcagcacttgctgttcatgagccagatccgcaagttggatgaagacgcctcccctaacgaggagaagggggacgtccccaaagacacactggatgacctgttccccaatgaggatgagcagagcccagcccctagcccaggaggaggggatgtgtctggtcagcatgggggctacgagatcccggcccggctccgcaccctgcacaacctggtgatccaatacgcctcacagggccgctacgaggtagctgtgccactctgcaagcaggcactcgaagacctggagaagacgtcaggccacgaccaccctgacgttgccaccatgctgaacatcctggcactggtctatcgggatcagaacaagtacaaggaggctgcccacctgctcaatgatgctctggccatccgggagaaaacactgggcaaggaccacccagccgtggctgcgacactaaacaacctggcagtcctgtatggcaagaggggcaagtacaaggaggctgagccattgtgcaagcgggcactggagatccgggagaaggtcctgggcaagtttcacccagatgtggccaagcagctcagcaacctggccctgctgtgccagaaccagggcaaagctgaggaggtggaatattactatcggcgggcactggagatctatgctacacgcctcgggcccgatgaccccaatgtggccaagaccaagaacaacctggcttcctgctacctgaagcagggcaagtaccaggatgcggagaccttgtacaaggagatcctcacccgcgctcatgagaaagagtttggctctgtcaatggggacaacaagcccatctggatgcacgcagaggagcgggaggaaagcaaggataagcgccgggacagcgccccctatggggaatacggcagctggtacaaggcctgtaaagtagacagccccacagtcaacaccaccctgcgcagcttgggggccctataccggcgccagggcaagctggaagccgcgcacacactagaggactgtgccagccgtaaccgcaagcagggtttggaccccgcaagccagaccaaggtggtagaactgctgaaagatggcagtggcaggcggggagaccgccgcagcagccgagacatggctgggggtgccgggcctcggtctgagtctgacctcgaggacgtgggacctacagctgagtggaatggggatggcagtggctccttgaggcgcagcggttcctttgggaaactccgggatgccctgaggcgcagcagtgagatgctggtaaagaagctgcaggggggcaccccccaggagccccctaaccccaggatgaagcgggccagttccctcaacttcctcaacaagagcgtggaagagccgacccagcctggaggcacaggtctctctgacagccgcactctcagctccagctccatggacctctcccgacgaagctccctggtgggctaatgctgaaggggcagccagtcaccagagcgcccacctggcacacccccctcaccccagccctgcgcatgggcctgctgcttgtcccgcctgtctctcccacagcccctgtcttttctgttcaatctcagggtaaccttctcccttgtcatctcagcctgagccctggaggctgggcctgcccactccagctccatcccttatttattccttccagcagggccctcttccctaggttcgggccagcaggaggtgccggctggagtctccaccatagactcagtggcctggcctccccagaccccagagccaagaacactaagcactcgccggcccttcggcaccctcgccctccctcccgactcaacccggccgttgcttctgtatatagagaaataagttattggccgcgcgcctcccttcagtccacggtactacccgggcctcccctcgtccctcttctagtggtaccgcccaggccttaatcacccccattccgtgcggtggtatctcccaggctctacattctcgggagcggcgcctcccaagggggtcctgggaccttctcgcgctcctcctggcctctgagggatgcgtcctacccgcgccatcgccccgtggcccaggacggggacctccccttagtccgtcctcccaccgccgggccctgccccgcatcccggccttatgcactgcccctcccacccggccccgcccaggcacggccgaccccgccccgggcaccgcccaccgagccatcctgcctcgcctccccccacgcctgcagcttctcgcgaggggcggcgacggtcccctggtggcaggaggggctccccctgttgcgggtgaggcggctgctctcatattttcagatgttgctgtagaaataaagacggtttaaatctga

SEQ ID NO: 15483 - DNA, 2591 bp, Homo sapiens
  source 1..2591: mol_type = unassigned DNA
aggcccggcgcccgcctgcccgcaccctcgtcctcacagacgccacagccatggccatgatggtgtttccgcgggaggagaagctgagccaggatgagatcgtgctgggcaccaaggctgtcatccagggactggagactctgcgtggggagcatcgtgccctgctggctcctctggttgcacctgaggccggcgaagccgagcctggctcgcaggagcgctgcatcctcctgcgtcgctccctggaagccattgagcttgggctgggggaggcccaggaggagaagggggacgtccccaaagacacactggatgacctgttccccaatgaggatgagcagagcccagcccctagcccaggaggaggggatgtgtctggtcagcatgggggctacgagatcccggcccggctccgcaccctgcacaacctggtgatccaatacgcctcacagggccgctacgaggtagctgtgccactctgcaagcaggcactcgaagacctggagaagacgtcaggccacgaccaccctgacgttgccaccatgctgaacatcctggcactggtctatcgggatcagaacaagtacaaggaggctgcccacctgctcaatgatgctctggccatccgggagaaaacactgggcaaggaccacccagccgtggctgcgacactaaacaacctggcagtcctgtatggcaagaggggcaagtacaaggaggctgagccattgtgcaagcgggcactggagatccgggagaaggtcctgggcaagtttcacccagatgtggccaagcagctcagcaacctggccctgctgtgccagaaccagggcaaagctgaggaggtggaatattactatcggcgggcactggagatctatgctacacgcctcgggcccgatgaccccaatgtggccaagaccaagaacaacctggcttcctgctacctgaagcagggcaagtaccaggatgcggagaccttgtacaaggagatcctcacccgcgctcatgagaaagagtttggctctgtcaatggggacaacaagcccatctggatgcacgcagaggagcgggaggaaagcaaggataagcgccgggacagcgccccctatggggaatacggcagctggtacaaggcctgtaaagtagacagccccacagtcaacaccaccctgcgcagcttgggggccctataccggcgccagggcaagctggaagccgcgcacacactagaggactgtgccagccgtaaccgcaagcagggtttggaccccgcaagccagaccaaggtggtagaactgctgaaagatggcagtggcaggcggggagaccgccgcagcagccgagacatggctgggggtgccgggcctcggtctgagtctgacctcgaggacgtgggacctacagctgagtggaatggggatggcagtggctccttgaggcgcagcggttcctttgggaaactccgggatgccctgaggcgcagcagtgagatgctggtaaagaagctgcaggggggcaccccccaggagccccctaaccccaggatgaagcgggccagttccctcaacttcctcaacaagagcgtggaagagccgacccagcctggaggcacaggtctctctgacagccgcactctcagctccagctccatggacctctcccgacgaagctccctggtgggctaatgctgaaggggcagccagtcaccagagcgcccacctggcacacccccctcaccccagccctgcgcatgggcctgctgcttgtcccgcctgtctctcccacagcccctgtcttttctgttcaatctcagggtaaccttctcccttgtcatctcagcctgagccctggaggctgggcctgcccactccagctccatcccttatttattccttccagcagggccctcttccctaggttcgggccagcaggaggtgccggctggagtctccaccatagactcagtggcctggcctccccagaccccagagccaagaacactaagcactcgccggcccttcggcaccctcgccctccctcccgactcaacccggccgttgcttctgtatatagagaaataagttattggccgcgcgcctcccttcagtccacggtactacccgggcctcccctcgtccctcttctagtggtaccgcccaggccttaatcacccccattccgtgcggtggtatctcccaggctctacattctcgggagcggcgcctcccaagggggtcctgggaccttctcgcgctcctcctggcctctgagggatgcgtcctacccgcgccatcgccccgtggcccaggacggggacctccccttagtccgtcctcccaccgccgggccctgccccgcatcccggccttatgcactgcccctcccacccggccccgcccaggcacggccgaccccgccccgggcaccgcccaccgagccatcctgcctcgcctccccccacgcctgcagcttctcgcgaggggcggcgacggtcccctggtggcaggaggggctccccctgttgcgggtgaggcggctgctctcatattttcagatgttgctgtagaaataaagacggtttaaatctg

SEQ ID NO: 15484 - DNA, 2898 bp, Homo sapiens
  source 1..2898: mol_type = unassigned DNA
gtgtttcgccccctccgacgccaccgaggtagcggcttcacctttaaggcggcgcgggggctgctgggaaggccggcgggatggaggcggcgggaccggctcgcgggtgcgggtccgggtgaagcgggaggcagccagagtcggagccgggcccgagcaccaggcgcagacgccacagccatggccatgatggtgtttccgcgggaggagaagctgagccaggatgagatcgtgctgggcaccaaggctgtcatccagggactggagactctgcgtggggagcatcgtgccctgctggctcctctggttgcacctgaggccggcgaagccgagcctggctcgcaggagcgctgcatcctcctgcgtcgctccctggaagccattgagcttgggctgggggaggcccaggtgatcttggcattgtcgagccacctgggggctgtagaatcagagaagcagaagctgcgggcgcaggtgcggcgtctggtgcaggagaaccagtggctgcgtgaggagctggcggggacacagcagaagctgcagcgcagtgagcaggccgtggcccagctcgaggaggagaagcagcacttgctgttcatgagccagatccgcaagttggatgaagacgcctcccctaacgaggagaagggggacgtccccaaagacacactggatgacctgttccccaatgaggatgagcagagcccagcccctagcccaggaggaggggatgtgtctggtcagcatgggggctacgagatcccggcccggctccgcaccctgcacaacctggtgatccaatacgcctcacagggccgctacgaggtagctgtgccactctgcaagcaggcactcgaagacctggagaagacgtcaggccacgaccaccctgacgttgccaccatgctgaacatcctggcactggtctatcgggatcagaacaagtacaaggaggctgcccacctgctcaatgatgctctggccatccgggagaaaacactgggcaaggaccacccagccgtggctgcgacactaaacaacctggcagtcctgtatggcaagaggggcaagtacaaggaggctgagccattgtgcaagcgggcactggagatccgggagaaggtcctgggcaagtttcacccagatgtggccaagcagctcagcaacctggccctgctgtgccagaaccagggcaaagctgaggaggtggaatattactatcggcgggcactggagatctatgctacacgcctcgggcccgatgaccccaatgtggccaagaccaagaacaacctggcttcctgctacctgaagcagggcaagtaccaggatgcggagaccttgtacaaggagatcctcacccgcgctcatgagaaagagtttggctctgtcaatggggacaacaagcccatctggatgcacgcagaggagcgggaggaaagcaaggataagcgccgggacagcgccccctatggggaatacggcagctggtacaaggcctgtaaagtagacagccccacagtcaacaccaccctgcgcagcttgggggccctataccggcgccagggcaagctggaagccgcgcacacactagaggactgtgccagccgtaaccgcaagcagggtttggaccccgcaagccagaccaaggtggtagaactgctgaaagatggcagtggcaggcggggagaccgccgcagcagccgagacatggctgggggtgccgggcctcggtctgagtctgacctcgaggacgtgggacctacagctgagtggaatggggatggcagtggctccttgaggcgcagcggttcctttgggaaactccgggatgccctgaggcgcagcagtgagatgctggtaaagaagctgcaggggggcaccccccaggagccccctaaccccaggatgaagcgggccagttccctcaacttcctcaacaagagcgtggaagagccgacccagcctggaggcacaggtctctctgacagccgcactctcagctccagctccatggacctctcccgacgaagctccctggtgggctaatgctgaaggggcagccagtcaccagagcgcccacctggcacacccccctcaccccagccctgcgcatgggcctgctgcttgtcccgcctgtctctcccacagcccctgtcttttctgttcaatctcagggtaaccttctcccttgtcatctcagcctgagccctggaggctgggcctgcccactccagctccatcccttatttattccttccagcagggccctcttccctaggttcgggccagcaggaggtgccggctggagtctccaccatagactcagtggcctggcctccccagaccccagagccaagaacactaagcactcgccggcccttcggcaccctcgccctccctcccgactcaacccggccgttgcttctgtatatagagaaataagttattggccgcgcgcctcccttcagtccacggtactacccgggcctcccctcgtccctcttctagtggtaccgcccaggccttaatcacccccattccgtgcggtggtatctcccaggctctacattctcgggagcggcgcctcccaagggggtcctgggaccttctcgcgctcctcctggcctctgagggatgcgtcctacccgcgccatcgccccgtggcccaggacggggacctccccttagtccgtcctcccaccgccgggccctgccccgcatcccggccttatgcactgcccctcccacccggccccgcccaggcacggccgaccccgccccgggcaccgcccaccgagccatcctgcctcgcctccccccacgcctgcagcttctcgcgaggggcggcgacggtcccctggtggcaggaggggctccccctgttgcgggtgaggc

SEQ ID NO: 15485 - DNA, 3015 bp, Homo sapiens
  source 1..3015: mol_type = unassigned DNA
gcgagccagataacagcggcactcacttctcgggtcttcgtgagcattaagtcaatgaacccagggcaccaaagcgcgcaacacgcagtaggcgctcagttagtggcgcctcgctctgtactccaggaagcccaaccttctccctgcgcctcagtttctcccgacgtcctcgatggcgccatggcgccacactaggcccggcgcccgcctgcccgcaccctcgtcctcacagacgccacagccatggccatgatggtgtttccgcgggaggagaagctgagccaggatgagatcgtgctgggcaccaaggctgtcatccagggactggagactctgcgtggggagcatcgtgccctgctggctcctctggttgcacctgaggccggcgaagccgagcctggctcgcaggagcgctgcatcctcctgcgtcgctccctggaagccattgagcttgggctgggggaggcccaggtgatcttggcattgtcgagccacctgggggctgtagaatcagagaagcagaagctgcgggcgcaggtgcggcgtctggtgcaggagaaccagtggctgcgtgaggagctggcggggacacagcagaagctgcagcgcagtgagcaggccgtggcccagctcgaggaggagaagcagcacttgctgttcatgagccagatccgcaagttggatgaagacgcctcccctaacgaggagaagggggacgtccccaaagacacactggatgacctgttccccaatgaggatgagcagagcccagcccctagcccaggaggaggggatgtgtctggtcagcatgggggctacgagatcccggcccggctccgcaccctgcacaacctggtgatccaatacgcctcacagggccgctacgaggtagctgtgccactctgcaagcaggcactcgaagacctggagaagacgtcaggccacgaccaccctgacgttgccaccatgctgaacatcctggcactggtctatcgggatcagaacaagtacaaggaggctgcccacctgctcaatgatgctctggccatccgggagaaaacactgggcaaggaccacccagccgtggctgcgacactaaacaacctggcagtcctgtatggcaagaggggcaagtacaaggaggctgagccattgtgcaagcgggcactggagatccgggagaaggtcctgggcaagtttcacccagatgtggccaagcagctcagcaacctggccctgctgtgccagaaccagggcaaagctgaggaggtggaatattactatcggcgggcactggagatctatgctacacgcctcgggcccgatgaccccaatgtggccaagaccaagaacaacctggcttcctgctacctgaagcagggcaagtaccaggatgcggagaccttgtacaaggagatcctcacccgcgctcatgagaaagagtttggctctgtcaatggggacaacaagcccatctggatgcacgcagaggagcgggaggaaagcaaggataagcgccgggacagcgccccctatggggaatacggcagctggtacaaggcctgtaaagtagacagccccacagtcaacaccaccctgcgcagcttgggggccctataccggcgccagggcaagctggaagccgcgcacacactagaggactgtgccagccgtaaccgcaagcagggtttggaccccgcaagccagaccaaggtggtagaactgctgaaagatggcagtggcaggcggggagaccgccgcagcagccgagacatggctgggggtgccgggcctcggtctgagtctgacctcgaggacgtgggacctacagctgagtggaatggggatggcagtggctccttgaggcgcagcggttcctttgggaaactccgggatgccctgaggcgcagcagtgagatgctggtaaagaagctgcaggggggcaccccccaggagccccctaaccccaggatgaagcgggccagttccctcaacttcctcaacaagagcgtggaagagccgacccagcctggaggcacaggtctctctgacagccgcactctcagctccagctccatggacctctcccgacgaagctccctggtgggctaatgctgaaggggcagccagtcaccagagcgcccacctggcacacccccctcaccccagccctgcgcatgggcctgctgcttgtcccgcctgtctctcccacagcccctgtcttttctgttcaatctcagggtaaccttctcccttgtcatctcagcctgagccctggaggctgggcctgcccactccagctccatcccttatttattccttccagcagggccctcttccctaggttcgggccagcaggaggtgccggctggagtctccaccatagactcagtggcctggcctccccagaccccagagccaagaacactaagcactcgccggcccttcggcaccctcgccctccctcccgactcaacccggccgttgcttctgtatatagagaaataagttattggccgcgcgcctcccttcagtccacggtactacccgggcctcccctcgtccctcttctagtggtaccgcccaggccttaatcacccccattccgtgcggtggtatctcccaggctctacattctcgggagcggcgcctcccaagggggtcctgggaccttctcgcgctcctcctggcctctgagggatgcgtcctacccgcgccatcgccccgtggcccaggacggggacctccccttagtccgtcctcccaccgccgggccctgccccgcatcccggccttatgcactgcccctcccacccggccccgcccaggcacggccgaccccgccccgggcaccgcccaccgagccatcctgcctcgcctccccccacgcctgcagcttctcgcgaggggcggcgacggtcccctggtggcaggaggggctccccctgttgcgggtgaggcggctgctctcatattttcagatgttgctgtagaaataaagacggtttaaatctg

SEQ ID NO: 15486 - DNA, 2721 bp, Homo sapiens
  source 1..2721: mol_type = unassigned DNA
gtgtttcgccccctccgacgccaccgaggtagcggcttcacctttaaggcggcgcgggggctgctgggaaggccggcgggatggaggcggcgggaccggctcgcgggtgcgggtccgggtgaagcgggaggcagccagagtcggagccgggcccgagcaccaggcgcagacgccacagccatggccatgatggtgtttccgcgggaggagaagctgagccaggatgagatcgtgctgggcaccaaggctgtcatccagggactggagactctgcgtggggagcatcgtgccctgctggctcctctggttgcacctgaggccggcgaagccgagcctggctcgcaggagcgctgcatcctcctgcgtcgctccctggaagccattgagcttgggctgggggaggcccaggaggagaagggggacgtccccaaagacacactggatgacctgttccccaatgaggatgagcagagcccagcccctagcccaggaggaggggatgtgtctggtcagcatgggggctacgagatcccggcccggctccgcaccctgcacaacctggtgatccaatacgcctcacagggccgctacgaggtagctgtgccactctgcaagcaggcactcgaagacctggagaagacgtcaggccacgaccaccctgacgttgccaccatgctgaacatcctggcactggtctatcgggatcagaacaagtacaaggaggctgcccacctgctcaatgatgctctggccatccgggagaaaacactgggcaaggaccacccagccgtggctgcgacactaaacaacctggcagtcctgtatggcaagaggggcaagtacaaggaggctgagccattgtgcaagcgggcactggagatccgggagaaggtcctgggcaagtttcacccagatgtggccaagcagctcagcaacctggccctgctgtgccagaaccagggcaaagctgaggaggtggaatattactatcggcgggcactggagatctatgctacacgcctcgggcccgatgaccccaatgtggccaagaccaagaacaacctggcttcctgctacctgaagcagggcaagtaccaggatgcggagaccttgtacaaggagatcctcacccgcgctcatgagaaagagtttggctctgtcaatggggacaacaagcccatctggatgcacgcagaggagcgggaggaaagcaaggataagcgccgggacagcgccccctatggggaatacggcagctggtacaaggcctgtaaagtagacagccccacagtcaacaccaccctgcgcagcttgggggccctataccggcgccagggcaagctggaagccgcgcacacactagaggactgtgccagccgtaaccgcaagcagggtttggaccccgcaagccagaccaaggtggtagaactgctgaaagatggcagtggcaggcggggagaccgccgcagcagccgagacatggctgggggtgccgggcctcggtctgagtctgacctcgaggacgtgggacctacagctgagtggaatggggatggcagtggctccttgaggcgcagcggttcctttgggaaactccgggatgccctgaggcgcagcagtgagatgctggtaaagaagctgcaggggggcaccccccaggagccccctaaccccaggatgaagcgggccagttccctcaacttcctcaacaagagcgtggaagagccgacccagcctggaggcacaggtctctctgacagccgcactctcagctccagctccatggacctctcccgacgaagctccctggtgggctaatgctgaaggggcagccagtcaccagagcgcccacctggcacacccccctcaccccagccctgcgcatgggcctgctgcttgtcccgcctgtctctcccacagcccctgtcttttctgttcaatctcagggtaaccttctcccttgtcatctcagcctgagccctggaggctgggcctgcccactccagctccatcccttatttattccttccagcagggccctcttccctaggttcgggccagcaggaggtgccggctggagtctccaccatagactcagtggcctggcctccccagaccccagagccaagaacactaagcactcgccggcccttcggcaccctcgccctccctcccgactcaacccggccgttgcttctgtatatagagaaataagttattggccgcgcgcctcccttcagtccacggtactacccgggcctcccctcgtccctcttctagtggtaccgcccaggccttaatcacccccattccgtgcggtggtatctcccaggctctacattctcgggagcggcgcctcccaagggggtcctgggaccttctcgcgctcctcctggcctctgagggatgcgtcctacccgcgccatcgccccgtggcccaggacggggacctccccttagtccgtcctcccaccgccgggccctgccccgcatcccggccttatgcactgcccctcccacccggccccgcccaggcacggccgaccccgccccgggcaccgcccaccgagccatcctgcctcgcctccccccacgcctgcagcttctcgcgaggggcggcgacggtcccctggtggcaggaggggctccccctgttgcgggtgaggcggctgctctcatattttcagatgttgctgtagaaataaagacggtttaaatctg

SEQ ID NO: 15487 - DNA, 620 bp, Homo sapiens
  source 1..620: mol_type = unassigned DNA
ctcgatggccccgccccgtccccctcccgctggagccggcccggcccgcgctcctttaaggcagcgaacgggccaagagaagcgtgtttcgccccctccgacgccaccgagacgccacagccatggccatgatggtgtttccgcgggaggagaagctgagccaggatgagatcgtgctgggcaccaaggctgtcatccagggactggagactctgcgtggggagcatcgtgccctgctggctcctctggttgcacctgaggccggcgaagccgagcctggctcgcaggagcgctgcatcctcctgcgtcgctccctggaagccattgagcttgggctgggggaggcccaggtgatcttggcattgtcgagccacctgggggctgtagaatcagagaagcagaagctgcgggcgcaggtgcggcgtctggtgcaggagaaccagtggctgcgtgaggagctggcggggacacagcagaagctgcagcgcagtgagcaggccgtggcccagctcgaggaggagaagcagcacttgctgttcatgagccagatccgcaagttggatgaagacgcctcccctaacgaggagaagggggacgtccccaaagacacactggatgac

SEQ ID NO: 15488 - DNA, 643 bp, Homo sapiens
  source 1..643: mol_type = unassigned DNA
ggtgcgggtccgggtgaagcgggaggcagccagagtcggagccgggcccgagcaccaggcgcagacgccacagccatggccatgatggtgtttccgcgggaggagaagctgagccaggatgagatcgtgctgggcaccaaggctgtcatccagggactggagactctgcgtggggagcatcgtgccctgctggctcctctggttgcacctgaggccggcgaagccgagcctggctcgcaggagcgctgcatcctcctgcgtcgctccctggaagccattgagcttgggctgggggaggcccaggaggagaagggggacgtccccaaagacacactggatgacctgttccccaatgaggatgagcagagcccagcccctagcccaggaggaggggatgtgtctggtcagcatgggggctacgagatcccggcccggctccgcaccctgcacaacctggtgatccaatacgcctcacagggccgctacgaggtagctgtgccactctgcaagcaggcactcgaagacctggagaagacgtcaggccacgaccaccctgacgttgccaccatgctgaacatcctggcactggtctatcgggatcagaacaagtacaaggaggctgcccacctgctcaatgatgctc

SEQ ID NO: 15489 - DNA, 1073 bp, Homo sapiens
  source 1..1073: mol_type = unassigned DNA
gccttttcagggaaggcctcagggcgttgcgctggcctaggggaggggtcgtcgtgggcgtagcctggaaggactgggggccgcgtactcagcccctctagtgggagcgcctccgcagggtcggctcgtcgggaggatgggctccgcggcttggcctgccttttggggatggggctgtccgaggggctgggcccggatcgccggaggggccagggtctcctgcacaggagtgagcccccacgttccccatacctgtcctggttagggggtccccggggaaacccggacactgagccgcctaagtcggcctgagccggtggtctggggccgaagcaggatccggctgcaccgcattgcgtctcccaggcctagacaagctaggcgcgccctctgtaggccaagcgcgggcacggtgcgggctgccggctgggggacctgggcacacgggagactcaggcgtccggggaccgcctgtttacctaatccggggcggacggcggtgtggccccaggcccggcgcccgcctgcccgcaccctcgtcctcacagacgccacagccatggccatgatggtgtttccgcgggaggagaagctgagccaggatgagatcgtgctgggcaccaaggctgtcatccagggactggagactctgcgtggggagcatcgtgccctgctggctcctctggttgcacctgaggccggcgaagccgagcctggctcgcaggagcgctgcatcctcctgcgtcgctccctggaagccattgagcttgggctgggggaggcccaggtgatcttggcattgtcgagccacctgggggctgtagaatcagagaagcagaagctgcgggcgcaggtgcggcgtctggtgcaggagaaccagtggctgcgtgaggagctggcggggacacagcagaagctgcagcgcagtgagcaggccgtggcccagctcgaggaggagaagcagcacttgctgttcatgagccagatccgcaagttggatgaagacgcctcccctaacgaggagaagggggacgtccccaaagacacactggatgacctgttccccaatgagg

SEQ ID NO: 15490 - DNA, 594 bp, Homo sapiens
  source 1..594: mol_type = unassigned DNA
ctcgatggccccgccccgtccccctcccgctggagccggcccggcccgcgctcctttaaggcagcgaacgggccaagagaagcgtgtttcgccccctccgacgccaccgaggcccggcgcccgcctgcccgcaccctcgtcctcacagacgccacagccatggccatgatggtgtttccgcgggaggagaagctgagccaggatgagatcgtgctgggcaccaaggctgtcatccagggactggagactctgcgtggggagcatcgtgccctgctggctcctctggttgcacctgaggccggcgaagccgagcctggctcgcaggagcgctgcatcctcctgcgtcgctccctggaagccattgagcttgggctgggggaggcccaggtgatcttggcattgtcgagccacctgggggctgtagaatcagagaagcagaagctgcgggcgcaggtgcggcgtctggtgcaggagaaccagtggctgcgtgaggagctggcggggacacagcagaagctgcagcgcagtgagcaggccgtggcccagctcgaggaggagaagcagcacttgctgttcatgagccagatccgcaag

SEQ ID NO: 15491 - DNA, 559 bp, Homo sapiens
  source 1..559: mol_type = unassigned DNA
gcgagccagataacagcggcactcacttctcgggtcttcgtgagcattaagtcaatgaacccagggcaccaaagcgcgcaacacgcagtaggcgctcagttagtggcgcctcgctctgtactccaggaagcccaaccttctccctgcgcctcagtttctcccgacgtcctcgatggcgccatggcgccacactaggcccggcgcccgcctgcccgcaccctcgtcctcacagacgccacagccatggccatgatggtgtttccgcgggaggagaagctgagccaggatgagatcgtgctgggcaccaaggctgtcatccagggactggagactctgcgtggggagcatcgtgccctgctggctcctctggttgcacctgaggccggcgaagccgagcctggctcgcaggagcgctgcatcctcctgcgtcgctccctggaagccattgagcttgggctgggggaggcccaggtgatcttggcattgtcgagccacctgggggctgtagaatcagagaagcagaagctgcgggcgcaggtgcggcgtctggtgcaggaga

SEQ ID NO: 15492 - DNA, 1780 bp, Homo sapiens
  source 1..1780: mol_type = unassigned DNA
cgcccggcgcagcgggagcggcggggcgtgcctggcctgcgggacgcgactgatcgcagtggggcgaagcggggccggagccgcccgcggtcaggagcagcaatgtctgtgcaggtagcggctcctggaagtgcagggctgggcccagagcgcctgagccctgaggagctggtgcggcagacgcggcaagtggtccaggggctggaggcgctgcgggcagagcaccatggcctggctgggcacctggcggaggccctggcgggacagggcccggcagccggcttggagatgctggaggaaaagcagcaggtggtgagccactcgctggaggccatcgagctggggctgggcgaggcccaggtgctgctggccctgtcggcacatgtgggtgcactggaggcagagaagcagcggctgcgctcgcaggcccggcggctggcccaggagaacgtgtggctgcgggaggaactggaggagacgcagcggcggcttcgggccagcgaggagtccgtggcccagctggaggaggagaagcgccacctggagttcctggggcagctgcgacagtacgacccaccggcggagagccagcagtctgagtccccgcctcgccgagacagcctggcctccctgttccccagcgaggaggaggagaggaaaggtcctgaggccgcaggagcagcagctgctcagcagggtggctatgagatccctgcccgccttcggaccctgcataacctcgtgatccagtacgcggggcagggccgctatgaggtggcggtgcctctgtgccgccaggccttggaggacctggagcgcagctcgggccactgccaccctgacgtggccaccatgctcaacatcctggcgctggtgtaccgggaccagaacaagtacaaagaagccacagaccttctccatgatgccctgcagatccgggagcagacgctgggccctgagcaccccgcggtggccgccacgctcaacaacttggctgtcctctatgggaagcgtgggcgttaccgggaggcagagcccctgtgccagcgcgctttggagatccgagagaaggtcctgggtgctgaccacccagatgtggccaagcagctcaacaacctggccctgctgtgccagaaccagggcaagtttgaggacgtggagcggcactatgcccgggccctgagcatctatgaggcactgggcgggccccatgaccccaacgtggccaagaccaagaacaacctggcctcagcctacctgaaacagaacaagtatcaacaagcggaagagctgtacaaagaaatcctccacaaggaggacctacccgcccctctcggtgcccccaacacaggcacagctggtgacgcagaacaggcccttcgccgcagcagctcactctccaagatccgtgagtctatcaggcgaggaagtgagaagctggtctcccggctccgaggcgaggcggcggcaggagcagccggaatgaagagagccatgtcactcaacacactgaacgtggatgctccaagggctcctgggactcagtttcccagctggcacctggacaaggcccctcggaccctcagcgccagcacccaggacctgagcccccactaacgtccagtgaactgcgctggccgcagcttcttgggaacagtgcaggagggatgggctggtggggtgagagggggtctatcatctcctggcccccccttgcctctgggtacctggtggatagctgccttctcctgcgattaaaggctgtggacgtgacagtgag

SEQ ID NO: 15493 - DNA, 1820 bp, Homo sapiens
  source 1..1820: mol_type = unassigned DNA
aggatgggtggagcagggaagagccaggatggggagaagttaggggtcctgatggccattatgggaatagaggctgggggccaactgactggcccgggcaatgattccccaaacccctcaccattgctccccaggagcagcaatgtctgtgcaggtagcggctcctggaagtgcagggctgggcccagagcgcctgagccctgaggagctggtgcggcagacgcggcaagtggtccaggggctggaggcgctgcgggcagagcaccatggcctggctgggcacctggcggaggccctggcgggacagggcccggcagccggcttggagatgctggaggaaaagcagcaggtggtgagccactcgctggaggccatcgagctggggctgggcgaggcccaggtgctgctggccctgtcggcacatgtgggtgcactggaggcagagaagcagcggctgcgctcgcaggcccggcggctggcccaggagaacgtgtggctgcgggaggaactggaggagacgcagcggcggcttcgggccagcgaggagtccgtggcccagctggaggaggagaagcgccacctggagttcctggggcagctgcgacagtacgacccaccggcggagagccagcagtctgagtccccgcctcgccgagacagcctggcctccctgttccccagcgaggaggaggagaggaaaggtcctgaggccgcaggagcagcagctgctcagcagggtggctatgagatccctgcccgccttcggaccctgcataacctcgtgatccagtacgcggggcagggccgctatgaggtggcggtgcctctgtgccgccaggccttggaggacctggagcgcagctcgggccactgccaccctgacgtggccaccatgctcaacatcctggcgctggtgtaccgggaccagaacaagtacaaagaagccacagaccttctccatgatgccctgcagatccgggagcagacgctgggccctgagcaccccgcggtggccgccacgctcaacaacttggctgtcctctatgggaagcgtgggcgttaccgggaggcagagcccctgtgccagcgcgctttggagatccgagagaaggtcctgggtgctgaccacccagatgtggccaagcagctcaacaacctggccctgctgtgccagaaccagggcaagtttgaggacgtggagcggcactatgcccgggccctgagcatctatgaggcactgggcgggccccatgaccccaacgtggccaagaccaagaacaacctggcctcagcctacctgaaacagaacaagtatcaacaagcggaagagctgtacaaagaaatcctccacaaggaggacctacccgcccctctcggtgcccccaacacaggcacagctggtgacgcagaacaggcccttcgccgcagcagctcactctccaagatccgtgagtctatcaggcgaggaagtgagaagctggtctcccggctccgaggcgaggcggcggcaggagcagccggaatgaagagagccatgtcactcaacacactgaacgtggatgctccaagggctcctgggactcagtttcccagctggcacctggacaaggcccctcggaccctcagcgccagcacccaggacctgagcccccactaacgtccagtgaactgcgctggccgcagcttcttgggaacagtgcaggagggatgggctggtggggtgagagggggtctatcatctcctggcccccccttgcctctgggtacctggtggatagctgccttctcctgcgattaaaggctgtggacgtgacagtgag

SEQ ID NO: 15494 - DNA, 2957 bp, Homo sapiens
  source 1..2957: mol_type = unassigned DNA
aggcgactctgggcgggtctgggccgctccagtgttttggggcacagaagctgtgggaggagctggaggcttcaccgtggtaaccacagcgccgctgctgccccgccttgcaggcctcaggactgtcatcgcctctgggtgtgagggtactttggccaccgtccccggaaataaccgcgcctgcctctcaagataccccatcctctccacgccgctgccgctgccgccatgcaaggggaggacgccagatacctcaaaaggaaagttaaaggagggaatatagatgtacatccatcagaaaaagcactcattgttcactatgaagtggaagctaccattcttggagaaatgggggaccccatgttgggagaacgaaaagaatgtcaaaaaatcattcgacttaagagtctcaatgccaacacagatataacttccctggcaaggaaggtggttgaagaatgtaaactcattcatccttcaaaactaaatgaggtagaacagctgttgtactatctacagaaccgccgtgattcattgtcaggaaaagagaaaaaagaaaaatcaagcaagcctaaagatccacctccttttgaaggaatggagattgatgaagttgctaacattaatgacatggatgaatatattgagttattatatgaagatattcctgacaaagttcggggttctgctttgatcctgcagcttgctcgaaatcctgataacttggaagaactactattgaatgaaactgcccttggtgcattagcaagggtcctgagagaagactggaagcaaagtgtcgagttagctacaaacataatttacatctttttttgtttctccagcttttctcaatttcatggacttattactcactataaaattggagctctgtgtatgaatattattgatcatgagttaaaaagacatgagctttggcaagaagaactctcaaagaagaagaaagctgttgatgaagaccctgaaaaccaaaccttgagaaaggattatgaaaaaacctttaaaaagtaccaggggcttgtggtaaaacaggaacagctattacgagttgctctttatttgcttctgaatcttgctgaggatactcgtaccgaactgaaaatgaggaacaagaacatagttcacatgttggtgaaagcccttgatcgggacaattttgagctgctaattttagttgtgtcattcttgaagaaactcagcatttttatggagaataaaaatgatatggtggaaatggatattgttgaaaaactggtgaaaatgataccttgtgagcatgaagacctgctgaatatcaccctccgacttttactaaacctatcctttgacacaggactgaggaataagatggtacaagttggactgcttcccaagctcactgcactcctaggcaatgacaactacaaacaaatagcaatgtgtgttctttaccacataagcatggatgaccgctttaaatcaatgtttgcatacactgactgtataccacagttaatgaagatgctgtttgaatgttcagatgaacgaattgacttggaactcatttctttctgcattaatcttgctgctaacaaaagaaatgtacagcttatctgtgaaggaaatgggctgaagatgctcatgaagagggctctgaagtttaaggatccattgctgatgaaaatgattagaaacatttctcagcatgatggaccaactaaaaatctgtttattgattatgttggggaccttgcagcccagatctctaatgatgaagaagaggagtttgtgattgaatgtttgggaactcttgcaaacttgaccattccagacttagactgggaattggttcttaaagaatataagttggttccatacctcaaggataaactaaaaccaggtgctgcagaagatgatcttgttttagaagtggttataatgattggaactgtatccatggatgactcttgtgctgcattgctagccaaatctggcataatccctgcactcattgaattgctaaatgctcaacaagaagatgatgaatttgtgtgtcagataatttatgtcttctaccagatggttttccaccaagccacaagagacgtcataatcaaggaaacacaggctccagcatatctcatagacctaatgcatgataagaataatgaaatccgaaaggtctgtgataatacattagatattatagcggaatatgatgaagaatgggctaagaaaattcagagtgaaaagtttcgctggcataactctcagtggctggagatggtagagagtcgtcagatggatgagagtgagcagtacttgtatggtgatgatcgaattgagccatacattcatgaaggagatattctcgaaagacctgaccttttctacaactcagatggattaattgcctctgaaggagccataagtcccgatttcttcaatgattaccaccttcaaaatggagatgttgttgggcagcattcatttcctggcagccttggaatggatggctttggccaaccagttggcattcttggacgccctgccacagcatatggattccgccctgatgaaccttactactatggctatggatcttgataaagtatctgtttccatgtgtaatctcagcttagaagaaatctgtgtgggttgggttaattttggatctttgcctaataatgcatgttgatgttattgtgggtctgtgtttgtttttatttttatatgttgttagctgcagattaaccccagcccctctgtcttctgttaagtacagttgatactgacattgttcactcatcaaaccacatcttgatgctaagtaacatttcccatgagccacaaaactgaatgctgaaaagctactagactggaaaacaaacactgcattatgtatgttaagtgactaatttaatttcaattaaaaagcgtaaagtgaaaatgaataa

SEQ ID NO: 15495 - DNA, 4111 bp, Homo sapiens
  source 1..4111: mol_type = unassigned DNA
attctttttctagtctctgttgctgctttttattatttccttctgctagcttggggttttgtttgctcttctttttctagccccttaaggtgtaaaattaggttattaattcaaaatcttttatttatttttttaaatagagcgtcagtatagagtgtcttattgtggatctgtttgagtttatctttgaatttcattgagcttcttggatgtgtaagtttgtctttggtctaatttgggaagtttttgactgttttttctcccagtattctctatgtttctttcttcctctcctttcataccctcattatgcatatgttggtatactagatggtgttccataagtctcttaggttctgtttatttttcttcattctgttttctttctgtgcctcaaaatggacagtttcatttgacatatcttcaagtttgctgattcttttctctctctgctcagatctgctgttaaaaaccctgtagtgatttttttatttcagttattgtacttttcagatctagtgtttttgtttggatccttatgataatatatttttaaactatttatgtgttgagacattgtgtttctcctttttcttagttatttgcactggtttctttttgctctttggacatatttaagacagttgatttaaagtctttgataagtccagtgtttgtgctgtagcatggacagtttctgttaattttttttattgtgagaatgagaatgagtttcttgtttctttgcatgtttcatattttgttttgttgaaaactgggtattttgaatattatggtatccaaaggaaaaaaagaaaagaaaaaaatactcttcagatctttgtaggttgactcagtgtttggatatggcttcaacacttagccaggcaatttacaattttaccttagccttcatttgctgcttgcacagagcctgaagaccagccagaggtaaaagcttatgatcttcccaggttttttctgggtatgtattctgccctgagcatgctcatggatttctagatttctctttatatgcaatagcttttcaaagcatctattcccccaaaatgtctgactccctggactttcctcttgggctttcagcttgtgttttgtttgacccagctattactatttatcccaggggccagcagcttgtatgcttggctttcactgatttcagtgactgcatagctgcactatcctgataagagtttaaaattagtcaaaacaaaggaaagccccttgcagctgacctcaaaggaaacttcagtcagttgcaaaacaatcagacaaaattccttgggagcaaggtccacttgactcctctagaaccaagtattaacagtgggaacgtgggctgccatcttgaagactgccactgtgcttgagagtggggtggatgtctagggaaagttaaaggagggaatatagatgtacatccatcagaaaaagcactcattgttcactatgaagtggaagctaccattcttggagaaatgggggaccccatgttgggagaacgaaaagaatgtcaaaaaatcattcgacttaagagtctcaatgccaacacagatataacttccctggcaaggaaggtggttgaagaatgtaaactcattcatccttcaaaactaaatgaggtagaacagctgttgtactatctacagaaccgccgtgattcattgtcaggaaaagagaaaaaagaaaaatcaagcaagcctaaagatccacctccttttgaaggaatggagattgatgaagttgctaacattaatgacatggatgaatatattgagttattatatgaagatattcctgacaaagttcggggttctgctttgatcctgcagcttgctcgaaatcctgataacttggaagaactactattgaatgaaactgcccttggtgcattagcaagggtcctgagagaagactggaagcaaagtgtcgagttagctacaaacataatttacatctttttttgtttctccagcttttctcaatttcatggacttattactcactataaaattggagctctgtgtatgaatattattgatcatgagttaaaaagacatgagctttggcaagaagaactctcaaagaagaagaaagctgttgatgaagaccctgaaaaccaaaccttgagaaaggattatgaaaaaacctttaaaaagtaccaggggcttgtggtaaaacaggaacagctattacgagttgctctttatttgcttctgaatcttgctgaggatactcgtaccgaactgaaaatgaggaacaagaacatagttcacatgttggtgaaagcccttgatcgggacaattttgagctgctaattttagttgtgtcattcttgaagaaactcagcatttttatggagaataaaaatgatatggtggaaatggatattgttgaaaaactggtgaaaatgataccttgtgagcatgaagacctgctgaatatcaccctccgacttttactaaacctatcctttgacacaggactgaggaataagatggtacaagttggactgcttcccaagctcactgcactcctaggcaatgacaactacaaacaaatagcaatgtgtgttctttaccacataagcatggatgaccgctttaaatcaatgtttgcatacactgactgtataccacagttaatgaagatgctgtttgaatgttcagatgaacgaattgacttggaactcatttctttctgcattaatcttgctgctaacaaaagaaatgtacagcttatctgtgaaggaaatgggctgaagatgctcatgaagagggctctgaagtttaaggatccattgctgatgaaaatgattagaaacatttctcagcatgatggaccaactaaaaatctgtttattgattatgttggggaccttgcagcccagatctctaatgatgaagaagaggagtttgtgattgaatgtttgggaactcttgcaaacttgaccattccagacttagactgggaattggttcttaaagaatataagttggttccatacctcaaggataaactaaaaccaggtgctgcagaagatgatcttgttttagaagtggttataatgattggaactgtatccatggatgactcttgtgctgcattgctagccaaatctggcataatccctgcactcattgaattgctaaatgctcaacaagaagatgatgaatttgtgtgtcagataatttatgtcttctaccagatggttttccaccaagccacaagagacgtcataatcaaggaaacacaggctccagcatatctcatagacctaatgcatgataagaataatgaaatccgaaaggtctgtgataatacattagatattatagcggaatatgatgaagaatgggctaagaaaattcagagtgaaaagtttcgctggcataactctcagtggctggagatggtagagagtcgtcagatggatgagagtgagcagtacttgtatggtgatgatcgaattgagccatacattcatgaaggagatattctcgaaagacctgaccttttctacaactcagatggattaattgcctctgaaggagccataagtcccgatttcttcaatgattaccaccttcaaaatggagatgttgttgggcagcattcatttcctggcagccttggaatggatggctttggccaaccagttggcattcttggacgccctgccacagcatatggattccgccctgatgaaccttactactatggctatggatcttgataaagtatctgtttccatgtgtaatctcagcttagaagaaatctgtgtgggttgggttaattttggatctttgcctaataatgcatgttgatgttattgtgggtctgtgtttgtttttatttttatatgttgttagctgcagattaaccccagcccctctgtcttctgttaagtacagttgatactgacattgttcactcatcaaaccacatcttgatgctaagtaacatttcccatgagccacaaaactgaatgctgaaaagctactagactggaaaacaaacactgcattatgtatgttaagtgactaatttaatttcaattaaaaagcgtaaagtgaaaatgaataa

SEQ ID NO: 15496 - DNA, 2718 bp, Homo sapiens
  source 1..2718: mol_type = unassigned DNA
ttgcaggcctcaggactgtcatcgcctctgggtgtgagggtactttggccaccgtccccggaaataaccgcgcctgcctctcaagataccccatcctctccacgccgctgccgctgccgccatgcaaggggaggacgccagatacctcaaaagcattcgacttaagagtctcaatgccaacacagatataacttccctggcaaggaaggtggttgaagaatgtaaactcattcatccttcaaaactaaatgaggtagaacagctgttgtactatctacagaaccgccgtgattcattgtcaggaaaagagaaaaaagaaaaatcaagcaagcctaaagatccacctccttttgaaggaatggagattgatgaagttgctaacattaatgacatggatgaatatattgagttattatatgaagatattcctgacaaagttcggggttctgctttgatcctgcagcttgctcgaaatcctgataacttggaagaactactattgaatgaaactgcccttggtgcattagcaagggtcctgagagaagactggaagcaaagtgtcgagttagctacaaacataatttacatctttttttgtttctccagcttttctcaatttcatggacttattactcactataaaattggagctctgtgtatgaatattattgatcatgagttaaaaagacatgagctttggcaagaagaactctcaaagaagaagaaagctgttgatgaagaccctgaaaaccaaaccttgagaaaggattatgaaaaaacctttaaaaagtaccaggggcttgtggtaaaacaggaacagctattacgagttgctctttatttgcttctgaatcttgctgaggatactcgtaccgaactgaaaatgaggaacaagaacatagttcacatgttggtgaaagcccttgatcgggacaattttgagctgctaattttagttgtgtcattcttgaagaaactcagcatttttatggagaataaaaatgatatggtggaaatggatattgttgaaaaactggtgaaaatgataccttgtgagcatgaagacctgctgaatatcaccctccgacttttactaaacctatcctttgacacaggactgaggaataagatggtacaagttggactgcttcccaagctcactgcactcctaggcaatgacaactacaaacaaatagcaatgtgtgttctttaccacataagcatggatgaccgctttaaatcaatgtttgcatacactgactgtataccacagttaatgaagatgctgtttgaatgttcagatgaacgaattgacttggaactcatttctttctgcattaatcttgctgctaacaaaagaaatgtacagcttatctgtgaaggaaatgggctgaagatgctcatgaagagggctctgaagtttaaggatccattgctgatgaaaatgattagaaacatttctcagcatgatggaccaactaaaaatctgtttattgattatgttggggaccttgcagcccagatctctaatgatgaagaagaggagtttgtgattgaatgtttgggaactcttgcaaacttgaccattccagacttagactgggaattggttcttaaagaatataagttggttccatacctcaaggataaactaaaaccaggtgctgcagaagatgatcttgttttagaagtggttataatgattggaactgtatccatggatgactcttgtgctgcattgctagccaaatctggcataatccctgcactcattgaattgctaaatgctcaacaagaagatgatgaatttgtgtgtcagataatttatgtcttctaccagatggttttccaccaagccacaagagacgtcataatcaaggaaacacaggctccagcatatctcatagacctaatgcatgataagaataatgaaatccgaaaggtctgtgataatacattagatattatagcggaatatgatgaagaatgggctaagaaaattcagagtgaaaagtttcgctggcataactctcagtggctggagatggtagagagtcgtcagatggatgagagtgagcagtacttgtatggtgatgatcgaattgagccatacattcatgaaggagatattctcgaaagacctgaccttttctacaactcagatggattaattgcctctgaaggagccataagtcccgatttcttcaatgattaccaccttcaaaatggagatgttgttgggcagcattcatttcctggcagccttggaatggatggctttggccaaccagttggcattcttggacgccctgccacagcatatggattccgccctgatgaaccttactactatggctatggatcttgataaagtatctgtttccatgtgtaatctcagcttagaagaaatctgtgtgggttgggttaattttggatctttgcctaataatgcatgttgatgttattgtgggtctgtgtttgtttttatttttatatgttgttagctgcagattaaccccagcccctctgtcttctgttaagtacagttgatactgacattgttcactcatcaaaccacatcttgatgctaagtaacatttcccatgagccacaaaactgaatgctgaaaagctactagactggaaaacaaacactgcattatgtatgttaagtgactaatttaatttcaattaaaaagcgtaaagtgaaaatgaataa

SEQ ID NO: 15497 - DNA, 3015 bp, Homo sapiens
  source 1..3015: mol_type = unassigned DNA
aggcgactctgggcgggtctgggccgctccagtgttttggggcacagaagctgtgggaggagctggaggcttcaccgtggtaaccacagcgccgctgctgccccgccttgcaggcctcaggactgtcatcgcctctgggtgtgagggtactttggccaccgtccccggaaataaccgcgcctgcctctcaagataccccatcctctccacgccgctgccgctgccgccatgcaaggggaggacgccagatacctcaaaaggaaagttaaaggagggaatatagatgtacatccatcagaaaaagcactcattgttcactatgaagtggaagctaccattcttggagaaatgggggaccccatgttgggagaacgaaaagaatgtcaaaaaatcattcgacttaagagtctcaatgccaacacagatataacttccctggcaaggaaggtggttgaagaatgtaaactcattcatccttcaaaactaaatgaggtagaacagctgttgtactatctacagaaccgccgtgattcattgtcaggaaaagattgggaagggtcagcaggacttctgaagagggaacacgacctttaaggaggccaacagatcaggagaaggcaaaagggatgtcgattgcccttggcaacacttaccggagaagtctttcagattcagaaactgtttctgtactccaagcaagcttatgtgaagagaaaaaagaaaaatcaagcaagcctaaagatccacctccttttgaaggaatggagattgatgaagttgctaacattaatgacatggatgaatatattgagttattatatgaagatattcctgacaaagttcggggttctgctttgatcctgcagcttgctcgaaatcctgataacttggaagaactactattgaatgaaactgcccttggtgcattagcaagggtcctgagagaagactggaagcaaagtgtcgagttagctacaaacataatttacatctttttttgtttctccagcttttctcaatttcatggacttattactcactataaaattggagctctgtgtatgaatattattgatcatgagttaaaaagacatgagctttggcaagaagaactctcaaagaagaagaaagctgttgatgaagaccctgaaaaccaaaccttgagaaaggattatgaaaaaacctttaaaaagtaccaggggcttgtggtaaaacaggaacagctattacgagttgctctttatttgcttctgaatcttgctgaggatactcgtaccgaactgaaaatgaggaacaagaacatagttcacatgttggtgaaagcccttgatcgggacaattttgagctgctaattttagttgtgtcattcttgaagaaactcagcatttttatggagaataaaaatgatatggtggaaatggatattgttgaaaaactggtgaaaatgataccttgtgagcatgaagacctgctgaatatcaccctccgacttttactaaacctatcctttgacacaggactgaggaataagatggtacaagttggactgcttcccaagctcactgcactcctaggcaatgacaactacaaacaaatagcaatgtgtgttctttaccacataagcatggatgaccgctttaaatcaatgtttgcatacactgactgtataccacagttaatgaagatgctgtttgaatgttcagatgaacgaattgacttggaactcatttctttctgcattaatcttgctgctaacaaaagaaatgtacagcttatctgtgaaggaaatgggctgaagatgctcatgaagagggctctgaagtttaaggatccattgctgatgaaaatgattagaaacatttctcagcatgatggaccaactaaaaatctgtttattgattatgttggggaccttgcagcccagatctctaatgatgaagaagaggagtttgtgattgaatgtttgggaactcttgcaaacttgaccattccagacttagactgggaattggttcttaaagaatataagttggttccatacctcaaggataaactaaaaccaggtgctgcagaagatgatcttgttttagaagtggttataatgattggaactgtatccatggatgactcttgtgctgcattgctagccaaatctggcataatccctgcactcattgaattgctaaatgctcaacaagaagatgatgaatttgtgtgtcagataatttatgtcttctaccagatggttttccaccaagccacaagagacgtcataatcaaggaaacacaggctccagcatatctcatagacctaatgcatgataagaataatgaaatccgaaaggtctgtgataatacattagatattatagcggaatatgatgaagaatgggctaagaaaattcagagtgaaaagtttcgctggcataactctcagtggctggagatggtagagagtcgtcagatggatgagagtgagcagtacttgtatggtgatgatcgaattgagccatacattcatgaaggagatattctcgaaagacctgaccttttctacaactcagatggattaattgcctctgaaggagccataagtcccgatttcttcaatgattaccaccttcaaaatggagatgttgttgggcagcattcatttcctggcagccttggaatggatggctttggccaaccagttggcattcttggacgccctgccacagcatatggattccgccctgatgaaccttactactatggctatggatcttgataaagtatctgtttccatgtgtaatctcagcttagaagaaatctgtgtgggttgggttaattttggatctttgcctaataatgcatgttgatgttattgtgggtctgtgtttgtttttatttttatatgttgttagctgcagattaaccccagcccctctgtcttctgttaagtacagttgatactgacattgttcactcatcaaaccacatcttgatgctaagtaacatttcccatgagccac

SEQ ID NO: 15498 - DNA, 1956 bp, Homo sapiens
  source 1..1956: mol_type = unassigned DNA
aacataaattttagaaggacagtattcaaccggctacctctatcttggctgtaaagagaagtctgtttgttttttcaatttgctctttatttgcttctgaatcttgctgaggatactcgtaccgaactgaaaatgaggaacaagaacatagttcacatgttggtgaaagcccttgatcgggacaattttgagctgctaattttagttgtgtcattcttgaagaaactcagcatttttatggagaataaaaatgatatggtggaaatggatattgttgaaaaactggtgaaaatgataccttgtgagcatgaagacctgctgaatatcaccctccgacttttactaaacctatcctttgacacaggactgaggaataagatggtacaagttggactgcttcccaagctcactgcactcctaggcaatgacaactacaaacaaatagcaatgtgtgttctttaccacataagcatggatgaccgctttaaatcaatgtttgcatacactgactgtataccacagttaatgaagatgctgtttgaatgttcagatgaacgaattgacttggaactcatttctttctgcattaatcttgctgctaacaaaagaaatgtacagcttatctgtgaaggaaatgggctgaagatgctcatgaagagggctctgaagtttaaggatccattgctgatgaaaatgattagaaacatttctcagcatgatggaccaactaaaaatctgtttattgattatgttggggaccttgcagcccagatctctaatgatgaagaagaggagtttgtgattgaatgtttgggaactcttgcaaacttgaccattccagacttagactgggaattggttcttaaagaatataagttggttccatacctcaaggataaactaaaaccaggtgctgcagaagatgatcttgttttagaagtggttataatgattggaactgtatccatggatgactcttgtgctgcattgctagccaaatctggcataatccctgcactcattgaattgctaaatgctcaacaagaagatgatgaatttgtgtgtcagataatttatgtcttctaccagatggttttccaccaagccacaagagacgtcataatcaaggaaacacaggctccagcatatctcatagacctaatgcatgataagaataatgaaatccgaaaggtctgtgataatacattagatattatagcggaatatgatgaagaatgggctaagaaaattcagagtgaaaagtttcgctggcataactctcagtggctggagatggtagagagtcgtcagatggatgagagtgagcagtacttgtatggtgatgatcgaattgagccatacattcatgaaggagatattctcgaaagacctgaccttttctacaactcagatggattaattgcctctgaaggagccataagtcccgatttcttcaatgattaccaccttcaaaatggagatgttgttgggcagcattcatttcctggcagccttggaatggatggctttggccaaccagttggcattcttggacgccctgccacagcatatggattccgccctgatgaaccttactactatggctatggatcttgataaagtatctgtttccatgtgtaatctcagcttagaagaaatctgtgtgggttgggttaattttggatctttgcctaataatgcatgttgatgttattgtgggtctgtgtttgtttttatttttatatgttgttagctgcagattaaccccagcccctctgtcttctgttaagtacagttgatactgacattgttcactcatcaaaccacatcttgatgctaagtaacatttcccatgagccacaaaactgaatgctgaaaagctactagactggaaaacaaacactgcattatgtatgttaagtgactaatttaatttcaattaaaaagcgtaaagtg

SEQ ID NO: 15499 - DNA, 3435 bp, Homo sapiens
  source 1..3435: mol_type = unassigned DNA
aaatatgtttggataacccagcagagccatttaacctttgggaacaaggcaactagcgtctggcagcaggaatccaaccagtgccctgagttctgaggcagagaggaggacagaagaaacaagaggctggagattgtcaaattcagtatcccagttggctcttgattcttggtgaaaccatccctcagctcctagagggagattgttagatcatgaaactaattaccatccttttcctctgctccaggctgctactaagtttaacccaggaatcacagtccgaggaaattgactgcaatgacaaggatttatttaaagctgtggatgctgctctgaagaaatataacagtcaaaaccaaagtaacaaccagtttgtattgtaccgcataactgaagccactaagacggttggctctgacacgttttattccttcaagtacgaaatcaaggagggggattgtcctgttcaaagtggcaaaacctggcaggactgtgagtacaaggatgctgcaaaagcagccactggagaatgcacggcaaccgtggggaagaggagcagtacgaaattctccgtggctacccagacctgccagattactccagccgagggccctgtggtgacagcccagtacgactgcctcggctgtgtgcatcctatatcaacgcagagcccagacctggagcccattctgagacacggcattcagtactttaacaacaacactcaacattcctccctcttcatgcttaatgaagtaaaacgggcccaaagacaggtggtggctggattgaactttcgaattacctactcaattgtgcaaacgaattgttccaaagagaattttctgttcttaactccagactgcaagtccctttggaatggtgataccggtgaatgtacagataatgcatacatcgatattcagctacgaattgcttccttctcacagaactgtgacatttatccagggaaggattttgtacaaccacctaccaagatttgcgtgggctgccccagagatatacccaccaacagcccagagctggaggagacactgactcacaccatcacaaagcttaatgcagagaataacgcaactttctatttcaagattgacaatgtgaaaaaagcaagagtacaggtggtggctggcaagaaatattttattgacttcgtggccagggaaaccacatgttccaaggaaagtaatgaagagttgaccgaaagctgtgagaccaaaaaacttggccaaagcctagattgcaacgctgaagtttatgtggtaccctgggagaaaaaaatttaccctactgtcaactgtcaaccactgggaatgatctcactgatgaaaaggcctccaggtttttcacctttccgatcatcacgaataggggaaataaaagaagaaacaactgtaagtccaccccacacttccatggcacctgcacaagatgaagagcgggattcaggaaaagaacaagggcatactcgtagacatgactggggccatgaaaaacaaagaaaacataatcttggccatggccataaacatgaacgtgaccaagggcatgggcaccaaagaggacatggccttggccatggacacgaacaacagcatggtcttggtcatggacataagttcaaacttgatgatgatcttgaacaccaagggggccatgtccttgaccatggacataagcataagcatggtcatggccacggaaaacataaaaataaaggcaaaaagaatggaaagcacaatggttggaaaacagagcatttggcaagctcttctgaagacagtactacaccttctgcacagacacaagagaagacagaagggccaacacccatcccttccctagccaagccaggtgtaacagttaccttttctgactttcaggactctgatctcattgcaactatgatgcctcctatatcaccagctcccatacagagtgatgacgattggatccctgatatccagatagacccaaatggcctttcatttaacccaatatcagattttccagacacgacctccccaaaatgtcctggacgcccctggaagtcagttagtgaaattaatccaaccacacaaatgaaagaatcttattatttcgatctcactgatggcctttcttaatttaagtggctatgggtatttctttcatactttattaaagtatcaatatccctctctccattgtccagatgaaaatatcctgatataatgcaccaaaaaccatgcagcttcggaacagtctaaagagaagtggtgagactcccagtggagacaccatcagtctccacggactgcataaaattgtgtgccacaattctaactcttttctgaatcttcttcccaagttttctaaactagcacagtaaacagacaaactaatgtgccgtatggcctgctgcaattggcttctctgataacaaatatgtaccttacaacatatgtcatgaatttgcatacaaagattcttgtcattcttaataaactgtggcacttggtatttgaatgtgtgtgaaaataagggaagtcaagagattaaatgctgaacttattaatggaatagaaataataaggaggctgaggctggagaattgcttgaacccgggaggcggaggttgcagtgagccgagatcgtgccactgcgctccagcctgggcatcagagcaagattctgtctcagaaaaaaagaaaaaaaaagaaataataagaaaaacttccagatttcaaagtaacaagaaagaagacaggttggccaaagggaggaaaggggggacataaattaattgactttctattcccaaaatgggctagttatatcaaataaatactcccactgccctttctgagtgagagtgtttctcataagtcaaaaatttctgtttactcattaactactctttgcaacaggctttcatatagaagtattctgtttatttttgctgagcctagattgagtaattcttagtttacagaagctccgagcttaatgataaggatgaaaagcagagggagcaatatagaagcaggcttgctaataaaactttttaaataattgacaagggaatattatggaatgtgatgcaaagtttgttccgaaattttatgaggaaattactctctagtctcactttatagtctttttgctatgactttgaagaccattgatttttgagaagcagaataataggattgcctttcattgccctatagtgcaaagaaggtatatgctttataaccaatgttgtacttttgcctagaaaaacaagatatggctttaaatagctacaatcatctttggatgtatatgtcactgctgcttcaagttattggatgcatttgaacctctgagtttgtctttcattttaaatattgtctgttcttttaaataaacaaccacagatgtcaggaaaaa

SEQ ID NO: 15500 - DNA, 1720 bp, Homo sapiens
  source 1..1720: mol_type = unassigned DNA
ttttcaaatgcaaatgagcaggttaacaaccccagtgttgcaatgttctagctgtaaatatgtttggataacccagcagagccatttaacctttgggaacaaggcaactagcgtctggcagcaggaatccaaccagtgccctgagttctgaggcagagaggaggacagaagaaacaagaggctggagattgtcaaattcagtatcccagttggctcttgattcttggtgaaaccatccctcagctcctagagggagattgttagatcatgaaactaattaccatccttttcctctgctccaggctgctactaagtttaacccaggaatcacagtccgaggaaattgactgcaatgacaaggatttatttaaagctgtggatgctgctctgaagaaatataacagtcaaaaccaaagtaacaaccagtttgtattgtaccgcataactgaagccactaagacggttggctctgacacgttttattccttcaagtacgaaatcaaggagggggattgtcctgttcaaagtggcaaaacctggcaggactgtgagtacaaggatgctgcaaaagcagccactggagaatgcacggcaaccgtggggaagaggagcagtacgaaattctccgtggctacccagacctgccagattactccagccgagggccctgtggtgacagcccagtacgactgcctcggctgtgtgcatcctatatcaacgcagagcccagacctggagcccattctgagacacggcattcagtactttaacaacaacactcaacattcctccctcttcatgcttaatgaagtaaaacgggcccaaagacaggtggtggctggattgaactttcgaattacctactcaattgtgcaaacgaattgttccaaagagaattttctgttcttaactccagactgcaagtccctttggaatggtgataccggtgaatgtacagataatgcatacatcgatattcagctacgaattgcttccttctcacagaactgtgacatttatccagggaaggattttgtacaaccacctaccaagatttgcgtgggctgccccagagatatacccaccaacagcccagagctggaggagacactgactcacaccatcacaaagcttaatgcagagaataacgcaactttctatttcaagattgacaatgtgaaaaaagcaagagtacaggtggtggctggcaagaaatattttattgacttcgtggccagggaaaccacatgttccaaggaaagtaatgaagagttgaccgaaagctgtgagaccaaaaaacttggccaaagcctagattgcaacgctgaagtttatgtggtaccctgggagaaaaaaatttaccctactgtcaactgtcaaccactgggaatgatctcactgatgaaaaggcctccaggtttttcacctttccgatcatcacgaataggggaaataaaagaagaaacaactagtcacctaaggtcctgcgagtacaagggtcgacccccaaaggcaggggcagagccagcatctgagagggaggtctcttgaccaatgggcagaatcttcactccaggcacatagccccaaccacctctgccagcaaccttgagaggaaggacaagaagaaagatgggatagaatttaaatagagaagaatgccattttatcactctgcctctgggtgaaataaagatcagtcttgatgttctaactctaa

SEQ ID NO: 15501 - DNA, 1538 bp, Homo sapiens
  source 1..1538: mol_type = unassigned DNA
atttaacctttgggaacaaggcaactagcgtctggcagcaggaatccaaccagtgccctgagttctgaggcagagaggaggacagaagaaacaagaggctggagattgtcaaattcagtatcccagttggctcttgattcttggtgaaaccatccctcagctcctagagggagattgttagatcatgaaactaagtttaacccaggaatcacagtccgaggaaattgactgcaatgacaaggatttatttaaagctgtggatgctgctctgaagaaatataacagtcaaaaccaaagtaacaaccagtttgtattgtaccgcataactgaagccactaagacggttggctctgacacgttttattccttcaagtacgaaatcaaggagggggattgtcctgttcaaagtggcaaaacctggcaggactgtgagtacaaggatgctgcaaaagcagccactggagaatgcacggcaaccgtggggaagaggagcagtacgaaattctccgtggctacccagacctgccagattactccagccgagggccctgtggtgacagcccagtacgactgcctcggctgtgtgcatcctatatcaacgcagagcccagacctggagcccattctgagacacggcattcagtactttaacaacaacactcaacattcctccctcttcatgcttaatgaagtaaaacgggcccaaagacaggtggtggctggattgaactttcgaattacctactcaattgtgcaaacgaattgttccaaagagaattttctgttcttaactccagactgcaagtccctttggaatggtgataccggtgaatgtacagataatgcatacatcgatattcagctacgaattgcttccttctcacagaactgtgacatttatccagggaaggattttgtacaaccacctaccaagatttgcgtgggctgccccagagatatacccaccaacagcccagagctggaggagacactgactcacaccatcacaaagcttaatgcagagaataacgcaactttctatttcaagattgacaatgtgaaaaaagcaagagtacaggtggtggctggcaagaaatattttattgacttcgtggccagggaaaccacatgttccaaggaaagtaatgaagagttgaccgaaagctgtgagaccaaaaaacttggccaaagcctagattgcaacgctgaagtttatgtggtaccctgggagaaaaaaatttaccctactgtcaactgtcaaccactgggaatgatctcactgatgaaaaggcctccaggtttttcacctttccgatcatcacgaataggggaaataaaagaagaaacaactagtcacctaaggtcctgcgagtacaagggtcgacccccaaaggcaggggcagagccagcatctgagagggaggtctcttgaccaatgggcagaatcttcactccaggcacatagccccaaccacctctgccagcaaccttgagaggaaggacaagaagaaagatgggatagaatttaaatagagaag

SEQ ID NO: 15502 - DNA, 1391 bp, Homo sapiens
  source 1..1391: mol_type = unassigned DNA
ccagcagagccatttaacctttgggaacaaggcaactagcgtctggcagcaggaatccaaccagtgccctgagttctgaggcagagaggaggacagaagaaacaagaggctggagattgtcaaattcagtatcccagttggctcttgattcttggtgaaaccatccctcagctcctagagggagattgttagatcatgaaactaattaccatccttttcctctgctccaggctgctactaagtttaacccaggaatcacagtccgaggaaattgactgcaatgacaaggatttatttaaagctgtggatgctgctctgaagaaatataacagtcaaaaccaaagtaacaaccagtttgtattgtaccgcataactgaagccactaagacggttggctctgacacgttttattccttcaagtacgaaatcaaggagggggattgtcctgttcaaagtggcaaaacctggcaggactgtgagtacaaggatgctgcaaaagcagccactggagaatgcacggcaaccgtggggaagaggagcagtacgaaattctccgtggctacccagacctgccagattactccagccgagggccctgtggtgacagcccagtacgactgcctcggctgtgtgcatcctatatcaacgcagagcccagacctggagcccattctgagacacggcattcagtactttaacaacaacactcaacattcctccctcttcatgcttaatgaagtaaaacgggcccaaagacaggataccggtgaatgtacagataatgcatacatcgatattcagctacgaattgcttccttctcacagaactgtgacatttatccagggaaggattttgtacaaccacctaccaagatttgcgtgggctgccccagagatatacccaccaacagcccagagctggaggagacactgactcacaccatcacaaagcttaatgcagagaataacgcaactttctatttcaagattgacaatgtgaaaaaagcaagagtacaggtggtggctggcaagaaatattttattgacttcgtggccagggaaaccacatgttccaaggaaagtaatgaagagttgaccgaaagctgtgagaccaaaaaacttggccaaagcctagattgcaacgctgaagtttatgtggtaccctgggagaaaaaaatttaccctactgtcaactgtcaaccactgggaatgatctcactgatgaaaaggcctccaggtttttcacctttccgatcatcacgaataggggaaataaaagaagaaacaactagtcacctaaggtcctgcgagtacaagggtcgacccccaaaggcaggggcagagccagcatctgagagggaggtctcttgaccaatgggcagaatcttcac

SEQ ID NO: 15503 - DNA, 608 bp, Homo sapiens
  source 1..608: mol_type = unassigned DNA
atggacatccccatcagcagcagagacttccgcggcctgcagctggcctgcgtggctctcgggctggtggctggcagcatcattatcggcatctccgtatccaaggctgcagctgccatgggcggtgtctttattggcgctgctgttctggggagcctaagaatccatccccatccaggggcagaccacggggaaggaagatccagcaccaatggcaacaaggaaggagcccgcagcagcctgtccaccgtgagcaggaccctggagaagctgaagccggggacccggggggctgaggaatgctgaggcaaagtctgagcggctgcccatgccctgccctcccatcctgcctgctgcccctatgtcagtgccctcctgggttaggagacccggaccggagacaagccaggccctgcagaccccagagcggctgggaacagtgtctggaatggggccttttgcactcgcccggccaagcctctccaaaatggattccactggtgtgggctgggacctggagcaaggtgtcgccggacgcccccacagggttcccatgtttcaggctcctgccctggcctttctttctggactgcagctcagctttgttg

SEQ ID NO: 15504 - DNA, 1037 bp, Homo sapiens
  source 1..1037: mol_type = unassigned DNA
gccaaagcagaaatgtagccagacaggagtcccaagggtgggcttcagcttcagagggctttgagagaggaagagtaagctgggtgacctcgtacagatccctggtcaaggtgggactggggggcccgtagtggagcagtggaataggactgcagataaatcccagggttccccacctatcatcttactgcccagaaactcctaccctgaagttggagcgccaacaaggagacatccaagagcccagaaacttccaggacttttctggggccagactgcaccggctggaggcagtgccccgggtgggcctgcatggacatccccatcagcagcagagacttccgcggcctgcagctggcctgcgtggctctcgggctggtggctggcagcatcattatcggcatctccgtatccaaggctgcagctgccatgggcggtgtctttattggcgctgctgttctggggctcctcatcttggcctaccccttcctgaaggctcggttcaacctggaccacatcctgcctaccatagggagcctaagaatccatccccatccaggggcagaccacggggaaggaagatccagcaccaatggcaacaaggaaggagcccgcagcagcctgtccaccgtgagcaggaccctggagaagctgaagccggggacccggggggctgaggaatgctgaggcaaagtctgagcggctgcccatgccctgccctcccatcctgcctgctgcccctatgtcagtgccctcctgggttaggagacccggaccggagacaagccaggccctgcagaccccagagcggctgggaacagtgtctggaatggggccttttgcactcgcccggccaagcctctccaaaatggattccactggtgtgggctgggacctggagcaaggtgtcgccggacgcccccacagggttcccatgtttcaggctcctgccctggcctttctttctggactgcagctcagctttgttgcctgttcaatctactgatttgtttctctggaatttggggtccaaggcc

SEQ ID NO: 15505 - DNA, 6082 bp, Homo sapiens
  source 1..6082: mol_type = unassigned DNA
atcctcagtctcccagttcaagctaatcattgacagagctttacaatcacaagcttttactgaagctttgataagacagtccagcagttggtggcaaatgaagccaggctgtgcggcaggatctccagggaatgaatggattttcttcagcactgatgaaataaccacacgctataggaatacaatgtccaacgggggattgcaaagatctgtcatcctgtcagcacttattctgctacgagctgttactggattctctggagatggaagagctatatggtctaaaaatcctaattttactccggtaaatgaaagtcagctgtttctctatgacactttccctaaaaactttttctggggtattgggactggagcattgcaagtggaagggagttggaagaaggatggaaaaggaccttctatatgggatcatttcatccacacacaccttaaaaatgtcagcagcacgaatggttccagtgacagttatatttttctggaaaaagacttatcagccctggattttataggagtttctttttatcaattttcaatttcctggccaaggcttttccccgatggaatagtaacagttgccaacgcaaaaggtctgcagtactacagtactcttctggacgctctagtgcttagaaacattgaacctatagttactttataccactgggatttgcctttggcactacaagaaaaatatggggggtggaaaaatgataccataatagatatcttcaatgactatgccacatactgtttccagatgtttggggaccgtgtcaaatattggattacaattcacaacccatatctagtggcttggcatgggtatgggacaggtatgcatgcccctggagagaagggaaatttagcagctgtctacactgtgggacacaacttgatcaaggctcactcgaaagtttggcataactacaacacacatttccgcccacatcagaagggttggttatcgatcacgttgggatctcattggatcgagccaaaccggtcggaaaacacgatggatatattcaaatgtcaacaatccatggtttctgtgcttggatggtttgccaaccctatccatggggatggcgactatccagaggggatgagaaagaagttgttctccgttctacccattttctctgaagcagagaagcatgagatgagaggcacagctgatttctttgccttttcttttggacccaacaacttcaagcccctaaacaccatggctaaaatgggacaaaatgtttcacttaatttaagagaagcgctgaactggattaaactggaatacaacaaccctcgaatcttgattgctgagaatggctggttcacagacagtcgtgtgaaaacagaagacaccacggccatctacatgatgaagaatttcctcagccaggtgcttcaagcaataaggttagatgaaatacgagtgtttggttatactgcctggtctctcctggatggctttgaatggcaggatgcttacaccatccgccgaggattattttatgtggattttaacagtaaacagaaagagcggaaacctaagtcttcagcacactactacaaacagatcatacgagaaaatggtttttctttaaaagagtccacgccagatgtgcagggccagtttccctgtgacttctcctggggtgtcactgaatctgttcttaagcccgagtctgtggcttcgtccccacagttcagcgatcctcatctgtacgtgtggaacgccactggcaacagactgttgcaccgagtggaaggggtgaggctgaaaacacgacccgctcaatgcacagattttgtaaacatcaaaaaacaacttgagatgttggcaagaatgaaagtcacccactaccggtttgctctggattgggcctcggtccttcccactggcaacctgtccgcggtgaaccgacaggccctgaggtactacaggtgcgtggtcagtgaggggctgaagcttggcatctccgcgatggtcaccctgtattatccgacccacgcccacctaggcctccccgagcctctgttgcatgccgacgggtggctgaacccatcgacggccgaggccttccaggcctacgctgggctgtgcttccaggagctgggggacctggtgaagctctggatcaccatcaacgagcctaaccggctaagtgacatctacaaccgctctggcaacgacacctacggggcggcgcacaacctgctggtggcccacgccctggcctggcgcctctacgaccggcagttcaggccctcacagcgcggggccgtgtcgctgtcgctgcacgcggactgggcggaacccgccaacccctatgctgactcgcactggagggcggccgagcgcttcctgcagttcgagatcgcctggttcgccgagccgctcttcaagaccggggactaccccgcggccatgagggaatacattgcctccaagcaccgacgggggctttccagctcggccctgccgcgcctcaccgaggccgaaaggaggctgctcaagggcacggtcgacttctgcgcgctcaaccacttcaccactaggttcgtgatgcacgagcagctggccggcagccgctacgactcggacagggacatccagtttctgcaggacatcacccgcctgagctcccccacgcgcctggctgtgattccctggggggtgcgcaagctgctgcggtgggtccggaggaactacggcgacatggacatttacatcaccgccagtggcatcgacgaccaggctctggaggatgaccggctccggaagtactacctagggaagtaccttcaggaggtgctgaaagcatacctgattgataaagtcagaatcaaaggctattatgcattcaaactggctgaagagaaatctaaacccagatttggattcttcacatctgattttaaagctaaatcctcaatacaattttacaacaaagtgatcagcagcaggggcttcccttttgagaacagtagttctagatgcagtcagacccaagaaaatacagagtgcactgtctgcttattccttgtgcagaagaaaccactgatattcctgggttgttgcttcttctccaccctggttctactcttatcaattgccatttttcaaaggcagaagagaagaaagttttggaaagcaaaaaacttacaacacataccattaaagaaaggcaagagagttgttagctaaactgatctgtctgcatgatagacagtttaaaaattcatcccagttccatatgctggtaacttacaggagatatacctgtattatagaaagacaatctgagatacagctgtaaccaaggtgatgacaattgtctctgctgtgtggttcaaagaacattcccttaggtgttgacatcagtgaactcagttcttggatgtaaacataaaggcttcatcctgacagtaagctatgaggattacatgctacattgcttcttaaagtttcatcaactgtattccatcattctgctttagctttcatctctaccaatagctacttgtggtacaataaattatttttaagaagtaaaactctggggctggacgctgtggctcacacctgtaatctcagcactttgggaggccgaggcggggagatcacctgaggtgaggagttcgagaccagcctggccaacatggtgaaaccatgtctctactaaaaatacaaaaaattagccaggcgtggtgacagtggcacctgtaatcccagctacttgggaggctgaggcagaagtttgaacccaggaaacaggttacagtaggccaaaattgcgccactgcactccagcctaggcgacaacagcaagactgtgtccaaaaaaaaaaaaaaaagcaaaagcaaaactttgttttgttagactctacagcagagatttaacacccttctttaaactgggtagtcagtgatagataatatatattctgtcacttctaataaggtgccttctcctttaggtcagggtggttctaaaatggaaagaaaacacaatagggtaagtagtgcttgtctaagccagttacaacacagactcttaaagaggatcaagcccttcatttttctaacaacaaaaaatcacctatagaatatctaatttgtgatcttttactagatctgattttttaaaataatgtaatttccggccaggcacggtggcaccgcctgtaatcccagcactttgggaggccaaggcaggtggatcacctgaggttaggagttcgagactagcctggccaacatggcaaaaccccatctctactaaaaatacaaaagttagccgggcatggtggtgggcacctgtaatcccagctactcaggaggccgaggcaggagaatcgcttgaacccgagaggcagaggttgcaatgagccaagatcgtgccattgcactccagcctgggggacagggcaagactgtctctcaaaataaaaaaaaataataaaaataaaaataaaagtaatttccaaaacctcatctcatggaaagatcacaggatgaaggaaagctagactcaactctgtgaatagaagttgctatactgtaagtaaagcaacaattcagaatactgaatgagtttaaattgttttatatagcacccttttgggctagggttaattactagatctgacttggataatttgacactttgggaaatgaactctgttcttgagacttgttcagtgtattttaaacatctgaggaagaaaacttaaatatgcacctatttatacctattctttctttaggtcaacatttaacacccactgcatacattaatttgtccttgtctgctcactccagcaatttagaccttaacagtcacaagagacgttcttctgttacaaagccttagtaaattaaggcagttttgattatattctaggtccacctatgtctgaagctaaattcagtatctaactgctaatgaacaagtttccaaaatactgtaaaaatacaattagtcaatttgagtaaatgcaaatatgatgagaaatcaatttgctatttggcctggcaaatgggaacagtaaaattctgctttactcttctctagtctccttgccccagctgcacccactaccccaaagttggcagttttgaggtatgattttcaaggaatttttttagtattaacatctccctctgagaactatgtacctaaggtcacgcatacaactagtcaattctgtttttattactctaactatgtagaaacagtaagtcacttaaaacaatcacttggctgggttttttcccctttgtgccacattgattcaccctgacccaagaactccagggaaaattctttaatgtcaactgggcaactcattaacctctctttaacatcaagggcttgggaaaaaaaaaaaaaaggttagccacaggaataacaaaaacctggaatttatctttcaggttttgctttctctttctcactttgtttaaagtatctcgtactcacagttcacaaattaaccttcactgtctctttcacattaagagcttatgcttaaagcatgccccccttttctaacttgctggtttaccataaactcccctaagtaataaaattcctaacccagtactgagagtcctccttctctgccacttgggcattattttactagtttttaagccatcatcgcacaagaatccaaaaacccttaaattttttaaccactggcaaatatgtacagcaaattaggttaagcatttaatctggctcatgctctatcatactaaatattcaggtttatcataaactccttaaaaaccatcaaaggtcaaccagaaactgataactcttgaaaggagcaaacaggtaagatctttggagtttaagcttttctgagatgtgttgtgaaaaatctaacgtgtttatcgtatattcaatgtaacaacctggagaatcacaactatatttaaagagcctctggaaaatgaggccagtacagtgtgactacatgtttaattttcaatgtaatttattccaaataaactggttcatgctgaccacttgtattcaactaacaa

SEQ ID NO: 15506 - DNA, 2111 bp, Homo sapiens
  source 1..2111: mol_type = unassigned DNA
gttggagacctgggcgagggagacgccgagagctaggctcagtgggagggggcgggcgtagaggctgaggcaccgcccagagctcgctgagacagagactgagaacgcccccggccagattccccccggagagacccgggtagggacagggacagagagacgcctctaggggcagaggccctgggaggcaaagacccccaggagagatttacccaccccagacggaaagcgcggctcagagtcggacgaggggagactgtcagaggacaacgccccctaggtctcctgggagaccccgaagcgaccccgggggcagcccgggccgtgtccgggcgagggtgacctatccttggttgagagcgatggggacacaagccctgcagggcttcctctttctcctcttcctcccgctgctgcagccgcgtggggcctcggctgggagcctgcacagtccaggcctgtccgaatgcttccaggtgaatggggctgactaccgcggccaccagaaccgcactggcccgcgcggggcgggccgcccgtgcctcttctgggaccagacgcagcaacacagctacagcagcgccagcgacccccacggccgctgggggctgggcgcgcacaacttctgccgtaacccagacggtgacgtgcagccgtggtgctacgtggctgagacagaggagggcatctactggcgctactgcgacatcccctcctgtcacatgccaggctacctgggatgctttgtggactcaggggcacccccagccctcagcggccccagcggcacctccacgaagctcacggtccaggtgtgcctacgcttctgccgcatgaaggggtaccagctggcgggcgtggaggccggttacgcctgcttctgtggctctgaaagcgacctggcccggggacgcctggcccccgccaccgactgtgaccagatctgtttcggccaccctggacagctgtgtggcggcgatgggcggctgggcgtctatgaagtgtcggtgggctcctgccaggggaactggacagcgcctcagggcgtcatctactccccggacttcccggacgagtacgggccggaccggaactgcagctgggccctgggcccgccaggcgccgcgctggagctcaccttccgcctcttcgagctggccgacccgcgcgaccggctggagctgcgcgacgcggcttcgggcagcctgctccgcgccttcgatggcgcccgcccaccgccgtccgggccgctgcgcctgggcactgccgcgctgctgctcaccttccgaagcgacgcgcgcggccacgcgcaaggcttcgcgctcacctaccgcgggctgcaggacgccgctgaggacccagaggcccccgagggctcggcccagacccccgcggcgcccctcgacggggccaacgtgagctgcagccccaggcctggggctccgccggccgcgattggggcccgggtcttctcgacggtgacggctgtctcggtgctgctgctgctgctcctggggctgctgcgtccgctgcgccgacggagctgtctgctggctccgggaaaagggcccccggcgctgggggcttccaggggccccaggagaagctgggctgtgtggtaccaacagccccgaggggtggccttgccctgctcccccggggacccccaggctgagggttctgccgcgggctaccggcctctgagtgcctccagccagagctccctgcgctcgctcatctccgctctctgactctgggccccgagggtccgctgggcccgccgccggcgagatggacacctgagatgctgtgctgcgccctgcctcggccttgcgcctgtgtaggggcagctcggcctctggtcgccttggggagaccaaaagtcggacaggaaacatctggtgctattatctgggacttggcctgaccgtgggggtccagatggtccaggccctctccatggacctgtatgtgggggtggtctctggtttcggaggtctttgaacccctctgggggtggtcctggactgccgtcctcagtgagaggtcacaggtcagcaaaaacagtcaaaaaacccccacagattttgaataaaggatctactttggta

SEQ ID NO: 15507 - DNA, 1879 bp, Homo sapiens
  source 1..1879: mol_type = unassigned DNA
agagagacgcctctaggggcagaggccctgggaggcaaagacccccaggagagatttacccaccccagacggaaagcgcggctcagagtcggacgaggggagactgtcagaggacaacgccccctaggtctcctgggagaccccgaagcgaccccgggggcagcccgggccgtgtccgggcgagggtgacctatccttggttgagagcgatggggacacaagccctgcagggcttcctctttctcctcttcctcccgctgctgcagccgcgtggggcctcggctgggagcctgcacagtccaggcctgtccgaatgcttccaggtgaatggggctgactaccgcggccaccagaaccgcactggcccgcgcggggcgggccgcccgtgcctcttctgggaccagacgcagcaacacagctacagcagcgccagcgacccccacggccgctgggggctgggcgcgcacaacttctgccgtaacccagacggtgacgtgcagccgtggtgctacgtggctgagacagaggagggcatctactggcgctactgcgacatcccctcctgtcacatgccaggctacctgggatgctttgtggactcaggggcacccccagccctcagcggccccagcggcacctccacgaagctcacggtccaggtgtgcctacgcttctgccgcatgaaggggtaccagctggcgggcgtggaggccggttacgcctgcttctgtggctctgaaagcgacctggcccggggacgcctggcccccgccaccgactgtgaccagatctgtttcggccaccctggacagctgtgtggcggcgatgggcggctgggcgtctatgaagtgtcggtgggctcctgccaggggaactggacagcgcctcagggcgtcatctactccccggacttcccggacgagtacgggccggaccggaactgcagctgggccctgggcccgccaggcgccgcgctggagctcaccttccgcctcttcgagctggccgacccgcgcgaccggctggagctgcgcgacgcggcttcgggcagcctgctccgcgccttcgatggcgcccgcccaccgccgtccgggccgctgcgcctgggcactgccgcgctgctgctcaccttccgaagcgacgcgcgcggccacgcgcaaggcttcgcgctcacctaccgcgggctgcaggacgccgctgaggacccagaggcccccgagggctcggcccagacccccgcggcgcccctcgacggggccaacgtgagctgcagccccaggcctggggctccgccggccgcgattgggggagctgtctgctggctccgggaaaagggcccccggcgctgggggcttccaggggccccaggagaagctgggctgtgtggtaccaacagccccgaggggtggccttgccctgctcccccggggacccccaggctgagggttctgccgcgggctaccggcctctgagtgcctccagccagagctccctgcgctcgctcatctccgctctctgactctgggccccgagggtccgctgggcccgccgccggcgagatggacacctgagatgctgtgctgcgccctgcctcggccttgcgcctgtgtaggggcagctcggcctctggtcgccttggggagaccaaaagtcggacaggaaacatctggtgctattatctgggacttggcctgaccgtgggggtccagatggtccaggccctctccatggacctgtatgtgggggtggtctctggtttcggaggtctttgaacccctctgggggtggtcctggactgccgtcctcagtgagaggtcacaggtcagcaaaaacagtcaaaaaacccccacagattttgaataaaggatctactttggta

SEQ ID NO: 15508 - DNA, 1877 bp, Homo sapiens
  source 1..1877: mol_type = unassigned DNA
agattccccccggagagacccgggtagggacagggacagagagacgcctctaggggcagaggccctgggaggcaaagacccccaggagagatttacccaccccagacggaaagcgcggctcagagtcggacgaggggagactgtcagaggacaacgccccctaggtctcctgggagaccccgaagcgaccccgggggcagcccgggccgtgtccgggcgagggtgacctatccttggttgagagcgatggggacacaagccctgcagggcttcctctttctcctcttcctcccgctgctgcagccgcgtggggcctcggctgggagcctgcacagtccaggcctgtccgaatgcttccaggtgaatggggctgactaccgcggccaccagaaccgcactggcccgcgcggggcgggccgcccgtgcctcttctgggaccagacgcagcaacacagctacagcagcgccagcgacccccacggccgctgggggctgggcgcgcacaacttctgccgtaacccagacggtgacgtgcagccgtggtgctacgtggctgagacagaggagggcatctactggcgctactgcgacatcccctcctgtcacatgccaggctacctgggatgctttgtggactcaggggcacccccagccctcagcggccccagcggcacctccacgaagctcacggtccaggtgtgcctacgcttctgccgcatgaaggggtaccagctgtgtggcggcgatgggcggctgggcgtctatgaagtgtcggtgggctcctgccaggggaactggacagcgcctcagggcgtcatctactccccggacttcccggacgagtacgggccggaccggaactgcagctgggccctgggcccgccaggcgccgcgctggagctcaccttccgcctcttcgagctggccgacccgcgcgaccggctggagctgcgcgacgcggcttcgggcagcctgctccgcgccttcgatggcgcccgcccaccgccgtccgggccgctgcgcctgggcactgccgcgctgctgctcaccttccgaagcgacgcgcgcggccacgcgcaaggcttcgcgctcacctaccgcgggctgcaggacgccgctgaggacccagaggcccccgagggctcggcccagacccccgcggcgcccctcgacggggccaacgtgagctgcagccccaggcctggggctccgccggccgcgattggggcccgggtcttctcgacggtgacggctgtctcggtgctgctgctgctgctcctggggctgctgcgtccgctgcgccgacggagctgtctgctggctccgggaaaagggcccccggcgctgggggcttccaggggccccaggagaagctgggctgtgtggtaccaacagccccgaggggtggccttgccctgctcccccggggacccccaggctgagggttctgccgcgggctaccggcctctgagtgcctccagccagagctccctgcgctcgctcatctccgctctctgactctgggccccgagggtccgctgggcccgccgccggcgagatggacacctgagatgctgtgctgcgccctgcctcggccttgcgcctgtgtaggggcagctcggcctctggtcgccttggggagaccaaaagtcggacaggaaacatctggtgctattatctgggacttggcctgaccgtgggggtccagatggtccaggccctctccatggacctgtatgtgggggtggtctctggtttcggaggtctttgaacccctctgggggtggtcctggactgccgtcctcagtgagaggtcacaggtcagcaaaaacagtcaaaaaacccccacagattttgaataaaggatctactttggt

SEQ ID NO: 15509 - DNA, 1798 bp, Homo sapiens
  source 1..1798: mol_type = unassigned DNA
agattccccccggagagacccgggtagggacagggacagagagacgcctctaggggcagaggccctgggaggcaaagacccccaggagagatttacccaccccagacggaaagcgcggctcagagtcggacgaggggagactgtcagaggacaacgccccctaggtctcctgggagaccccgaagcgaccccgggggcagcccgggccgtgtccgggcgagggtgacctatccttggttgagagcgatggggacacaagccctgcagggcttcctctttctcctcttcctcccgctgctgcagccgcgtggggcctcggctgggagcctgcacagtccaggcctgtccgaatgcttccaggtgaatggggctgactaccgcggccaccagaaccgcactggcccgcgcggggcgggccgcccgtgcctcttctgggaccagacgcagcaacacagctacagcagcgccagcgacccccacggccgctgggggctgggcgcgcacaacttctgccgtaacccagacggtgacgtgcagccgtggtgctacgtggctgagacagaggagggcatctactggcgctactgcgacatcccctcctgtcacatgccaggctacctgggatgctttgtggactcaggggcacccccagccctcagcggccccagcggcacctccacgaagctcacggtccaggtgtgcctacgcttctgccgcatgaaggggtaccagctgtgtggcggcgatgggcggctgggcgtctatgaagtgtcggtgggctcctgccaggggaactggacagcgcctcagggcgtcatctactccccggacttcccggacgagtacgggccggaccggaactgcagctgggccctgggcccgccaggcgccgcgctggagctcaccttccgcctcttcgagctggccgacccgcgcgaccggctggagctgcgcgacgcggcttcgggcagcctgctccgcgccttcgatggcgcccgcccaccgccgtccgggccgctgcgcctgggcactgccgcgctgctgctcaccttccgaagcgacgcgcgcggccacgcgcaaggcttcgcgctcacctaccgcgggctgcaggacgccgctgaggacccagaggcccccgagggctcggcccagacccccgcggcgcccctcgacggggccaacgtgagctgcagccccaggcctggggctccgccggccgcgattgggggagctgtctgctggctccgggaaaagggcccccggcgctgggggcttccaggggccccaggagaagctgggctgtgtggtaccaacagccccgaggggtggccttgccctgctcccccggggacccccaggctgagggttctgccgcgggctaccggcctctgagtgcctccagccagagctccctgcgctcgctcatctccgctctctgactctgggccccgagggtccgctgggcccgccgccggcgagatggacacctgagatgctgtgctgcgccctgcctcggccttgcgcctgtgtaggggcagctcggcctctggtcgccttggggagaccaaaagtcggacaggaaacatctggtgctattatctgggacttggcctgaccgtgggggtccagatggtccaggccctctccatggacctgtatgtgggggtggtctctggtttcggaggtctttgaacccctctgggggtggtcctggactgccgtcctcagtgagaggtcacaggtcagcaaaaacagtcaaaaaacccccacagattttgaataaaggatctactttggt

SEQ ID NO: 15510 - DNA, 3378 bp, Homo sapiens
  source 1..3378: mol_type = unassigned DNA
gagcaggtgggcaggagggtctccgactccagagacctgagcttttggggcgcgggtgggagcgcgggggaaccctcaagacggctttcttttggcgactgagggtttttctgccacaggaagctgggccgggctgctgtgcctgggaggagggaaggaggaatgagaaagcggtgacggtccctgccccccctcgccaggtgactgtcccacccatttagttgaatgtagcggccagagaggcactcgcggcagcccgtacgggtgggacctctcggtgtccttcgggaaacaggaggagcaagttcgactccagcgagggaaaacggaggtgggagactgaaccatctccacatctagttgccccaggtttttggctttcatcgctttttctacatgtttttagcctcaccagaagtctttcatctcggtggtccaactcaggatctcagcctcattattttcttacccttctggagtgcatatgtgcctttacagtttctgtttgcaaacgctgtctagcatactaagaggatgttagcaaacctgttccatggacactaaatggcagttgtacatctcccctcatcagtcatagtgacaaccagaaatgccctccatattttccagtgatcccagtcttcaatgcgtctgtctcataatttgtaaacgtttattatcttgaagtcattgttaatctgtggtgaaaagtaattgctaaatagaaattctgagaagaaaaaggcctcatccttttcacatgatgtaggaaggtctgttgcatgagcaatgggaaatccagaaaacatagaagatgcatatgttgctgttattcgtccaaagaatactgccagtctcaattctcgggaatacagagctaagtcatatgaaattttgttgcatgaagttcccattgaaggacagaaaaaaaagagaaagaaagttttattggaaacgaaacttcaaggcaacagtgaaataacacaaggcatattggattacgtagtagaaaccaccaaaccaatttctcctgcaaaccagggtatcagaggaaaacgagttgtactaatgaaaaaatttcctctggatggagagaagatgggcagagaagcatcattatttattgttccatcagttgtcaaagataatactaaatacacatataccccaggatgcccaattttttactgcttacaagatattatgcgagtctgtagtgaatccagtactcattttgctacacttacagcaaggatgttaatagccttggataagtggttagatgaacgtcatgcacaatctcactttattccagctttattccgaccttctcctcttgagcggataaaaactaatgtcataaatcctgcatatgctactgaatcaggtcagacagaaaactcactacatatgggctatagtgcactagaaataaagagtaaaatgttagccctagagaaagcagatacctgtatttacaaccctttgtttggatcagatcttcagtatacaaatcgggtagataaagtggtaataaatccatactttggtctaggagctccagactactcaaaaatccaaatacctaaacaggaaaaatggcagagaagcatgagcagtgtcacagaagacaaggaacgacagtgggtagatgattttcctctccaccgaagcgcctgtgaaggagattcagaattactaagccgtcttctcagtgaaagattttcagtcaaccagttagatagtgaccactgggcacccattcattatgcatgctggtatggaaaagttgaggccactcgcatattgttagagaaaggaaagtgcaatccaaaccttttaaatggacaacttagttctcctcttcattttgctgctggaggaggacatgctgaaatagtacagattctcctaaaccacccagaaacggatagacatataacagaccaacaaggaagatctccattaaatatttgtgaagaaaacaaacaaaacaactgggaagaagctgcaaaattgttgaaggaagcaattaacaaaccatatgaaaaagttcgaatatacagaatggatgggtcatatcgttctgttgaattgaagcatggaaataataccacagtgcagcagataatggaaggaatgcgtctctctcaagaaactcagcaatatttcactatatggatttgttcagaaaacctcagccttcaactcaaaccatatcataaacccttgcaacatgttcgtgactggccagaaatacttgctgaattgactaatctggatcctcaaagggaaacacctcagctttttctaagaagagatgtgagacttcccttggaagttgaaaaacagattgaagacccactagctattcttattctctttgatgaagccagatataatttattgaagggcttttatacagctcctgatgctaagctgataacattggcaagtctgcttttgcaaatagtctatggaaattatgagagtaaaaaacacaagcaaggtttcctaaatgaagaaaatctaaaatccatcgtacctgttaccaaactgaaaagtaaggcacctcactggacaaatcgcatacttcatgaatacaagaatctcagtacaagtgaaggtgtcagtaaagaaatgcatcaccttcagcgcatgttcttacagaattgctgggaaattcctacttatggagcagcatttttcacaggacagatatttacaaaggcaagccccagcaatcataaagtcatccctgtgtatgtaggagtgaatataaaaggacttcatctcctcaacatggaaactaaggctttactcatcagtcttaagtatggttgttttatgtggcaattgggagatactgatacttgttttcagatccatagcatggaaaataaaatgagctttatagtacatacaaaacaggctggtctcgtggtaaaactgttaatgaagctaaatggacagttaatgcccactgaaagaaattcatgaaagagaagtaactgttactcaagccaccacattttgtaatgcagagttttttttccgtgaaagatttcttaaaatattacttttggccgagcatggtggctcacccctgtaattccagcactttgggaggctggggcaggcggatcacctgaagtcagagttcaagaccagcctggccaacatggtgaaaccctgtctctacaaaaatacaaaaattagctgggtgtggtggcgggcgcctataatcctagctactagggaggccaaggtgggagatcgcttaaacccaggaggtggaggttgtagtgagccaagattgcaccacggcacgctagcctgggtgacacagcaagactccatctcaaaaaaaaaaaaaaa

SEQ ID NO: 15511 - DNA, 4075 bp, Homo sapiens
  source 1..4075: mol_type = unassigned DNA
ggagccaccggaagcagcttgcaaatggcgtctccctcgctggagcggccagaaaaaggcgctggaaaaagtgaatttcgtaaccagaagccgaagccggagaaccaagatgaatcagaactccttacggttcctgatggttggaaggaaccagctttttccaaagaggacaatcccagaggacttttggaggagagcagtttcgcaactttgttcccaaaatacagggaagcttacttgaaagagtgttggccattggtgcagaaagccttaaatgaacatcatgttaatgcaaccctggacctgatcgaaggcagcatgactgtttgtactacaaagaagacttttgatccatatatcatcattagggccagagatctgataaaactgttagcaaggagtgtttcatttgaacaggcagtacgaattcttcaggatgatgttgcatgtgacatcattaaaataggttctttagtaaggaataaagagagatttgtaaaacgaagacaacggcttattggtcccaaaggatctacattgaaggcattggaactcttaactaattgttacattatggttcagggaaacacagtttcagccattggaccttttagtggcttaaaagaggttagaaaagtagtccttgatactatgaagaatattcatccaatttataacattaaaagcttaatgattaagagagagttggcaaaagattctgaattacgatcacaaagttgggagagatttttgccacagttcaaacacaaaaatgtgaataaacgcaaggaaccaaagaaaaaaactgttaagaaagaatatacgccattcccaccaccacaaccagaaagtcagatcgataaagaattggctagtggtgaatactttttgaaggcaaatcagaagaagcggcagaaaatggaagcaataaaggctaaacaagcagaagccatcagtaagagacaagaggaaagaaacaaagcatttattccacctaaggaaaaaccaattgtgaaacctaaggaagcttctactgaaactaaaattgatgtggccagcatcaaggaaaaggttaagaaagcaaagaataagaaactgggagctcttacagctgaagaaattgcacttaagatggaggcagatgaaaagaaaaagaagaaaaaaaagtaacatacccaaaactccttgactagaactatctccttttgtaaaggattttgagatatcaggcattagttgccttatttgtgagaaattttctgagggctttttttttttttggtggtggtggttgttcatagaagagtgttctttataaattatattattattgtattttttgaaaaatttatacgagaaagtggtatataagtctttgtatacattacgaccattgtgattatccattaaatccagtgtctgatgctattggttagtaatgatgtcccagcatttgatgttccctctctaatgataacaagtaaatatttaggtttatcccttttgaaagtttggttttacttttaacagtccatgaacagaaaattaaggcctctaaaatcagatcccctagttactcctctgttctgaatctggggaagtagtaaaccaaaaagacagggaaaaccagatatttagagtcgaagcagcatgcaaaaaataataatgtttttaactaatgaaggctactggagttactaagaatcacctaaaaatgtgctactgtaccttgctcattttgcagatttagaagctgaaacatgggttaggttacttactaaaagtccacctgtggcaacctgcaaataatgcttatttatactaaagatgagtttatctgatagagttaggaaatttcttcttttgagtaagagtattgctataacatatatttttttctgaaatgttttaaaatagaagtacacctaattgttattggttaaaaaaaaagccatatgtgaatgaggttggtttttgggttttttctttcctgaattgtattagtccaaaagaactaaattagggtacttgtgctgtaccaaaatggtaattataacagacagtattagaattactgaattaacaatgagaaagagagaagtgtatctgttacgtggatatatgggccagcctggatatacaacagagtagtaacctgtgaaacaaacatagaatatcctcttagacattgttcctcataatgcactgacagaattcacatagctcttaatgaaacaatttaagattgatgtacgtacgtttgacttggtctcgctgtcggttaactgtaaagttagggggaagaaagaaaaaaaattaaaagggtagacacagttgagagttttattttaaaaagctaagtcttataattatgaccattaacttgctttggctttattgcagtgactttccaagtttaattattcaaaactttttgaactgactgaattaacttggtatttttaagttgactttttacataaactttataaaccttttataaaaaggaaactataccattactataaatggaaaatcattttacacatcatacctagcaggtaataaaatttaaaaaataaaaattaaatattagaatgtgagaaatttattaaaatatagttctaaaaataagtttcttcctgagaagaatgatactgtttatgatgaatccatagtgaaaagacagtgacctctctttcatccagtctagtatatcactaaatcatcattacgatgtttggctatcaagtcattaattactgtcctcctttcactgagctttattcaaattttgacaatcagagcactgggaagaaataaattccacaactgcctttagccttctggatactttcttttataaaatagaaaccttttccacaccagttctgcagcagtcgctattagatgctcgtggtagaacccatcaatcatctggtcctctgggtactggtgagcatccctggtcttcatacctgtgagtgggctttgtggtgaattactgtaaatatgctaccctcacttttcttggcagttatgtcgatgaaatcaagagtgtgatgttctagttatttttttttatatatatttttaaatgttcaatattcaactattgaaacaaatgtacatctgtgaactagctaaaatcatcttatgtaccactaatatgcccagcacattttgtaaaacagtcctgatttggcctccaagggtatttattgaactaccagcagtatctaggagaccacgaaggaataccacgaaggaatttatgctccagtgcttgccataatttgtctgagaaggaatctgttaaataaaagcttttatcctctaacctttaccttcatcagaccttataaaaggtcaaatggtgattcttaagttttttagtcacaaatcttacttattcagtattagtgcgaagagtagaatactttcaagtaagcctaaacttacatgaaaacaaattacataaatctagctctgagaataggaaattagtgacaagatcaatctgtaagatgttgagcacttatctgaagtaaatgggtaatgagtttcacatcttataaatacaagttagcatgtgttttctcaagagtccaagggttttcattattggactacagctttaatcttctaaatgttattccccaagattaaagagcatctcaagttagatcaccaaagatcaaaagctaaaaccagaagtatttttgtcattgtggtggtggtagtgttactaattgcctagatttttaaagggaaacatttttttcactgggttgtttcgttgaaaaaaatagaagcagaaacttgcccaaagtcacagtggtcaaactggaaattgcaccaaaacttggcatactggttctgaaatccatagttttagcccttatgtatactggttaatttggaaggaagaaatatatacgttctgaagtgaagagtgagtgaaaggaagaattcagtgaatacattgataccttgatattatctgcattgtggctacatgttacttttcttcacaagagtgatataagtgaaataaagaatgattggactggga

SEQ ID NO: 15512 - DNA, 4030 bp, Homo sapiens
  source 1..4030: mol_type = unassigned DNA
gagggccgcgccggggcagagccgcgcgggcgggcgaggcgcgtgccggccgcaggagctccgggttgccgccgccgccgccgcccgcagcccacgtgcggccgctgctgcgcccgagctcacgccccgcggccgctttgttgctcccggccggcctgcacgatgcacacgccggacttcgcaggcccagacgacgcgcgcgcagttgacatcatggacatatgtgagtccatcctggagaggaagcggcatgacagcgaaaggtctacttgcagcatcttggagcagacagacatggaagctgtcgaggctcttgtttgtatgagctcctggggtcaaagatcccagaaaggtgacctgttgcggataagacccctcacgcctgtctctgactctggggatgtcaccaccactgtgcatatggatgcagccacacctgaactaccaaaagacttccattctttatcgactctgtgcataactcctcctcagagccctgatctcgtggagccatcgacaaggacacctgtttctccccaagtaacagattccaaagcatgtacagccacggatgttctccagtcctctgccgtagtggccagagctctgagcgggggcgcggagaggggcttgctgggtttggagccagtgcccagctctccctgcagggccaaggggactagcgtgatccgacacactggggagagccctgctgcctgctttcccaccatccagactccagattgccggctttctgacagcagagaaggagaagagcagcttctgggacactttgaaactttgcaggacacacacctcacggacagtttactcagcactaacttggtgtcctgtcagccctgcttgcacaagtctggtggcctgctgctcactgacaaaggccagcaggcagggtggcctggtgcagttcagacttgctcaccaaagaattatgaaaatgacctgcccaggaaaaccacccctctgatttctgtctctgtccctgctccccctgtcctttgccagatgatccctgtgactggacaaagtagcatgttaccagcttttttgaagccccctccccagttgtctgtggggactgtgagacccatcctagctcaggctgctccagcgcctcaacctgtgttcgtgggacctgctgtgcctcagggagctgtgatgttggtcctgccccagggagccctccctccgcctgccccctgtgcagccaatgtcatggctgccgggaataccaagttgttgccccttgcccctgctccagtgttcatcacctctagccaaaactgtgtccctcaggtagacttttcccgaaggaggaactatgtatgcagcttcccaggttgccggaagacctacttcaaaagttcccaccttaaggcccatcttcgcactcacacaggggagaagcctttcaactgcagctgggatggctgtgataaaaagtttgctcgttcggatgagctgtcacgccaccgcagaactcacacaggggagaagaagtttgtgtgcccggtgtgtgaccgacgtttcatgcgcagtgaccacctgacgaagcatgcccggcgccacatgacgaccaagaagatcccaggctggcaggcagaggttggcaagctgaacagaatcgcctctgcagagagcccggggagcccactggtgagcatgccagcctctgcctgaaaggtccattaggacatcactcatgggatttttaaaaagcctctttccaggaatggaactgatggattcctctcccactgcctcacccaaaaaaaacggtcttggcggcctaggggaagatcggggagctggttttgatgaaagtatgttaacttttcttttccacttgggaccctgttcagtatcttttgtagtttcagaagtttttttgttttggttttttttttaaagaaatggtagaaaatttgataatctgaatcaccagcattcaaacaaatatttcggcaataaagtttacaaaatctggatttttacaaccttttctattgatgttttgtagaaataagacagggtactaatttttatactggtttttagaaaaatatttatattgttggtgctcaaatcaccaatttctagctagatcattttgcagccttcttttcagtgtttaataacaaagtttttcctaatggcccttcttttagtaaactggacatgttattccactacaaaaaccacaagttatctggccttttagatctttttggaatcggacctggttgagtaaggacctcttaaaagggaaaaataaattttgccgtcagcttcttcataacgttttcaaggaaattctaggcaatcattcctgtcaccaaagaactaaaattttggttgactggaactagtgagctgtgtccatggtgtgtcatgaaggatgtaccccagagagtaacatgagccactgggcagatcccagggaccagtacttgctgcaggatctagtctgtaatagtcttggccatggctctgctgaaagcaagccattcagtttcttgtttgtacctaaaacaccaaaaaagaaacactcaaatccagctgctttgtcaattgtcagttctgactccttttgctgtggccttatccgtactatattgtgggtagagtaacttctcagaaaaaaaggaaatgtctgtattggttggatgaaactccaccagagcacagcttagctggggcgagatgcatgtgaaggcaggcagtgccaagattccgcttcctttgtttgccaaatactagaaacacaaggaaatgcaagttacgctaaatggcagtaatactacccaactgcctttctgttcattttgtttgaaggaaattgttttgaccaaacagaaaattacttggaatggtgtgttttacagtctacctagaaaatagatggacaatatttttcaactgtatgagcacgtagataaccgagagaatgtggccacctgtgttcaagaagccactgatactggtttttgttaaacattggaagttcaggcaatggaataaatgtaggaacatacagaatgttgcactaatttggtagcctgggaattttttttattgtgcagtatgtatttaaattttgtctatgttaattaccagcatttacctttatttaaatgatggtaaggtggaatattgaataaaattaggttttgtgttttgttctttgtagtctgataaaatctccacctggtcattcattgtgtgtgacttgatacctgttaacttgccccttagtatcagctgttacttgacacaaatgtgtgtgttattcagaggttttcagtctggacactccataggtgagtgtcgtgtcttcgtgagacagcacagttgtctcatgttgtgcatagttcatgtttcctcaccacccagtcctttctcctgctcatcaaaatcagcatacacatttttgactgtacacactataaatggcatcaaatttggatatttttcttaattatgacatgcaaagtaatgtgagtcctgccagtattctggtggataaggtcttttgagtatttggttgcttgtcacaacattctccaagcagtgatatttctaaagaggagatacatgttgaaaacggttttaatttacacttccatttcctgattacatttggaaatactttgtgtaaaccatcccccttccacctccatttgtctgttgaaagattttaagttggaaacagttcctgtctgaaaactcttctgagaaccacaaaccttgtgtatggattcggcatggagccctcagctggcggctctgggtgctgacggccgctggagaggtgggctcccctcgtgcactttattgcctgggcagttttgcttgatcttttgtgactttgagccttttaagtagtttgaatgataagacttaaaatgtttcataattatgttttatgtaacagactttgacattatttaaacgagcatgtgtaatgtaacttttctctttgaatcatataaaacttgattttacattg

SEQ ID NO: 15513 - DNA, 4033 bp, Homo sapiens
  source 1..4033: mol_type = unassigned DNA
ggggccggggcaacgacgggaggcgggagcgccgcactgccttggaggcggggcaacgcttggaggcgggaacgcggcacgcgagcgttgggggccctaagcgtcgcgacctgggggcttcggggaggtagccgtggacgtgggcagagcgcgggcctcgtggtgtgcgggcactgtgggccgggcgagccccttcccgcccgtgtggttgacatcatggacatatgtgagtccatcctggagaggaagcggcatgacagcgaaaggtctacttgcagcatcttggagcagacagacatggaagctgtcgaggctcttgtttgtatgagctcctggggtcaaagatcccagaaaggtgacctgttgcggataagacccctcacgcctgtctctgactctggggatgtcaccaccactgtgcatatggatgcagccacacctgaactaccaaaagacttccattctttatcgactctgtgcataactcctcctcagagccctgatctcgtggagccatcgacaaggacacctgtttctccccaagtaacagattccaaagcatgtacagccacggatgttctccagtcctctgccgtagtggccagagctctgagcgggggcgcggagaggggcttgctgggtttggagccagtgcccagctctccctgcagggccaaggggactagcgtgatccgacacactggggagagccctgctgcctgctttcccaccatccagactccagattgccggctttctgacagcagagaaggagaagagcagcttctgggacactttgaaactttgcaggacacacacctcacggacagtttactcagcactaacttggtgtcctgtcagccctgcttgcacaagtctggtggcctgctgctcactgacaaaggccagcaggcagggtggcctggtgcagttcagacttgctcaccaaagaattatgaaaatgacctgcccaggaaaaccacccctctgatttctgtctctgtccctgctccccctgtcctttgccagatgatccctgtgactggacaaagtagcatgttaccagcttttttgaagccccctccccagttgtctgtggggactgtgagacccatcctagctcaggctgctccagcgcctcaacctgtgttcgtgggacctgctgtgcctcagggagctgtgatgttggtcctgccccagggagccctccctccgcctgccccctgtgcagccaatgtcatggctgccgggaataccaagttgttgccccttgcccctgctccagtgttcatcacctctagccaaaactgtgtccctcaggtagacttttcccgaaggaggaactatgtatgcagcttcccaggttgccggaagacctacttcaaaagttcccaccttaaggcccatcttcgcactcacacaggggagaagcctttcaactgcagctgggatggctgtgataaaaagtttgctcgttcggatgagctgtcacgccaccgcagaactcacacaggggagaagaagtttgtgtgcccggtgtgtgaccgacgtttcatgcgcagtgaccacctgacgaagcatgcccggcgccacatgacgaccaagaagatcccaggctggcaggcagaggttggcaagctgaacagaatcgcctctgcagagagcccggggagcccactggtgagcatgccagcctctgcctgaaaggtccattaggacatcactcatgggatttttaaaaagcctctttccaggaatggaactgatggattcctctcccactgcctcacccaaaaaaaacggtcttggcggcctaggggaagatcggggagctggttttgatgaaagtatgttaacttttcttttccacttgggaccctgttcagtatcttttgtagtttcagaagtttttttgttttggttttttttttaaagaaatggtagaaaatttgataatctgaatcaccagcattcaaacaaatatttcggcaataaagtttacaaaatctggatttttacaaccttttctattgatgttttgtagaaataagacagggtactaatttttatactggtttttagaaaaatatttatattgttggtgctcaaatcaccaatttctagctagatcattttgcagccttcttttcagtgtttaataacaaagtttttcctaatggcccttcttttagtaaactggacatgttattccactacaaaaaccacaagttatctggccttttagatctttttggaatcggacctggttgagtaaggacctcttaaaagggaaaaataaattttgccgtcagcttcttcataacgttttcaaggaaattctaggcaatcattcctgtcaccaaagaactaaaattttggttgactggaactagtgagctgtgtccatggtgtgtcatgaaggatgtaccccagagagtaacatgagccactgggcagatcccagggaccagtacttgctgcaggatctagtctgtaatagtcttggccatggctctgctgaaagcaagccattcagtttcttgtttgtacctaaaacaccaaaaaagaaacactcaaatccagctgctttgtcaattgtcagttctgactccttttgctgtggccttatccgtactatattgtgggtagagtaacttctcagaaaaaaaggaaatgtctgtattggttggatgaaactccaccagagcacagcttagctggggcgagatgcatgtgaaggcaggcagtgccaagattccgcttcctttgtttgccaaatactagaaacacaaggaaatgcaagttacgctaaatggcagtaatactacccaactgcctttctgttcattttgtttgaaggaaattgttttgaccaaacagaaaattacttggaatggtgtgttttacagtctacctagaaaatagatggacaatatttttcaactgtatgagcacgtagataaccgagagaatgtggccacctgtgttcaagaagccactgatactggtttttgttaaacattggaagttcaggcaatggaataaatgtaggaacatacagaatgttgcactaatttggtagcctgggaattttttttattgtgcagtatgtatttaaattttgtctatgttaattaccagcatttacctttatttaaatgatggtaaggtggaatattgaataaaattaggttttgtgttttgttctttgtagtctgataaaatctccacctggtcattcattgtgtgtgacttgatacctgttaacttgccccttagtatcagctgttacttgacacaaatgtgtgtgttattcagaggttttcagtctggacactccataggtgagtgtcgtgtcttcgtgagacagcacagttgtctcatgttgtgcatagttcatgtttcctcaccacccagtcctttctcctgctcatcaaaatcagcatacacatttttgactgtacacactataaatggcatcaaatttggatatttttcttaattatgacatgcaaagtaatgtgagtcctgccagtattctggtggataaggtcttttgagtatttggttgcttgtcacaacattctccaagcagtgatatttctaaagaggagatacatgttgaaaacggttttaatttacacttccatttcctgattacatttggaaatactttgtgtaaaccatcccccttccacctccatttgtctgttgaaagattttaagttggaaacagttcctgtctgaaaactcttctgagaaccacaaaccttgtgtatggattcggcatggagccctcagctggcggctctgggtgctgacggccgctggagaggtgggctcccctcgtgcactttattgcctgggcagttttgcttgatcttttgtgactttgagccttttaagtagtttgaatgataagacttaaaatgtttcataattatgttttatgtaacagactttgacattatttaaacgagcatgtgtaatgtaacttttctctttgaatcatataaaacttgattttacattg

SEQ ID NO: 15514 - DNA, 3885 bp, Homo sapiens
  source 1..3885: mol_type = unassigned DNA
actcgcgcgcctgtaaatgcgggaggtggggcgtgcagggcttcgctgcggccgcgccggttgacatcatggacatatgtgagtccatcctggagaggaagcggcatgacagcgaaaggtctacttgcagcatcttggagcagacagacatggaagctgtcgaggctcttgtttgtatgagctcctggggtcaaagatcccagaaaggtgacctgttgcggataagacccctcacgcctgtctctgactctggggatgtcaccaccactgtgcatatggatgcagccacacctgaactaccaaaagacttccattctttatcgactctgtgcataactcctcctcagagccctgatctcgtggagccatcgacaaggacacctgtttctccccaagtaacagattccaaagcatgtacagccacggatgttctccagtcctctgccgtagtggccagagctctgagcgggggcgcggagaggggcttgctgggtttggagccagtgcccagctctccctgcagggccaaggggactagcgtgatccgacacactggggagagccctgctgcctgctttcccaccatccagactccagattgccggctttctgacagcagagaaggagaagagcagcttctgggacactttgaaactttgcaggacacacacctcacggacagtttactcagcactaacttggtgtcctgtcagccctgcttgcacaagtctggtggcctgctgctcactgacaaaggccagcaggcagggtggcctggtgcagttcagacttgctcaccaaagaattatgaaaatgacctgcccaggaaaaccacccctctgatttctgtctctgtccctgctccccctgtcctttgccagatgatccctgtgactggacaaagtagcatgttaccagcttttttgaagccccctccccagttgtctgtggggactgtgagacccatcctagctcaggctgctccagcgcctcaacctgtgttcgtgggacctgctgtgcctcagggagctgtgatgttggtcctgccccagggagccctccctccgcctgccccctgtgcagccaatgtcatggctgccgggaataccaagttgttgccccttgcccctgctccagtgttcatcacctctagccaaaactgtgtccctcaggtagacttttcccgaaggaggaactatgtatgcagcttcccaggttgccggaagacctacttcaaaagttcccaccttaaggcccatcttcgcactcacacaggggagaagcctttcaactgcagctgggatggctgtgataaaaagtttgctcgttcggatgagctgtcacgccaccgcagaactcacacaggggagaagaagtttgtgtgcccggtgtgtgaccgacgtttcatgcgcagtgaccacctgacgaagcatgcccggcgccacatgacgaccaagaagatcccaggctggcaggcagaggttggcaagctgaacagaatcgcctctgcagagagcccggggagcccactggtgagcatgccagcctctgcctgaaaggtccattaggacatcactcatgggatttttaaaaagcctctttccaggaatggaactgatggattcctctcccactgcctcacccaaaaaaaacggtcttggcggcctaggggaagatcggggagctggttttgatgaaagtatgttaacttttcttttccacttgggaccctgttcagtatcttttgtagtttcagaagtttttttgttttggttttttttttaaagaaatggtagaaaatttgataatctgaatcaccagcattcaaacaaatatttcggcaataaagtttacaaaatctggatttttacaaccttttctattgatgttttgtagaaataagacagggtactaatttttatactggtttttagaaaaatatttatattgttggtgctcaaatcaccaatttctagctagatcattttgcagccttcttttcagtgtttaataacaaagtttttcctaatggcccttcttttagtaaactggacatgttattccactacaaaaaccacaagttatctggccttttagatctttttggaatcggacctggttgagtaaggacctcttaaaagggaaaaataaattttgccgtcagcttcttcataacgttttcaaggaaattctaggcaatcattcctgtcaccaaagaactaaaattttggttgactggaactagtgagctgtgtccatggtgtgtcatgaaggatgtaccccagagagtaacatgagccactgggcagatcccagggaccagtacttgctgcaggatctagtctgtaatagtcttggccatggctctgctgaaagcaagccattcagtttcttgtttgtacctaaaacaccaaaaaagaaacactcaaatccagctgctttgtcaattgtcagttctgactccttttgctgtggccttatccgtactatattgtgggtagagtaacttctcagaaaaaaaggaaatgtctgtattggttggatgaaactccaccagagcacagcttagctggggcgagatgcatgtgaaggcaggcagtgccaagattccgcttcctttgtttgccaaatactagaaacacaaggaaatgcaagttacgctaaatggcagtaatactacccaactgcctttctgttcattttgtttgaaggaaattgttttgaccaaacagaaaattacttggaatggtgtgttttacagtctacctagaaaatagatggacaatatttttcaactgtatgagcacgtagataaccgagagaatgtggccacctgtgttcaagaagccactgatactggtttttgttaaacattggaagttcaggcaatggaataaatgtaggaacatacagaatgttgcactaatttggtagcctgggaattttttttattgtgcagtatgtatttaaattttgtctatgttaattaccagcatttacctttatttaaatgatggtaaggtggaatattgaataaaattaggttttgtgttttgttctttgtagtctgataaaatctccacctggtcattcattgtgtgtgacttgatacctgttaacttgccccttagtatcagctgttacttgacacaaatgtgtgtgttattcagaggttttcagtctggacactccataggtgagtgtcgtgtcttcgtgagacagcacagttgtctcatgttgtgcatagttcatgtttcctcaccacccagtcctttctcctgctcatcaaaatcagcatacacatttttgactgtacacactataaatggcatcaaatttggatatttttcttaattatgacatgcaaagtaatgtgagtcctgccagtattctggtggataaggtcttttgagtatttggttgcttgtcacaacattctccaagcagtgatatttctaaagaggagatacatgttgaaaacggttttaatttacacttccatttcctgattacatttggaaatactttgtgtaaaccatcccccttccacctccatttgtctgttgaaagattttaagttggaaacagttcctgtctgaaaactcttctgagaaccacaaaccttgtgtatggattcggcatggagccctcagctggcggctctgggtgctgacggccgctggagaggtgggctcccctcgtgcactttattgcctgggcagttttgcttgatcttttgtgactttgagccttttaagtagtttgaatgataagacttaaaatgtttcataattatgttttatgtaacagactttgacattatttaaacgagcatgtgtaatgtaacttttctctttgaatcatataaaacttgattttacattg

SEQ ID NO: 15515 - DNA, 1483 bp, Homo sapiens
  source 1..1483: mol_type = unassigned DNA
atttcagttcatttgatgagaaaacatgtcaaaaatatcaacacctttgagaacagaatgttaatgcttgatgggatgccggcagtcagagtcaaaacagagcttttggaatctgaacaagggtctccaaacgtccacaactatcccgatatggaagccgttcccctgttgctaaataatgtgaaaggggagcccccggaggactcgttatctgtagatcacttccaaacacaaactgagccagtggacttgtcaataaacaaagccaggacgtcccctactgccgtttcatcctccccagtttccatgacagcatctgcctcctcaccttcttcaacttcaacctcttcatcgtcttctagtcgtctagcctcatccccaactgttatcacatcagtatcttcagcgtcatcttcgtcaacagtattaactccagggccccttgtggcctctgcatctggtgttggaggccagcagtttttgcacattatccatcccgtaccgccttcaagtcccatgaatttacagtctaacaaactgagtcatgttcaccgcatccccgtggtggtacagtcggtgcctgttgtctacacagctgtaaggtcacctggaaatgtgaacaacactattgtcgtgccgcttttggaggatgggagaggccatggcaaagcacaaatggacccccgaggcctatctcccagacaaagtaaaagtgacagtgatgatgatgacctgccaaatgtgaccttagatagcgttaatgaaactggatctacggccctttccatagccagagcagtacaagaggtacatccgtccccagtatcaagggtccggggcaatcgaatgaataatcaaaagtttccttgttcaatttcaccatttagtattgagagcacaagacgccagagacggtctgaatccccagactccagaaaacggcgtatccacagatgtgattttgagggatgcaacaaagtgtacacaaaaagttctcacctgaaggctcaccggaggacacatacaggagagaaaccttacaagtgtacctgggaaggctgcacctggaagttcgctcgttcagatgaactgacgaggcattaccgcaaacatacgggagtgaagccattcaagtgcgcggactgtgatcgcagcttttcccggtcagatcatttggccctgcaccgccggaggcatatgttggtgtgaggaatgctacctgtccagctgagcgtaagagctggatctcttagcggcacccaattcagcagggctgaatccccttcacagtgttaacacaaaagggcatcaccatcccacgatgtctgaaaccagagcaggaaaaagaaggcacacttcttttggtctgaaggtaacccccatcatgactagacgagaaccgtctttacccgggcctgggagctcagtgacataaatgctgaagagacaggcattgttttccgtgctgtgtcctctgccattt

SEQ ID NO: 15516 - DNA, 1617 bp, Homo sapiens
  source 1..1617: mol_type = unassigned DNA
ggggctttgtttctggggaggaggacccggagctcttttgtttgggggtttcttgttttcggccccccccctcacagcaccccaccccaccccaccccaagcgcctctccggtttcctgagctgcgggctgcgagggaggagaagcggcgtcctgcaaccccctcggctgggccccggggtaattcgatgcgggcctggcgaggctccccacactagaccggggctcgcaactcggcagcctccacccaccggcccaccctacatttagcgcatcatgtgatccgggatcaatgtgactctaagaacaaatggatgaatgaatatccatatgaagagaaaaacaataaagaatatcaacacctttgagaacagaatgttaatgcttgatgggatgccggcagtcagagtcaaaacagagcttttggaatctgaacaagggtctccaaacgtccacaactatcccgatatggaagccgttcccctgttgctaaataatgtgaaaggggagcccccggaggactcgttatctgtagatcacttccaaacacaaactgagccagtggacttgtcaataaacaaagccaggacgtcccctactgccgtttcatcctccccagtttccatgacagcatctgcctcctcaccttcttcaacttcaacctcttcatcgtcttctagtcgtctagcctcatccccaactgttatcacatcagtatcttcagcgtcatcttcgtcaacagtattaactccagggccccttgtggcctctgcatctggtgttggaggccagcagtttttgcacattatccatcccgtaccgccttcaagtcccatgaatttacagtctaacaaactgagtcatgttcaccgcatccccgtggtggtacagtcggtgcctgttgtctacacagctgtaaggtcacctggaaatgtgaacaacactattgtcgtgccgcttttggaggatgggagaggccatggcaaagcacaaatggacccccgaggcctatctcccagacaaagtaaaagtgacagtgatgatgatgacctgccaaatgtgaccttagatagcgttaatgaaactggatctacggccctttccatagccagagcagtacaagaggtacatccgtccccagtatcaagggtccggggcaatcgaatgaataatcaaaagtttccttgttcaatttcaccatttagtattgagagcacaagacgccagagacggtctgaatccccagactccagaaaacggcgtatccacagatgtgattttgagggatgcaacaaagtgtacacaaaaagttctcacctgaaggctcaccggaggacacatacaggagagaaaccttacaagtgtacctgggaaggctgcacctggaagttcgctcgttcagatgaactgacgaggcattaccgcaaacatacgggagtgaagccattcaagtgcgcggactgtgatcgcagcttttcccggtcagatcatttggccctgcaccgccggaggcatatgttggtgtgaggaatgctacctgtccagctgagcgtaagagctggatctcttagcggcacccaattcagcagggctgaatccccttcacagtgttaacaca

SEQ ID NO: 15517 - DNA, 10637 bp, Homo sapiens
  source 1..10637: mol_type = unassigned DNA
aatgtgactctaagaacaaatggatgaatgaatatccatatgaagagaaaaacaataaagaatatcaacacctttgagaacagaatgttaatgcttgatgggatgccggcagtcagagtcaaaacagagcttttggaatctgaacaagggtctccaaacgtccacaactatcccgatatggaagccgttcccctgttgctaaataatgtgaaaggggagcccccggaggactcgttatctgtagatcacttccaaacacaaactgagccagtggacttgtcaataaacaaagccaggacgtcccctactgccgtttcatcctccccagtttccatgacagcatctgcctcctcaccttcttcaacttcaacctcttcatcgtcttctagtcgtctagcctcatccccaactgttatcacatcagtatcttcagcgtcatcttcgtcaacagtattaactccagggccccttgtggcctctgcatctggtgttggaggccagcagtttttgcacattatccatcccgtaccgccttcaagtcccatgaatttacagtctaacaaactgagtcatgttcaccgcatccccgtggtggtacagtcggtgcctgttgtctacacagctgtaaggtcacctggaaatgtgaacaacactattgtcgtgccgcttttggaggatgggagaggccatggcaaagcacaaatggacccccgaggcctatctcccagacaaagtaaaagtgacagtgatgatgatgacctgccaaatgtgaccttagatagcgttaatgaaactggatctacggccctttccatagccagagcagtacaagaggtacatccgtccccagtatcaagggtccggggcaatcgaatgaataatcaaaagtttccttgttcaatttcaccatttagtattgagagcacaagacgccagagacggtctgaatccccagactccagaaaacggcgtatccacagatgtgattttgagggatgcaacaaagtgtacacaaaaagttctcacctgaaggctcaccggaggacacatacaggagagaaaccttacaagtgtacctgggaaggctgcacctggaagttcgctcgttcagatgaactgacgaggcattaccgcaaacatacgggagtgaagccattcaagtgcgcggactgtgatcgcagcttttcccggtcagatcatttggccctgcaccgccggaggcatatgttggtgtgaggaatgctacctgtccagctgagcgtaagagctggatctcttagcggcacccaattcagcagggctgaatccccttcacagtgttaacacaaaagggcatcaccatcccacgatgtctgaaaccagagcaggaaaaagaaggcacacttcttttggtctgaaggtaacccccatcatgactagacgagaaccgtctttacccgggcctgggagctcagtgacataaatgctgaagagacaggcattgttttccgtgctgtgtcctctgccatttaaagatgtttgtagcttgtacattttctgagctgtcagacattttgttattgataccttaaaggtcacctaccacaaattgatggctagagcaagaccttttaaatttggatgaatctcccatcatcccatcccttaacccctttttacagaaattttagttacaatctgagtaagctagaacacacatccaatctgttaccagcaagcagcatgaaagtagaaacgaagaagcagatggagaggtcccattacctgcaaagaaagggcactcaggcagccctttgcaatcgcgatggcagccactagatatcactctcaacttgtcattctgccatgccctgaagaaaaccaacattgaatctttcatttgtttgtcgttgattgtttttgttttgtttcgattctgttttgttcatctgttcgagcagaggggcagttgaagtctcgtcctggtctctgccctggcatggactggcacagaggtgttctgtagttgaataggaagagcctgtctaaaaaactactgccccacttcaaattgcagtgttctgtcacctaggcatcatctcttcctgcccctagtatttgattacaaggaaccaggggaaaaaaactttcttagacacactggcaccaaggtaagaggtggggctgcccaggcaaagtcagtgaacatgaaaactcagacaaagcagagatggaaataatgcgcctcttgaggagaaaagcaataatgaataaaaggactttcctacaataacttcactgaggactcacgttaccaattttcatacttactaaagggattgtaaaaaacaccccagcattttaggtgtcttggttccatttacagcactgaggtaatctttctgctgtttgttgtcctgcttggttgagtaccacaattaaagattatgctccccttttcttgtttgaaaacagttatttggtgactagaaaggcaagggaggcatagccgggaattaactcttcggttaatgggtcagttctccttggaactgaatcagtggaaagagaatgcttcccatagaaagcccgacatggtgctagtttcctctcttggagagccaaggataagtgactctccaataggttcttctataccgatttcattttctaaactgtatcaggacccaggtgtcctgcattggcatctgcagggatattgaacccactcatcctgtgcagaggatgagaggaaggtgttagttccatcagccccataaaattatgaacctttttgcaactaggaacatatacagtaaacaagcaatacatcaccaacgagcattctttcagaaaaattaccatatttttgtccccaccacaagctgggtttttttccagctttctgtggctgaggggctggtgagattttttgttgttattgttgttgttgctagaattttttatagcttagatataaaaggtctccaacaaagacctttgcaatatattttaattacaaacacttgattttgggaattgcacatattaacctcacaatattactagctcatttttaaatgtctggacattctgaaataatttccggttacagaattaccctttttaggatcatcttctaattcagataatcttattctgatgaagcgagaactatgaacgttgaaacaaggacaatttgtgttggatggtattcaaaaggaattttttaaaacattaagcaacagtgtaatgattttcaggtcaaattatggcttcacaaatatgtgctctatattgtctgccaggtctcaaaaattcatcaagcaatttccctccaacaagggctgcagttctagtgataaatagcatctttagctgcacagtctactactcatcaaccagtgggttttttttagcacctggaaagtttttttgtactatatgcaactcctacttcacattgcctgtgaccattcagaatagaaaaaggtctgttgatgcatgccagtgctggttactagtcagtgacagagaacacagagagggacaaacacagccatgaaccccctggcactagtaccagcacctagttggcaagtagtgggtgcatctctcaagtgaagtgtagatttgtatttagtcctgcttgctctcataaaaagagccagttcttttctctgctgaaagatgtcttgagagtattacaggtagacttggtttttagaattcataaaactgacaggcaggggaatcttcctgagtgacagcttggtttaaatttagcacagaactagatgagttgcacttttctaataacataggatggatttggggaagggaacattttccctcatcctctgaaagtggaaaccagactgagatggtaagttaactgataaaacctgtcagcattccatcattttccccttttgacgtatcagtacttctaagaagggatctaagcacaattaagtgaattgagtccctggtctagcctcaggaactgaaacttctttggggcttgtcttgagacgtggcaaattctccttggtgagttttctaaaagtatttccccatggaaaggagaaagtggtttgggacagaaagaaatggaatgtcttcagtcatggaagagcctccatttcatctcatgtccatttctagcctctttcaaaaagcacagtgcatcatgagcaacagaaaagcagtagaatcctaaaggacataacagttgttccgtaactagaagcattctttgattttaaatttgaagctgttcagtttgcagctggggatatgtgcatggttgggaacttatacacatagagccattaactacttaagcagctgcagtagacctgattttctgtttgcagtatagagattgatttcaagggagttacattatttgaaaagttatgactttcagcctttgaggttttaagaatcccttttcatggtctgatcttaagttgtttgaaaaaagattcacgcttctgcatccacctctgccctcattctgtcaattgtgtgtggactctgagaagcctgcttgataacttgtcttaagttctattaaggcagttagactgagatttctaatgacttcaccataaagattatacttctgcctggcgtcgtttctataaaacactataggacatttgttttcaaaagcagttgagtaacagcaacataaaccacattttttaaaaaaatgagcacttttcattcacttgaaagcttaagtgggaaaaaggaagatgattgtcaggggaaaaacttacaaaatgctacagtgtttacaaatgccagttccaggtgattagaaaggccgttttcattatggttcagatttggaatagcttatgcaaagattgtgttcatttttatacaattctttttaactttaaattgccatctgtgttttaaacataattctgcactttggaatcagttcattagaatgataacatttatatggataaagatgcagtattccttattctgtacttgatttattatacttaccaaagctgcaactgaataaatctggtgaggtgaggccttcaaaatgtattaatacgcctttgttatgttgttatgactgcttagaaatgtagccatgatgttgttctaaagatgtcttaacatttatagtgaggattgacagaaattaagcagtgttaagaataccagcatccatgttacagtctgcgtataagggactgaatgtgaggtaactcttatgaatcataataggcccagaaagccttaatattcatagttcataatccagtctcagattttgctcttcaatgttgcctgtaaacttagcaggtaaatgtattctagtataaaacatcattgaccaaatctcttcctttagtttttctgaggtagtgcatcccattaaaaaagtctcttcaattagatttggctttagtttagaaaggggtttggtaagtcatgtcttccatatgacatttctactcatccccacactgccttccacttaacctgtacagacagccccaacacatgcacatgtgtgtacacaactgtatatgcagcagccagtgggctaacaaatatcagcaaagaacttttttaaaaagaatttgtaataatccgtgctgtctagaaatgtgagttacttaccttattaggaaaccggcttataatactatatatgactctgcctgcattttatagttaagaaatgtacataaaaattgctatattttcacagtttcattataatgtctgtttagtaacccatgtccactgatactttaaatatgctaattactgagcaattgcaatagaaatccagattttcataagaaaatgaaatagaaggatactgcatctttaaaaaatagagtgaagatattttactgtattcgtaacatatgtgatagtggaaaaagtattttcaaactcacaaattttacagaggttgtaaatagtttgatgaagtatgttgggaaagagagcttctagttttcatcacaataaaaagaaaaaacttgttcagatatgccttgtatatcttacacacaatgagtgaaattgccatgggaactctgtccaactttgtcagagcatgctcttcgtgttctgttcaaaatagagtggccacttgtcatggtttagccaggatggtttaaaatataatgaagtcattttaagttgcagacaactgattccaaactagtaatgtcttttcctgaaaagggcaaaacagctgcacaggattttgcttgtactaaagaggagcatcttacaattgttctcttttctcagttatctccctcctcaacagagtgtgaacaaccatacaggtgtttattcttgttttattccagggagactgcttttaggtataactacatgttgacaagattaagtgctgtggatatggccacgtgttaaaggaatctatactcgcaataggaataagctaatgcccattttcagaaataaattaaatgctgaaagtgcctgtcagtaaaccttatgaccaatgagatattcctatacttttacacagcaataattcttaataagactgggttttttcctgcacatgtgaacacacacacacatacacacagagagagtaaatacatacacatagtaaatcaaatctgttcacatgcccacaaaaaacgcttttatagctttcaaatatacctaatcttgtttacattaacatttcttaatttgatctttctaacttgcagaacgttaagaacacaaatctgaacattaagtttatcttcagtgaacactattgcatatggtaattataatttccagataaaaagttgactgtcatttgccccaaacttatgaaacagtatgtatgattcaaaaagttttgctcagttaaaaacaccaatttatttggcgcaaaagactgaaggatatttgtttgcttgttcattttatccactcatatcaaacgcacaaattcatctttacatttcttcattcccctttcccctaatatttcctattatcatcttaagaatcattttggaatgaatattgacagaatcatttctccccaaaaagtctgttgaagtaccactgacacttagtaagcctagcctttaaccatctttgcagttagtcctaaaaattaccagatgcacattcagaagctcacaggttttttcctgtaattactgtactgctaaaagtggagtcatggatagaaatatacaatgagactatatgaatagacatgaaccctggaaattctccaaccctgccatctcagagcacaaattcacccaaacaagctactgaggctatcagtaaaattatactcatggagagtcacacatcgggtaagggcaattttaaaagtaggactgtgattaaacattcaggctttagacttccatgatggactcagaccacaggcctcaaaaaaacatccactgttttctcctcccaatgttagaaagaagaaaagggagacggaaatgtaccaggataagggggtaaaataaccaattaagtgtcaaaggaaagctgctgggttccttaatctcactgaagtcaagtcttctgactgggcttcttaccatgtgttgtctgaaaaaactaaagtaccttgaaaggttacacattcagcaaaccatgaagataatagctattctttattaaacactgtgtgccaagcaatagactaggcaatttttagatacgttacctgcaacctgtacaacatttctacactttatggatgggaaacggagacatgggaagtgtggctgagttgttcatggatgtagaaatagtaaacggcagagtaggaaagtgaaaccgcctatctctgacctggaggtctgcctgtatctttcccactccaccacactgcacgtgggtgtcccgaaaccaccttcccagattcctgactctcagtaattttattatggacaacatgcatgagtagtcatcatatttttcaagtgaaatatcgggacatgatataacacatgacttaacaatggtactgaatatttgaaatcaggcctttcccggaaaatcatgcatgaaggatcattataaacaaacaatagcaaccagttgtctccccgaacttgtcacttttctcataaatgtctggcctggagctccaaaatcatccaaatacttagtagcattttagcctgagtacactttctcagttcctcaactctttgtatacctttccaccaatatagacattctagaatctgcttcagatgcatttgaaattttcacccccatggaactagtgattaatatcagagcccactcttgcagttggtaatggggtggcaatcaaacgttcagatgatgataaaggagagataatggataattctttttcagagttctcacttaacagctctgttgtggaatgttttaaatagtcttataaataatttgtttatagtattgttgttagtttaattgaattttatgtaagaagctgtccaacatcagagaaatgaaattcctcccactttctgtgtagaacaaggtctctgacagtattgattcatggaagtactaatggacttagaaaacattaagagaatgtcatttctcatagtgtttctgtttctgaaaatgaatctcctgaattattatctttctccctgttacttggctggggaaagagatagaagctgtataaacaaattctcttccatgctcaaagcaagtgttccatgtgcacaacctgctgcagactggggcccttctcagttaattgggtttcacaagcaataatttctccacaacaaaaaccacaacttgaagtgagttgaaaagagatcaatagtggaaacagtcgcctcagtactttttctttctggatttcatctctagaaatttgaagtgtttgagacagagtccaccctttgtgcaaggcgagaaccaatgaatggactccttgtgtgaattattgcatcttcttccaaagcaggttcatcaagactttcacagagattcatttttgttgagaagtaagggttaataggaggatagaatttggatccaaatctagtgataaaagtgtccaagcaatcaaaaagtaagatattttagggacataccaacatcttccctttctgctaatttcatgctccaaagatatggcaaaaaaaaaaatcataaaaagtgcttttgccctacttgtgttctagttttcccatggcagaattttgtaattacatccagaatatagtgtatattttgttcctcaaactttattacattggatggatattgttgaactggggcactggtgcctatattcaaggctctttcctatcaacgtgtctgtccacgatttgttgtgtttaaagcttcattttgaaaaatcactgtccccctgtggggtagtgactgtattgttttgttcatgtctatgtgggacacattgcatcacatggcaaaccaactctctgtggatgtgagataagtacttataaaaccagcttgaaaacatcgtcttatgtattatgtcatcctgcatcataatgcaattatgtgtatcataacatgctcatttaaaaaaagagaaaccagcaaattcatgtttgtccatagaagaatgtactcagaactttgtgttgtgaaacgatgagaacagaccacctttaagatacccacctgccacttaaaatgacttagttataattagtagtagtctagacgttgttcttggtgtgtgggggtcaattctaacgtcatgttcttttgaataaatctctcagtcatatttgaaaaaaaaatacatgggaataaagaaaaatatcatctttggccaaatcaagcaggcatcttttttcttttccttgacgtttagctcattatacgtggtgattggatcacgagatctgtccgtgtgaaaatacagaaacatcctttagtttacaaaacagttattctaggcttgaagcctctgaacagcaaattgaatagatgggctgcatctgatttgctttatggatgtaattttacaaaacactcttgggtctctgaccccagggagttaagagtgcccagaggaggtcctacacattaaaggataaagccccccagtgatgctggcaagcaaatgtgttgagttcttaaatcttcatttggttttctgttcaggattttaattgcaaatgaatttatttctccagtttatctaaagacctaatttcccaatagtttcctctgcatttatatactctgtagtgtttaggcaaccctgttataagtttattaatattatgtaagtgttgttcttgtatttatgtatagtgtatgtattgtaaatatactcagagcttttttccttttactgtaaaatggtgatttttttgccctatgataatgtaaagggagaccctcctaatgagattctctcagaggatgattattccagtctattctcagagatttaaatgaacaagtgttattgtttttaatggtgtctcagacatattctgttggtgcattgcttttctgtattcaactttcctatgaattgagctgtgaactgaaatagagtttaaacctttaactgtatgcatttgtataattatctgaatgaaggcatgaaggttaaataaagcattttgtatggaacaaaa

SEQ ID NO: 15518 - DNA, 6825 bp, Homo sapiens
  source 1..6825: mol_type = unassigned DNA
cggcagctgtcccgcctgccacaatgcgcggcgaagctgcggccgcgacttggcgaggtggtccctaacgttgccgctcggcatccttagaaccggccgcccctgacgccgcgcggggaccccagtcgcccgcgcgccccatgcgctcactcttcggtgcccggccgggccggcgcctcgcagacgcggagccgcgcgggtgacggcacaggcggctgcgcgcccagcccagcccagcccagcccgaggagagggcgcgccgcgcccccgccccccgcccgctctcccgaggccgtgggtgcggatgcgcggctgacgactcgcagcaagagcaccgccgccggccccagcccgcagcatggcagccgccgcctatgtggaccacttcgccgccgagtgcctcgtgtccatgtcgagccgcgcggtcgtgcacgggccgcgggaggggccggagtcccggcccgagggcgcggccgtggccgccacccccacgctgccccgcgtcgaggagcgccgcgacggtaaggacagcgcctcgctcttcgtggtggcgcggatcctagcggacctcaaccagcaagcgccggcgcccgccccggcggagcgcagggagggcgccgcggcccggaaggcgaggaccccctgccgcctgccgccgcccgcccccgagcccacctcccccggcgccgaaggcgcggcggccgcgccccccagcccggcgtggagcgagccggagcccgaggcggggctggagcccgagcgggagccggggcccgcggggagcggcgagcccggcctcagacaaagggtccggcggggccgaagtcgcgccgacctcgagtccccgcagaggaagcacaagtgccactacgcgggctgcgagaaagtttacgggaaatcttcgcacctcaaggcgcacctgagaactcacacaggtgagaggcccttcgcctgcagctggcaggactgcaacaagaagttcgcgcgctccgacgagctggcgcggcactaccgcacacacacgggcgagaagaagttcagctgccccatctgcgagaagcgcttcatgcgcagcgaccacctgaccaagcacgcgcgccgccacgccaacttccacccgggaatgctgcagcggcgcggcgggggctcgcggaccggctccctcagcgactacagccgctccgacgccagcagccccaccatcagcccggccagctcgccctgagcccgccacagccatgagcagccgctcccaccccctcgtgagtccctggcctttccttttgtaataagaaagaagagagagaacttgatgcaaagtccacgaaaaaacaatttttttcacctcaggtgtcaaagtaaatttgttaaaaaaacaaaaaaaacacaaaaatttcaaaaaacaccacccaccaaattgcacaatagatacacccacaaagttgagattcagcgttgttgaaccccctttctcagggatggacacgtttcacgaggtcagtgaggacaccccttcctgccgccttactctgtacatagatttgcactctggagttttctgttaggttcgggaacacgctggggacagagcaggccagccagtctggtggagctcagcgtctggctggctggccagcctgtgggtctgttgggagcagatgtgctcactgacgtttgtgcctccagggcagattcctaagcagctggcctgacctcttcctgcccagcccccaacccagtctctggcctctgcccaacgagcctggctgggcttgcaacgcagctgattctgagacaggcccctgcagagggatgccttaaagctgtccctggctggaggagcactccaccttggggatagtggagggggccttcagccctctgcaccctgcctgcctcacaccccgccttcaggagccctctcctacggcgctagggagcactggaagcagagatgccagccctggctgagcgtagcactgcaccgtccgacctccgaggcaggggccggggtcacacctgccaggactccgcttctccgtgtcccagcagaaggcatgcaggaccctgtcactactatacctgggcctctgatggggaattctggtcttctaaaaagatgttagaaattcctggtggcacatccagttccgagtttgcccgcacgggcacttttgttggaaacagtgggcaggtcatggggcctcctcatcagagggtctgtgtgagcggctgtgcatgtggcagcgcaccatgcttcacagagaccattctgtagcaagagaccggaacattgtgacttggaccttttcaggagtggcgcggatgttacaggaaatgctgtcggagagcgcgcattctatttcctccgcagggaatgccagatagaaagttgcgggcaacacttttctcagacccaccatgtccccaactcagacttagcaaacctccagcctctccgtttcccctggactcctcctcccttttcctcctgcttctccttgtcctgcctggaggctccaggccacacccagctggtggggctgctccagtgccccatcaccggccttctcctggcaggagaggaggagcagagagctgggtcctgggctgggattcgagccctgggcgggggtcagtcaagccgtggtccagcaaactcctctgcagatggctggagtgttgacccaggcttgtggcccaggtatcaccttcccttcctcctgagagttgaggcctgtaaatacaagggcccaggacagagtgtgtgcgtgcgtgtgggtgtgtgcgcgcgtgagcacacacgcgtgtgttggggggggtggggggattggggtggactcagggtatcttgccagagatacctgttttgatgagtacctattttgatgcaaaggaacggccctgggacctcagagggccacagatgggcttcctgggcctagcgtgccttggttgtggccatcctgcttctactcagccctgccatgctatggggtgcagcacaaacccaggacccaggcctagccactgcccacagctgatggtcactgttttggctggctccagagtggacaggtacgctctgtccacagcagctgctcaggcacagtatgccgtcaggtgcccgcttcttaccactgtgtgtcagctgggattggccgacagcgtggtggtgacttctaggtagaccgatggaccctaaattgggcagtggcattgtttctgctgtggtgggaactggcagggagagggtcacctccactctggttggatgcggagctggtccctctggctgccatgctgtgttggggctctctgacctccctgcttgcattgggtctgggagagagagtggaatatttggtagggaccttgacagaagagagccctgggtgcttgtggtgcaaagatcttcatgcccagttccaaagtgaggtccctcccaaagttgttttcgtgtgaggcagagaaagccacactctgaatacattttatgtctcaggaattcacattccaggttcaggaattttattccaaagtcctttggtgcactcaccgtccaccgttccccaaggcagggagagggagtggcccgtccctgggaggctggcaaagtgctctccagggaggggtcagacgtccttgtgatctgcccagggtgtcacggaaggagattttctagctccacatctgtctgcacataggaaggaaaagataggactctaaacctagtcatcttggaataaaaagaagagctggtttgttttagagcagggcggggggtgggggagggaagcgggtgttggctgtttccaaagagagcacttaatttaatttttcctttaaatgacccagggctgttccgtctgatagatggaagggtaacattgccttaaaacagaaatatgcaggcgttggctatttttggcataagagcgtgtcttcattcccaaagtggttctcgtttaatggcagggtgcggtccttaggccccggcctggactgggaaatgggggtagggcaccaggagagaaatcctcctgggtactcctggccagaccctcctgaatcatctgcggcttaaactcatctcgcttgaagggcagggagaaacccatgaatctcaggcacggttcacaggggtcctcaagggcaggtttccatttcatcatgaagtgagggactcctgtggaagagggtggtgggccttggaacgctgcctccactgaggcgggcacacaaggcggaccctcctgaaacagcctccattttcttcaaacatgcagaatgttttcccagactgcgtctatttcagggtcttccatttttgtggtttatggccatgcttgccagttttggtggggttgaggaacccataggactcatagaaataatagtgaaaactcaaacccttattttgggacttcagttctcgtggtccataggggcagagatgtcaaagtgaaggttgcctgagtgaagggagagttcccctataaaaggcctaaaattgatctggggctcagccatcaaggggctggtgttgctcctgtcccagacaaggaagcccctctttacatcagccatattaggggaacggttgtcagctccccaaatgcctactggatcctacagccatacaggaaaacagacggacacagccctttccttaaagagccctggggtcctgtcctgcaggatgctgcataggaatgggcagagatgtcctggatgggaacatggtcctggaggtgccctacctgcatcctgctgcacccccacccacgacactcgagtgcaagatcgcctcactcctaaccctgactttattcccaggccccacaccgaggcaggtgcaggattcgccatggtgcagcctccgggtacaaacatctgaggcactggcgatcccagtccttgcagcaccctgaacacagctcagaccagtgaggggtgattcagaggtggggatgggcagagagggctggccactctgcctcaggacttgacctcaagtgttctgtctccccacccggtgtgtccagaagaccagcctctttcttgccagaagcaggtgctaagatggactgcacagggtcccggcactccctcgggacccattcaggatctcagctgggcaggggtgccacccaacaggaagatgtgatctgagcaatagtgtggccttgtttctccgcttctggttgtggctgtgtgtacagggctacctattttgacttctgacaggtgtcactgattttctttcccccatttaaaaaaggtcatttagtcaaagacacagtgctagaggtttaaagggtgtaatgtgttggtcacatcacaaccagtaagaaacgcttggtaggttatccacatcttttgctgactgtttccatatacaattctggtcaccatattttccaaagctaaaatctgaggcgtgggctgatggtttttgaaatcaggattaccccaggaagaaccaggtcctattactaattttcctgattctgaggctctgaaggcttgtctgagacacattccggagacctttgtaccagaacttggatgcatagtccaccttactactgatacacgcctgagcaccctttagggcgaggcgccgcctcctgcctgctgtcctgtccctcagcatcagaagagttgaattcagcaggagacgggagcccggtgtccatgagggaagaggggtcgcgcttggtttctactgacccccatgaagatttcagacttgcagtgcggccacctggccctgccctgcctctctctttctcatacagctttaaaactttactacttttatttaaaaatgaactggatgggagagaagtagcgtcccctaccctacaagtcacacattccggggaggggggtggggggtggaggcaggaagtcatgggggtgggggtgggagcacgggaacagctttcttaaggcctcagggtcctgttttccctggcctcttctagagggcccgtggacaggtcgcagtgcgtgcttatttggaaaccaggtgtgtgagccgaatgcctgccaggccatgcactcagcagaggagcccttgtacctggctgccctgagaggagcaagaggccacctcccatgtggctctagacaccacgtgggctcattagccccagcgtctgtgccggctccaggtgcctgcctctgggtgtgtgagtgggagactttgctccctggcctcatcctagagaggcccctggtgcctagtgctgaggcctctggggctggaaagcctcagcagaaaggaggcactactgagcaactatgcattgtcattgtcgggtttggggctttcggtggttccttggtgactgggaattgcttgtgtgcatgtgttgggtgcatgcttccgggtctcagctgccccaggcccgcacaggcaaccccttcccatccaaagccattggtggagcttctctggaatcatttgccaaaagcccaaggcagaatccaagggtccaagaccatttccatggagctcatgtttttcttttctgtaggaacttttttttaaccagcacccaccataattccgaaggccacgtttcatctttcctggatcactacagtgaagtattacagttgtacagttcccagtctggccttggcttgctcggataaaactttgtatgtattttgtatggcatagattctatattgtaatgatgtcctatgcaaaaagaaaaattaacgaaattgtaaattttattgttttaacgtgtatgcatgtttagtgacgtttacattttgaaataaaatttatgattcattatttta

SEQ ID NO: 15519 - DNA, 2574 bp, Homo sapiens
  source 1..2574: mol_type = unassigned DNA
ggggagtgagtgcccagcgagctgcgggcgggctagtgctccgccgcagcgacccgcgggccggcgggcgatcgagccagcgcaggacccgcggctcggcccccggccgccgccggaccgagagtctagccgccgcccccagcccagcccgcccggccgcaggaccgccggggcctggccgccggtccggcgtgcgccaagttcagccgccaccggcacggccaggccagcatggtggaccacttacttccagtggacgagaacttctcgtcgccaaaatgcccagttgggtatctgggtgataggctggttggccggcgggcatatcacatgctgccctcacccgtctctgaagatgacagcgatgcctccagcccctgctcctgttccagtcccgactctcaagccctctgctcctgctatggtggaggcctgggcaccgagagccaggacagcatcttggacttcctattgtcccaggccacgctgggcagtggcgggggcagcggcagtagcattggggccagcagtggccccgtggcctgggggccctggcgaagggcagcggcccctgtgaagggggagcatttctgcttgcccgagtttcctttgggtgatcctgatgacgtcccacggcccttccagcctaccctggaggagattgaagagtttctggaggagaacatggagcctggagtcaaggaggtccctgagggcaacagcaaggacttggatgcctgcagccagctctcagctgggccacacaagagccacctccatcctgggtccagcgggagagagcgctgttcccctccaccaggtggtgccagtgcaggaggtgcccagggcccaggtgggggccccacgcctgatggccccatcccagtgttgctgcagatccagcccgtgcctgtgaagcaggaatcgggcacagggcctgcctcccctgggcaagccccagagaatgtcaaggttgcccagctcctggtcaacatccaggggcagaccttcgcactcgtgccccaggtggtaccctcctccaacttgaacctgccctccaagtttgtgcgcattgcccctgtgcccattgccgccaagcctgttggatcgggacccctggggcctggccctgccggtctcctcatgggccagaagttccccaagaacccagccgcagaactcatcaaaatgcacaaatgtactttccctggctgcagcaagatgtacaccaaaagcagccacctcaaggcccacctgcgccggcacacgggtgagaagcccttcgcctgcacctggccaggctgcggctggaggttctcgcgctctgacgagctgtcgcggcacaggcgctcgcactcaggtgtgaagccgtaccagtgtcctgtgtgcgagaagaagttcgcgcggagcgaccacctctccaagcacatcaaggtgcaccgcttcccgcggagcagccgctccgtgcgctccgtgaactgaaagcgccctgaaccccagcctgtccgtcaccccggatccccaccccatccccatttttttaagcaataatttatttgcctcctccagagggacatggcaatgttaccagcccaccttctgaagcctgggaggtgtgaacccagggcccgccaaccgctgcctttctcgggagtacttagagcctcgaacccgcgtccctgggggctgggccccaggcgcacggggctggaggcaggccttcgtgccttcgtgccttcgtgccttcccgcggtggccaggcctctgctgcagccgctggttgcaggcagagttttggggacctggcccttctcccactgggctcccccatcctgggccaaggccagaactttagtgctaggggaagatgaaatgtgcagttttgaaatgttgggtttccagagagagtcatgctggaggagaaggaagtaggccagaagtccagggctgcactgtggtgtgagggtggctttgtctaagatgcctgctcagcatgatcaccagagggtgtgggcaggtccctggagccgggggggggggggggggggggggggggcaggaccgggccgctgggccctcatgtgggagagaggtgaaaagcgtcccccactagggggctggcagtgcatgtgcttgagttaaatgtgcagggcagacagagccagaagggcctgtacccaggggctcgtcccctcctccggtttcccagacaaatccagacaccagcctttagggtggccttgggaggagagggccaggctgtcctgggtgtgagagaactagatagagcctcccaaccctgatttagaaatgcattccttattttgtctagaaattaataaatgaactagcttgttttgacaggtttatttcacatcctatgaatgtatgtaaataaactgtacataggtccatccacataaaatatcttttaataacatatcaacatttgtgtaaatttgaaatttaaaaaaatctatgaagctggtgtacatatgttacaattacgtatattttctttggtccttcataaaaatatatttactttgccaataaaaagaaaaagaactcaca

SEQ ID NO: 15520 - DNA, 1647 bp, Homo sapiens
  source 1..1647: mol_type = unassigned DNA
gcccgcccgcgccccgaccagcccggcctcgggcagccactcaccggtgtccccgtccgcgtcctttctccccgggtcccggccatggcgctgagtgaacccatcctgccgtccttctccactttcgccagcccgtgccgcgagcgcggcctgcaggagcgctggccgcgcgccgaacccgagtccggcggcaccgacgacgacctcaacagcgtgctggacttcatcctgtccatggggctggatggcctgggcgccgaggccgccccggagccgccgccgccgcccccgccgcctgcgttctattaccccgaacccggcgcgcccccgccctacagcgcccccgcgggtggcctggtgtctgagctgctgcgacccgagctggatgcgccgctggggcccgcactgcacggccgctttctgctggcgccgcccggccgcctggtcaaggccgagccccctgaagcggacggcggcggcggctacggctgcgcccccgggctgacccgtggaccgcgcggcctcaagcgcgagggcgccccgggcccggcggcttcgtgcatgcgaggtcccgggggccgccccccgccgccgcccgacacaccgccgctcagccccgacggccccgcgcgcctgcccgcgcccggtccgcgcgcctccttcccgccgcctttcggtggccctggtttcggcgcgcccgggcccggcctgcattacgcgccgcctgcgcccccagccttcggtctcttcgacgacgcggccgccgccgcggcagccctgggcctggcgccccccgccgcccgcggtctcctcacgccgcctgcgtccccgctggagctgctggaggccaagccaaagcgcggccgccgctcttggccccgcaaacgcaccgccactcacacctgcagctacgcgggctgcggcaagacctacaccaagagttcgcatctgaaggcgcatctgcgcacgcacacaggtgagaagccctaccactgcaactgggacggctgcggctggaagtttgcgcgctcagacgagctcacgcgccactaccgaaagcacacgggccaccggccattccagtgccatctgtgcgatcgtgccttctcgcgctccgatcacctggcgctgcacatgaaacggcacatgtagccgggacgcccccgcccacctgcgcgcggccgtggcgggtcccacgcgccgggcgcggccccctcccaaactgtgactggtatttattggacccagagaaccgggccgggcacagcgtggctacagagggtctccctcgatgacgacgacgacgacgccaccaccccagcccccgtctgtgactgaaggcccggtgggaaaagaccacgatcctccttgacgagttttgtttttcaaaatggtgcaataatttaagtggcatcttctctcccaccgggtctacactagaggatcgaggcttgtgatgccttgtgagaaataagggccttaatttgtactgtctgcggcattttttataatattgtatatagtgactgacaaatattgtattactgtacatagagagacaggtgggcatttttgggctacctggttcgtttttataagattttgctgggttggttttttttttaattaaaaagttttgcatctttt

SEQ ID NO: 15521 - DNA, 420 bp, Homo sapiens
  source 1..420: mol_type = unassigned DNA
ccggtgtttgcaaatattgtgtgggctccgcgcgctgcgggctgcgggagggtccggccgggcgtctctgcgagcctggagtttgcatgaaactttcacctgcgctccggggagactttcggctccggctcccaccgcgcgcctcgccgccctcgcgaccgcgggctccgtccaacccggcccgacatggacgtgctccccatgtgcagcatcttccaggagctccagatcgtgcacgagaccggctacttctcggcgctgccgtctctggaggagtactggcaacagacctgcctagagctggaacgttacctccagagcgagccctgctatgtttcagcctcagaaatcaaatttgacagccaggaatctgtggaccaaaatcattggctcgggagaaaaaggaggaatccgaactga

SEQ ID NO: 15522 - DNA, 2169 bp, Homo sapiens
  source 1..2169: mol_type = unassigned DNA
ttgcaaatattgtgtgggctccgcgcgctgcgggctgcgggagggtccggccgggcgtctctgcgagcctggagtttgcatgaaactttcacctgcgctccggggagactttcggctccggctcccaccgcgcgcctcgccgccctcgcgaccgcgggctccgtccaacccggcccgacatggacgtgctccccatgtgcagcatcttccaggagctccagatcgtgcacgagaccggctacttctcggcgctgccgtctctggaggagtactggcaacagacctgcctagagctggaacgttacctccagagcgagccctgctatgtttcagcctcagaaatcaaatttgacagccaggaagatctgtggaccaaaatcattctggctcgggagaaaaaggaggaatccgaactgaagatatcttccagtcctccagaggacactctcatcagcccgagcttttgttacaacttagagaccaacagcctgaactcagatgtcagcagcgaatcctctgacagctccgaggaactttctcccacggccaagtttacctccgaccccattggcgaagttttggtcagctcgggaaaattgagctcctctgtcacctccacgcctccatcttctccggaactgagcagggaaccttctcaactgtggggttgcgtgcccggggagctgccctcgccagggaaggtgcgcagcgggacttcggggaagccaggtgacaagggaaatggcgatgcctcccccgacggcaggaggagggtgcaccggtgccactttaacggctgcaggaaagtttacaccaaaagctcccacttgaaagcacaccagcggacgcacacaggtcagtgcccacgcgggccccggagggcggccgctggtgggcgccactgcattgcaccagccctggagggagccgggcctggctgcacaggatgtggtcagggcagacaaatcctcacttcctcagatgttttccaccaaagcattaggtctttttggagttcagagtagaatcctaaagactggacttttgagttggataaatgtgtaacaattttcagattaaacaaacaagagactagatccttttctccacggacacccaaacctccaccccccaccccttagtagtgctggggatccgaggccactgccccttcaccagtgcactcgcacgaggctacctcgagcggccctggggtttcctaaatgaaactcaagggtcaggacagagggttgctgggcagcgtggagtgtgtgggtttgatgctgacggcccgaggcccgagtgggaccggcctgctctgtaagcagcagcattgatcagcgagtgtttcctgagaacttctccgtgtctcatgcagcctttgtttctgataccgcttgaaacagtttcttaatgaaatgccatacctaggtgaaagtgctatttaaaaataccttgacatgttctaggataattggtgaggaatcacagaacatttagaactgggaagggtcttagtgatcacgtgatgcaggctcttctcttatcagtaggagagcaaattgctgagagtcagtcccagacaggcttggtgacagctgagattgagatccgggtggcccaatatccaggcccaggcctgtctcaacataccctgagattggcttgacaactttgttttctcaggtagcacttgtagtaaattcatatttatgatttgaccaaggaatgaagtgaacccagttgttcaattgccatttagagaatgattccggggccctgtactggggctttccagaagctcgtaacttcagctttgtagaaaggtagaacgtccctgaggaaactgcagaggcacattccatagggaagtgaggatggaacagaagtgtgtttgggagaaacagttgccatgaagaaagcaatagctctgcctttgccggggctgtgggtccggcaggctgacacctcatcccgcaagcattttgctggtctgagtcgtggtcgttcttccacgttaactttgatgacagcaccatgggcttggctgaagctgtgtcccttggacagcagtgggaggcctgagactgggtcaggagagagctgctgttgtctctctgaggctgccagttgttgtgtgttaccgatgccagaagccactgggtccct

SEQ ID NO: 15523 - DNA, 4656 bp, Homo sapiens
  source 1..4656: mol_type = unassigned DNA
ggcgggggcggagggggaggctggcagcggagctttgaatagggaagttttgcaggggttacgtttgcagtcagtccggtgtttgcaaatattgtgtgggctccgcgcgctgcgggctgcgggagggtccggccgggcgtctctgcgagcctggagtttgcatgaaactttcacctgcgctccggggagactttcggctccggctcccaccgcgcgcctcgccgccctcgcgaccgcgggctccgtccaacccggcccgacatggacgtgctccccatgtgcagcatcttccaggagctccagatcgtgcacgagaccggctacttctcggcgctgccgtctctggaggagtactggcaacagacctgcctagagctggaacgttacctccagagcgagccctgctatgtttcagcctcagaaatcaaatttgacagccaggaagatctgtggaccaaaatcattctggctcgggagaaaaaggaggaatccgaactgaagatatcttccagtcctccagaggacactctcatcagcccgagcttttgttacaacttagagaccaacagcctgaactcagatgtcagcagcgaatcctctgacagctccgaggaactttctcccacggccaagtttacctccgaccccattggcgaagttttggtcagctcgggaaaattgagctcctctgtcacctccacgcctccatcttctccggaactgagcagggaaccttctcaactgtggggttgcgtgcccggggagctgccctcgccagggaaggtgcgcagcgggacttcggggaagccaggtgacaagggaaatggcgatgcctcccccgacggcaggaggagggtgcaccggtgccactttaacggctgcaggaaagtttacaccaaaagctcccacttgaaagcacaccagcggacgcacacaggagaaaagccttacagatgctcatgggaagggtgtgagtggcgttttgcaagaagtgatgagttaaccaggcacttccgaaagcacaccggggccaagccttttaaatgctcccactgtgacaggtgtttttccaggtctgaccacctggccctgcacatgaagaggcacctctgagggagcagagaggtggatcctgtaggctaaaaggcttccaggctgagagccggccgtggaaggagggatgcgtgttccagccaaagcatgccgttctgcaccctacccagttgcctccagggcctctccttggaaggtcttttgagggctaaaaaggtcctgtaagaagcggcatagcacccgtggtgcatggtatgtgggtgaccctggactcgccactggtacccgcccttccgagcggcgcctaagcctttgccgtgagcatgcacactgagaatgctaatggttgggttgattgtatgttgaggatctattactgaccgtatgatgaggccaactttttttccttgtggttagcaagactgcaagagatggaaaaaaagtagtttgaatgttttgtgtgtaaggagtataccatgagatgagatgaccaccaatcatttccttggggggagggggtgtctgcaccttagaaaaaaaaagaaaaatcaaaaaaacaaaaaaacaaaaacaaaaaaagaaggaaaatcttggagggtgggcgtgggaactcaggaccccagagtggcgagtggtgtggggagggagagcctctctcccccttttctgtgtgagaggaactcttagtgtctggtgcagctattaaatgtgcaatgtgtcaagtagcttgttttacacgctacaacatagctcatttgtaacccattgtataagctgtgtatttacaaatataacacaacaatttaacttttccttagaatacaaaaagtcatgcatggtctggggaactatatgcttttccatttttaagtcaggactgcaatactgattccagttaatgagcagctaagatccaatctgtctaatacagtgaccccctagccatccgggcctggcaatatacaattttttttcccctccaagtttgtaacactccccttccagaaaggcattgtgcaacacaggattatttttaaatgattctgaatttgaattaactttttggagaattctgtgatgcccttagaagaaattggacacgtattgagtgtcacaaagctggggctgggaattgctggtctaatgtttcattagacttaagaacctaaaatttttctcagttgggtggataaaaccactaacgcttagaaactgttttctcatgcagctatgtttctcttatttatgccttgaggactaatttctggttttctagctgttaatgcactgttgaccttcataatggtgccttacgcaagcgatcccttctgtgggggtctcatacaggggtgtgggcgatgcatgctttattaaggctcttgtttcacctggcagtgtactgtatcaacgtataatacagaaaaaaaatctctttaaggtcctccttcacaaagacatagagtgaaactccctttacatgtcagtatttgttcaacactttaggcaacttgactgtcagtgttaaaatggaaaacaggaaaatggaaaaatctgaccaattctgccaccttgagactttcatatagaccttgcacaacaattgtatagatcacacaccggctgtatttaatatgtaacattttcacacatattaaagatacagaagtattaaaaaacccccaatgttaatgtatttgcttaaaaggcacaagtttcacatatctgtctagctatctgttggtaatacagaaagtatactacttttttaaaaaagtgggcagaattcttgtgtatgtatatttgtgtgtacagtatgtgtatgtgtgtatatatatatattatatatatagataatatataaatattttttttaaggagaaactagaatgtttagctagaaaattccacagcctgtgaagaaatatttcaaaatggccataaaggaggtaaaaatgaaaaccataacctaacttttatagaggctttatctttaatttaacgatgtgcggaggactttcttgcttgaatctgttccgggctgtctgctctgtccatcaaatgggcaggtctggaatggggcaccttcggccgttcagaagtggcctgaacagaatgctggaacccaggctggactcggacacactaaggttttgattttgaatttcagccttattagaagatctaacctaagagtaagctaaccacagggattcttttgtagaacactttttatgcagatgaagctattttttccagcaagtagattcttccagtttttccaaggagtaatttccccgaattggcataccacggcgtggacagctgatatttcacccagctgctggcttgtgggtgtggctctttgctttatatatatatacacacatgtgagtctggctgggctggtattttgtttgatcttcctggaaatgagcagtgactaacgctcacataactggttttttttttatctgggctgatgaatacatttacctaagaaactcatttcgttttacttaagaggggaagtgcagttttcttttggcagttcagaatccaagcacttgatttgctgggtttggaaaactccttttttggccttctatgtgcttagccataacaattccattaagcaagaaggtaagcaaaagacaaaaaaaaaaaaaggaaaaaaaaaaacttgcactggcttgtctcacttacgaaacatgtcggagctgtttgcctgggtggggctgggtaccgtacctgtcaatgcctgtgattttcataattagcacgtacataaagaagtacattctgttcaggtgataactgagcctcaatcaagcagaaactttttgcttgaaattaaaaaaaaatttctattagtgaaatttcttttttttttttttttggaagcaccctgttatctaaagaatctttgtaagatttttgtaaaattttgttttacaagattttatttgaaattgttttttgcaagattgttatatttctgtatgaatgtattttttattggaataacataaaagaattcttatcagcatcttgagtctggttgttttttttgggggaagggggttgttggaacagattcctcctgcattcatcaccctggcttcctcctgggggcaaatcttcattgagcaaccctgagaacaactcaccgacctcagccccttcctctttccacagcctgtcctgggagctggagaggatgtcagcgagcctgacattgccctccctgaatgcatcaaatactcttctccaaggactgacaaaaacaaccccccggctgtgggcacagtagggaaccatgccggtttgatcttccattgctcaagccagggaatgcattgcagaggcacctgcacaacgacaaacttgagtgtttccctgccacttctgtgcctccacagcctgctccagttccgcagctagagctgggcctaccttccccagccagccctgccacacacctggctgaggcatgtctgggaggggtggaggaggcagagggactccaggccagagggctgttctcacaacctcagcccactctcagtcaaggagggcagaaaataaaagatgacatcactgcca

SEQ ID NO: 15524 - DNA, 4537 bp, Homo sapiens
  source 1..4537: mol_type = unassigned DNA
gagccaggcgggggcggagggggaggctggcagcggagctttgaatagggaagttttgcaggggttacgtttgcagtcagtccggtgtttgcaaatattgtgtgggctccgcgcgctgcgggctgcgggagggtccggccgggcgtctctgcgagcctggagtttgcatgaaactttcacctgcgctccggggagactttcggctccggctcccaccgcgcgcctcgccgccctcgcgaccgcgggctccgtccaacccggcccgacatggacgtgctccccatgtgcagcatcttccaggagctccagatcgtgcacgagaccggctacttctcggcgctgccgtctctggaggagtactggcaacagacctgcctagagctggaacgttacctccagagcgagccctgctatgtttcagcctcagaaatcaaatttgacagccaggaagatctgtggaccaaaatcattctggctcgggagaaaaaggaggaatccgaactgaagatatcttccagtcctccagaggacactctcatcagcccgagcttttgttacaacttagagaccaacagcctgaactcagatgtcagcagcgaatcctctgacagctccgaggaactttctcccacggccaagtttacctccgaccccattggcgaagttttggtcagctcgggaaaattgagctcctctgtcacctccacgcctccatcttctccggaactgagcagggaaccttctcaactgtggggttgcgtgcccggggagctgccctcgccagggaaggtgcgcagcgggacttcggggaagccaggtgacaagggaaatggcgatgcctcccccgacggcaggaggagggtgcaccggtgccactttaacggctgcaggaaagtttacaccaaaagctcccacttgaaagcacaccagcggacgcacacaggtgtttttccaggtctgaccacctggccctgcacatgaagaggcacctctgagggagcagagaggtggatcctgtaggctaaaaggcttccaggctgagagccggccgtggaaggagggatgcgtgttccagccaaagcatgccgttctgcaccctacccagttgcctccagggcctctccttggaaggtcttttgagggctaaaaaggtcctgtaagaagcggcatagcacccgtggtgcatggtatgtgggtgaccctggactcgccactggtacccgcccttccgagcggcgcctaagcctttgccgtgagcatgcacactgagaatgctaatggttgggttgattgtatgttgaggatctattactgaccgtatgatgaggccaactttttttccttgtggttagcaagactgcaagagatggaaaaaaagtagtttgaatgttttgtgtgtaaggagtataccatgagatgagatgaccaccaatcatttccttggggggagggggtgtctgcaccttagaaaaaaaaagaaaaatcaaaaaaacaaaaaaacaaaaacaaaaaaagaaggaaaatcttggagggtgggcgtgggaactcaggaccccagagtggcgagtggtgtggggagggagagcctctctcccccttttctgtgtgagaggaactcttagtgtctggtgcagctattaaatgtgcaatgtgtcaagtagcttgttttacacgctacaacatagctcatttgtaacccattgtataagctgtgtatttacaaatataacacaacaatttaacttttccttagaatacaaaaagtcatgcatggtctggggaactatatgcttttccatttttaagtcaggactgcaatactgattccagttaatgagcagctaagatccaatctgtctaatacagtgaccccctagccatccgggcctggcaatatacaattttttttcccctccaagtttgtaacactccccttccagaaaggcattgtgcaacacaggattatttttaaatgattctgaatttgaattaactttttggagaattctgtgatgcccttagaagaaattggacacgtattgagtgtcacaaagctggggctgggaattgctggtctaatgtttcattagacttaagaacctaaaatttttctcagttgggtggataaaaccactaacgcttagaaactgttttctcatgcagctatgtttctcttatttatgccttgaggactaatttctggttttctagctgttaatgcactgttgaccttcataatggtgccttacgcaagcgatcccttctgtgggggtctcatacaggggtgtgggcgatgcatgctttattaaggctcttgtttcacctggcagtgtactgtatcaacgtataatacagaaaaaaaatctctttaaggtcctccttcacaaagacatagagtgaaactccctttacatgtcagtatttgttcaacactttaggcaacttgactgtcagtgttaaaatggaaaacaggaaaatggaaaaatctgaccaattctgccaccttgagactttcatatagaccttgcacaacaattgtatagatcacacaccggctgtatttaatatgtaacattttcacacatattaaagatacagaagtattaaaaaacccccaatgttaatgtatttgcttaaaaggcacaagtttcacatatctgtctagctatctgttggtaatacagaaagtatactacttttttaaaaaagtgggcagaattcttgtgtatgtatatttgtgtgtacagtatgtgtatgtgtgtatatatatatattatatatatagataatatataaatattttttttaaggagaaactagaatgtttagctagaaaattccacagcctgtgaagaaatatttcaaaatggccataaaggaggtaaaaatgaaaaccataacctaacttttatagaggctttatctttaatttaacgatgtgcggaggactttcttgcttgaatctgttccgggctgtctgctctgtccatcaaatgggcaggtctggaatggggcaccttcggccgttcagaagtggcctgaacagaatgctggaacccaggctggactcggacacactaaggttttgattttgaatttcagccttattagaagatctaacctaagagtaagctaaccacagggattcttttgtagaacactttttatgcagatgaagctattttttccagcaagtagattcttccagtttttccaaggagtaatttccccgaattggcataccacggcgtggacagctgatatttcacccagctgctggcttgtgggtgtggctctttgctttatatatatatacacacatgtgagtctggctgggctggtattttgtttgatcttcctggaaatgagcagtgactaacgctcacataactggttttttttttatctgggctgatgaatacatttacctaagaaactcatttcgttttacttaagaggggaagtgcagttttcttttggcagttcagaatccaagcacttgatttgctgggtttggaaaactccttttttggccttctatgtgcttagccataacaattccattaagcaagaaggtaagcaaaagacaaaaaaaaaaaaaggaaaaaaaaaaacttgcactggcttgtctcacttacgaaacatgtcggagctgtttgcctgggtggggctgggtaccgtacctgtcaatgcctgtgattttcataattagcacgtacataaagaagtacattctgttcaggtgataactgagcctcaatcaagcagaaactttttgcttgaaattaaaaaaaaatttctattagtgaaatttcttttttttttttttttggaagcaccctgttatctaaagaatctttgtaagatttttgtaaaattttgttttacaagattttatttgaaattgttttttgcaagattgttatatttctgtatgaatgtattttttattggaataacataaaagaattcttatcagcatcttgagtctggttgttttttttgggggaagggggttgttggaacagattcctcctgcattcatcaccctggcttcctcctgggggcaaatcttcattgagcaaccctgagaacaactcaccgacctcagccccttcctctttccacagcctgtcctgggagctggagaggatgtcagcgagcctgacattgccctccctgaatgcatcaaatactcttctccaaggactgacaaaaacaaccccccggctgtgggcacagtagggaaccatgccggtttgatcttccattgctcaagccagggaatgcattgcagaggcacctgcacaacgacaaacttgagtgtttccctgccacttctgtgcctccacagcctgctccagttccgcagctagagctgggcctaccttccccagccagccctgccacacacctggctgaggcatgtctgggaggggtggaggaggcagagggactccaggccagagggctgttctcacaacctcagcccactctcagtcaaggagggcagaaaataaaagatgacatcactgcc

SEQ ID NO: 15525 - DNA, 8362 bp, Homo sapiens
  source 1..8362: mol_type = unassigned DNA
agcgctgcagaaatagatggcagcttcgtgtcagtgagtttgcatcccccttcctgatccacgagctggagtgattagagccctggaagggaattgttactcccgtggagaagtccccttttcctggcagtcgtctgcactgtacacgctggatgcctctctccatccaccccactcactcgctcctctctcacctcctctctccctctcctgcattgatttttttttttcctttttagttgactgaaacaaaacaaaacaaaagggccactggatgtctgccttcttggggggtgagccagacagactgacaaacaaacagccccaactgtgttcgggggagggtttcgcctcccgttttgcccggcagcagcagcatggacgtgttggctagttatagtatattccaggagctacaacttgtccacgacaccggctacttctcagctttaccatccctggaggagacctggcagcagacatgccttgaattggaacgctacctacagacggagccccggaggatctcagagacctttggtgaggacttggactgtttcctccacgcttcccctcccccgtgcattgaggaaagcttccgtcgcttagaccccctgctgctccccgtggaagcggccatctgtgagaagagctcggcagtggacatcttgctctctcgggacaagttgctatctgagacctgcctcagcctccagccggccagctcttctctagacagctacacagccgtcaaccaggcccagctcaacgcagtgacctcattaacgcccccatcgtcccctgagctcagccgccatctggtcaaaacctcacaaactctctctgccgtggatggcacggtgacgttgaaactggtggccaagaaggctgctctcagctccgtaaaggtgggaggggtcgcaacagctgcagcagccgtgacggctgcgggggccgttaagagtggacagagcgacagtgaccaaggagggctgggggctgaagcatgtcccgaaaacaagaagagggttcaccgctgtcagtttaacgggtgccggaaagtttatacaaaaagctcccacttaaaggcccaccagaggactcacacaggtgagaagccttataagtgctcatgggagggatgtgagtggcgttttgcacgaagcgatgagctcacgaggcactacaggaaacacacaggtgcaaagcccttcaaatgcaaccactgcgacaggtgtttttccaggtctgaccatcttgccctccacatgaagagacatatctaaaaaaccgaaaggccagagttgccatggcatcggctagtgtctaaaggaaacgccatgaggcagggggctggacttcaggcggggacccattgcctcgcagaagaaagttctcacttataaacctctgtacacacacacacacacacacacatatacacacactcacagacccacacacatacacactgtcatgcactcaactatatttaaaatatatacgtctattctttatgccttgccctagccagatggaagaagatgaagaaggaaaccaggtgaactcagcaaggcagactggctgcttacttcagcactattggaattatttcccgctgttgccaatggaaatcaaagaaaatggatgtgacgtctgtgcaggtggacggcagtccgaggggcttatttcacttgcttctcagtgcaacttgataggagaatccagcatcttaaagttgcatatgtgtagcactaatgtttctttttaaatagttgggggaaaatgacctagaaaaccaaattgcagtttggtagccaaaattaactcttggtttatttgtcctttgtgtgtgaaaagtcctactattccgtgcgtcagacttcctcacagaactgttgactggttttggttcttagtactattgagatctttcgcgtcgatcccaacggccttagcggcggcagactggaataacaccttacacctttctggcctgcatttctgtagacttcactctcaagggaggagttttcttttcttacgttttgacttttgcacaccatatgcactagggattctggaaacttctagcatgactgcaaagtggccaagagaataaagtccttgatgataaatcacagtatatcccttgagcctcaccttattgccagtgctagattttttctttttaatctctccgtttttgctaacgaaaacttgaaaagcttatttggaagcttaaatgttttatcttttctccatggactaaacctctccaggactctctcggcacctggatgtccagctctcgaagcagccagtcagatgggacatcacagttctctcatcctccttgaggcatgatgacctcagctcatagtgatcaaccgttgtgctgtgtgtcattgctaccccataaccagttacagcatagatgtcgctagtctcagagggcagctgcgtatttaatttaactctggtttatgacctgacaaaaagccaaaaatatcactctttccaggagtggggaaaactgaggatgcctcccaagtctagtggcttcacaaaagatcatcctgtcttctctgtcatgcccactgagctcctattcccctacgtgttacaatacacaatttaaaacgccattgtgggagtgaagggttgacatttaaggaaaaggttgaggtgtttctctcatgggctgtctaaaaggagagacacgtttctttctttccttttttttttggctaggcccaccatgacttgtgacctagaacccccaggattaacagaggcctcacatttactctgcaagctgactccaaaggagtctacagtccttacttgtcatgccacactcacacatccagtagtggtctctatctacccgcattcctagctagctggcactggcctcaactccaaagactgcctttaggaccatcaaatggcctatgcaagcaagcggggtggttattaggacagattgtatattttgtatattctgggaccatcccttcaagacacgtctataaaacaaaaatggcgcttggtccacacacggttgctgctccctcctaccagctggctcccctcctgtcctcctttgactgtttgactcattgactgttaaaatgccaccccatacatatttgggatgcaaaactgaagtcaaaaggaaataatataagaaacacaaacacatatatgacagcaaccttcaagatctgggttttcagctttctgcaacctttgttttcactgaaatgttgaaactactcgtctgagggcaaaggaacctcctcacaaatgctatagctgccaattggacacttggggcatttcgaggtctggccctaagaatttactttctccttttccttttttctatttagaccaaaaaaaacaaaaacaaaaacaaaaaaaaaaacaaaataatacaaaacgaaaaaaaaagaaagaacacccgttaacacacacgcgcacacacacacaaaatctgtccatttgccggaggcaattgtatgtatgttagttggagggtattaaaaatcagttttattccaaagatttaaaactagacatgacttaaaaacaatttctggagcactgcttgctgacaatctcgtagttctctgctgcatttgagtgcattttgtggccagtccatcagggcgtaccatgggattatatttgaatgtgtggtgcatccttcctggatgaaggatgtgtgagggaccttgaacctcagctgtattaaactgtagcgcctccagtcagtgcactagatgaaacttttagacaccctgaattctgttggttcctttcttttcctttatgtagcagcctccagcatgaatgcacgcacacgccagtgatggcattaagccatggccaccacgatttgcaaatgttctctcccaagctggagctgctcttgcctctcgaatgctattattaagggtttataatacttaatttaattttcgaactgaccaatgcaaggctctattaaaaagaaagtttaaaaaatgcaaaagagtaatcattgcttgtttgctccctattttcatctgtggtctcatttgaatgtggcagaacaaaggccctttggtcctcatcagtgtctgaaatgttcagtaatttctctctcttttgtatcagtgaggtcctttgtaatctgctcctgacctttcttggagcagggtgcattgaaactcaatggtggtgcttgcttgcttcagagtcatttgttgactgtgagaattggcctaagaatttggtgggtgctaagtggatggctttgaaactgttcttctttagccgagttgacacctgtgaatgatgaccagtcctgatcattttggaaatggatttgtaataaaacgtccatcacctctgcagtggcagagatggttactaagagccgctagagcgagcaggttttccaagaagtaacctgaagacattttgctcccaagaggactggttatttaaaacagtgcattaatggacatttgaaacacattaaacccctttctcatttcagttgttacctcctaaccctccaggggatcccaaatttgaaaggaaaaacccggcctggtgtttctggtggtgtcctaacaagcacgcttttatccagggttcagatttgttcatgtagaaaaagagtttctaagccactgacaattttttttttttgtaatttcaaattatacttctttctcctgccacatgactgtaagtcatagacatggaaacctgaaattataatgctgctcctagctactggcctcctgccccacccatggttaatggctcagctcaatgcctggtggtaatgagtattatgtccagaaaaagagatgttcagattccatgacaaagctgcatttttgtaaaaatattggagaccccaaaatgaacttcatgctgaccatttcctcctctctgtgtgctttcccttgcaaagcccttcaaatatcctcttctctcgacgccatctcctctccacctgcacctcttgtgccctttgtacatctttgattgcctgatgataacagggtaaaaggacagccaacctcatgcctgattagcagaactgaatcctagttttaaaaaatcttctctggcttcagagaagattttataaggacttttgtttgggataagctttccagattatccatgtctatttgcatcaaaggggaaagaaatggggcttttggatggctcttccagtgcattcggaacattgcctcttgcctttattcctgcattttatggcaaagccaaaagaaactcaagttgcaagaacaaaacccagtgactcgttttgatggttcaaaatggtttcctttatggaagtcacttcataaaatgttaagtaaaaagtgggaagtgcttctgtcttctcttttgcatgagttgcttttaggagcaggaagaaggtaggcaaagtaagataaagatgcaacacatttaactacaaaaatcaggttcattttttagtttattagaatttttttgaaatcttaagagggccagcatttctggctacaattttgcacccagaacattgccaaaatgaacattcagtaaatagaacctgattgaaatttactcctggaagctttcctttgcattttcgggaagtggccacctgccaagcgcaagagttggggggcaggaggggaggactcaaattcagggtgtctggattaaatttcggtgaacatggtgatatctcagtttgaaaactagagggcctatcctgagtatacatcaatgtctctttgatggcctactttcctcagtgaggatctttgggaatacttgagatggaacaacagaaatgtgtgaaaggaagcagaaacttcttgtaaataacgtgacctcccacgacgaactgcctgaggcttcagggttttttcttgcttttaacactcttaaatctcctctgttggttcctaatagatcccagaaaagggaaaaataaagctgcagttaactttcttatgtgcatccttccaatagagtactgtatttttcaggtgttttgcatttaacataaaagtcctcgggaaacaggtgtcaaaaacagagagagaaatcctgggccatcacttcacaaatatcccaaacaagatattcttttcaaacagggctccctctcagtggtcatgagggaaggttgataatgttctttgttggggactgtttatacaattttttttcaactgtgagctttggaatcgtaacttgctgtgagtccagcttctgtctactgccataagatggaccccacgtcagcataatgagggtggtatatatgctcgcacctagacatgcgcatatgtacctgtcgtaccttcacggaaggaaaacaggctactgacgtttcggaggagtagccaccagtgcctaatatcttttgggggggatggatgcttataattgccagtatatcgaaaccacactgggagttccacatagcggggaggggttgggggtgggcagaggggacattttaaacctaggcctttggactggaggcagaacgatttctgcaaacctaggtcctgaaggctttggggcttattggctggttctcaacctttttgttttttcttcccagcatgcatttcctatctaaacccagacttagtttaatttccttatctttcacttctgcttcattccagggaggaaaaatacacctgttaatggccaagatctccttgctaacacagaggcaaaaataaatgtctaatgtttttgaagcctccccttcctttccacaagcccccacccgcccccgcgtcaagctccttctcccacttcctactcccacacaacttcccagccactgaaacttttctttcaaatctctattatcctcttaacagttgcttgaataaatttatttttgcactatacattttctttttgccagatgtgtctaacaagtgtgtttggagagacctactcccagccccgtctccttccccgcctccccccgtcacattctctcaggccttctctggtatttataatatatcacagaagtacccagtcttatagccctcggttatgcctttttttgacattttattttttttaagctttttatatatatatatatataaatatattactttgtcaagtttttttgctgtacaaaagtcttaagatttaaaactattatttgtattatatgatggtggtatgttaatgttacaaaattattaatgaagaaaaaatttatttttgttactggtctgtttcataattcttttttaaattggtatattgtaagatatctatgcaaaaaatgttatgtgacgcatttttatttaagaatgtaatatgtgtaataaacagtagaatgtgtttggccttggaatactttactgtatttctccttagcttgtttcactggggaaaaaaatcttcgaaagacgcaagtgggtacttacatacttcgtgaaagttttctttcttggagaaagggaaagcaaaaggttgtattaggttatcttcgtttgggaagttgtgtgtgtgtgtgcgtatgtgtgtattttatagtttcattgaggcagctcaatgcccaaataagggtcactgagtttatttcttcaaggggaaaaagggagccaattgttggagattatgaaaagcaatattttagaatgatagagattacaagatgttatttgtttagggggttgggagaggcttattgaaagcggtttatttggcgagagaaggaggcagtttgttctgggatggtgtttaataggaacctattgggaaaggatctttgaagcagtctgtgaaggaggaagggtaaagatcagagggaataatttaggtgaggggtagggggcagtaaaatgacaggaggtggttggagtggggaggaaatgggtaaccggaagccaggaaatccagctggctgtggagagtacaaaaaactagatggaaatacaagcagcttcagacccagagaagagagggagatgaaagccccagggaaaattctcagaactgaaaagaaaagtactaaaatctctgccacacacgacttccaggaaagagcatcaccagtaaggaggaaggtagagaacccagctggtggtgtcgcctcagcatcccgagctcagcgattccccgagagaagtggtgtcattcacaggaaacagcagtaaaacacatttgtcacatgggacacagcagtagtcaagctttctttgcattctttggacttacagaagtggatacggtggtgaataacctctatccctaatcaaatgaatctgacaagaaactttccaataaatgtttactttagaaa

SEQ ID NO: 15526 - DNA, 1259 bp, Homo sapiens
  source 1..1259: mol_type = unassigned DNA
gatttgggagaggaaggggagatgatgtaactggttcggcatgttcccgtcttggccaacatgccttgaattggaacgctacctacagacggagccccggaggatctcagagacctttggtgaggacttggactgtttcctccacgcttcccctcccccgtgcattgaggaaagcttccgtcgcttagaccccctgctgctccccgtggaagcggccatctgtgagaagagctcggcagtggacatcttgctctctcgggacaagttgctatctgagacctgcctcagcctccagccggccagctcttctctagacagctacacagccgtcaaccaggcccagctcaacgcagtgacctcattaacgcccccatcgtcccctgagctcagccgccatctggtcaaaacctcacaaactctctctgccgtggatggcacggtgacgttgaaactggtggccaagaaggctgctctcagctccgtaaaggtgggaggggtcgcaacagctgcagcagccgtgacggctgcgggggccgttaagagtggacagagcgacagtgaccaaggagggctgggggctgaagcatgtcccgaaaacaagaagagggttcaccgctgtcagtttaacgggtgccggaaagtttatacaaaaagctcccacttaaaggcccaccagaggactcacacaggtgagaagccttataagtgctcatgggagggatgtgagtggcgttttgcacgaagcgatgagctcacgaggcactacaggaaacacacaggtgcaaagcccttcaaatgcaaccactgcgacaggtgtttttccaggtctgaccatcttgccctccacatgaagagacatatctaaaaaaccgaaaggccagagttgccatggcatcggctagtgtctaaaggaaacgccatgaggcagggggctggacttcaggcggggacccattgcctcgcagaagaaagttctcacttataaacctctgtacacacacacacacacacacacatatacacacactcacagacccacacacatacacactgtcatgcactcaactatatttaaaatatatacgtctattctttatgccttgccctagccagatggaagaagatgaagaaggaaaccaggtgaactcagcaaggcagactggctgcttacttcagcactattggaattatttcccgctgttgccaatggaaatcaaagaaaatggatgtgacgtctgtgcaggtggacggcagtccga

SEQ ID NO: 15527 - DNA, 3037 bp, Homo sapiens
  source 1..3037: mol_type = unassigned DNA
agatgtaacagatctctctatgtctacatcccaactccagaaaacgagaaatcgagttcctcctctcaccatcgaagctctgcagacacctcgctggagaccccatgacatgccttgaattggaacgctacctacagacggagccccggaggatctcagagacctttggtgaggacttggactgtttcctccacgcttcccctcccccgtgcattgaggaaagcttccgtcgcttagaccccctgctgctccccgtggaagcggccatctgtgagaagagctcggcagtggacatcttgctctctcgggacaagttgctatctgagacctgcctcagcctccagccggccagctcttctctagacagctacacagccgtcaaccaggcccagctcaacgcagtgacctcattaacgcccccatcgtcccctgagctcagccgccatctggtcaaaacctcacaaactctctctgccgtggatggcacggtgacgttgaaactggtggccaagaaggctgctctcagctccgtaaaggtgggaggggtcgcaacagctgcagcagccgtgacggctgcgggggccgttaagagtggacagagcgacagtgaccaaggagggctgggggctgaagcatgtcccgaaaacaagaagagggttcaccgctgtcagtttaacgggtgccggaaagtttatacaaaaagctcccacttaaaggcccaccagaggactcacacaggtgagaagccttataagtgctcatgggagggatgtgagtggcgttttgcacgaagcgatgagctcacgaggcactacaggaaacacacaggtgcaaagcccttcaaatgcaaccactgcgacaggtgtttttccaggtctgaccatcttgccctccacatgaagagacatatctaaaaaaccgaaaggccagagttgccatggcatcggctagtgtctaaaggaaacgccatgaggcagggggctggacttcaggcggggacccattgcctcgcagaagaaagttctcacttataaacctctgtacacacacacacacacacacacatatacacacactcacagacccacacacatacacactgtcatgcactcaactatatttaaaatatatacgtctattctttatgccttgccctagccagatggaagaagatgaagaaggaaaccaggtgaactcagcaaggcagactggctgcttacttcagcactattggaattatttcccgctgttgccaatggaaatcaaagaaaatggatgtgacgtctgtgcaggtggacggcagtccgaggggcttatttcacttgcttctcagtgcaacttgataggagaatccagcatcttaaagttgcatatgtgtagcactaatgtttctttttaaatagttgggggaaaatgacctagaaaaccaaattgcagtttggtagccaaaattaactcttggtttatttgtcctttgtgtgtgaaaagtcctactattccgtgcgtcagacttcctcacagaactgttgactggttttggttcttagtactattgagatctttcgcgtcgatcccaacggccttagcggcggcagactggaataacaccttacacctttctggcctgcatttctgtagacttcactctcaagggaggagttttcttttcttacgttttgacttttgcacaccatatgcactagggattctggaaacttctagcatgactgcaaagtggccaagagaataaagtccttgatgataaatcacagtatatcccttgagcctcaccttattgccagtgctagattttttctttttaatctctccgtttttgctaacgaaaacttgaaaagcttatttggaagcttaaatgttttatcttttctccatggactaaacctctccaggactctctcggcacctggatgtccagctctcgaagcagccagtcagatgggacatcacagttctctcatcctccttgaggcatgatgacctcagctcatagtgatcaaccgttgtgctgtgtgtcattgctaccccataaccagttacagcatagatgtcgctagtctcagagggcagctgcgtatttaatttaactctggtttatgacctgacaaaaagccaaaaatatcactctttccaggagtggggaaaactgaggatgcctcccaagtctagtggcttcacaaaagatcatcctgtcttctctgtcatgcccactgagctcctattcccctacgtgttacaatacacaatttaaaacgccattgtgggagtgaagggttgacatttaaggaaaaggttgaggtgtttctctcatgggctgtctaaaaggagagacacgtttctttctttccttttttttttggctaggcccaccatgacttgtgacctagaacccccaggattaacagaggcctcacatttactctgcaagctgactccaaaggagtctacagtccttacttgtcatgccacactcacacatccagtagtggtctctatctacccgcattcctagctagctggcactggcctcaactccaaagactgcctttaggaccatcaaatggcctatgcaagcaagcggggtggttattaggacagattgtatattttgtatattctgggaccatcccttcaagacacgtctataaaacaaaaatggcgcttggtccacacacggttgctgctccctcctaccagctggctcccctcctgtcctcctttgactgtttgactcattgactgttaaaatgccaccccatacatatttgggatgcaaaactgaagtcaaaaggaaataatataagaaacacaaacacatatatgacagcaaccttcaagatctgggttttcagctttctgcaacctttgttttcactgaaatgttgaaactactcgtctgagggcaaaggaacctcctcacaaatgctatagctgccaattggacacttggggcatttcgaggtctggccctaagaatttactttctccttttccttttttctatttagaccaaaaaaaa

SEQ ID NO: 15528 - DNA, 750 bp, Homo sapiens
  source 1..750: mol_type = unassigned DNA
acacgcggcctaatggacgccctcctcgagatcccacggctgcgcggagaaccgaacggagggagggagtttggggagggggaagagcaggaggaggagaaaagggagggggaagactacaaactagcaaggatggggtggggggtggggagggaagggaaggggggggaagagaagcgatcgcgagagaaaaaaatgcaacctcccaaaataaagagcaaagattgcattaggagcgaacagcgctgcagaaatagatggcagcttcgtgtcattgactgaaacaaaacaaaacaaaagggccactggatgtctgccttcttggggggtgagccagacagactgacaaacaaacagccccaactgtgttcgggggagggtttcgcctcccgttttgcccggcagcagcagcatggacgtgttggctagttatagtatattccaggagctacaacttgtccacgacaccggctacttctcagctttaccatccctggaggagacctggcagcagacatgccttgaattggaacgctacctacagacggagccccggaggatctcagagacctttggtgaggacttggactgtttcctccacgcttcccctcccccgtgcattgaggaaagcttccgtcgcttagaccccctgctgctccccgtggaagcggccatctgtgagaagagctcggcagtggacatcttgctctctcgggacaagttgctatctgagacctgcctcagcctcca

SEQ ID NO: 15529 - DNA, 594 bp, Homo sapiens
  source 1..594: mol_type = unassigned DNA
attgtgcagggttttcatctcagatgtaacagatctctctatgtctacatcccaactccagaaaacgagaaatcgagttcctcctctcaccatcgaagctctgcagacacctcgctggagaccccatggtgagcctcatcacgtaaaggccccctcgcaagctgccggctccagcttgcgccccacgtctacctaggctccctctagcctctttaacgcacagtcgagcaacaggccccttgcaatcaactctagccgccggactcccgaccagttgactgaaacaaaacaaaacaaaagggccactggatgtctgccttcttggggggtgagccagacagactgacaaacaaacagccccaactgtgttcgggggagggtttcgcctcccgttttgcccggcagcagcagcatggacgtgttggctagttatagtatattccaggagctacaacttgtccacgacaccggctacttctcagctttaccatccctggaggagacctggcagcagacatgccttgaattggaacgctacctacagacggagccccggaggatctcagagacctttggtgaggacttggactgttt

SEQ ID NO: 15530 - DNA, 539 bp, Homo sapiens
  source 1..539: mol_type = unassigned DNA
agcatggacgtgttggctagttatagtatattccaggagctacaacttgtccacgacaccggctacttctcagctttaccatccctggaggagacctggcagcagacatgccttgaattggaacgctacctacagacggagccccggaggatctcagagacctttggtgagaagccttataagtgctcatgggagggatgtgagtggcgttttgcacgaagcgatgagctcacgaggcactacaggaaacacacaggtgcaaagcccttcaaatgcaaccactgcgacaggtgtttttccaggtctgaccatcttgccctccacatgaagagacatatctaaaaaaccgaaaggccagagttgccatggcatcggctagtgtctaaaggaaacgccatgaggcagggggctggacttcaggcggggacccattgcctcgcagaagaaagttctcacttataaacctctgtacacacacacacacacacacacatatacacacactcacagacccacacacatacacactgtcatgcact

SEQ ID NO: 15531 - DNA, 4821 bp, Homo sapiens
  source 1..4821: mol_type = unassigned DNA
tcctttgggcctagcagggccagagaaagacggaatcactctacccactcaggttgcccagagagcactttaggttctgactcgcgtggggcgcgaggtaccccgtggggcagctaggtgcctccaagaaaccccgccccagaggacccgcacgagttgctgccatttttcgctgaagcccctgccctggggctggtgttcttctctatgattctaccaatcgtcggcatttttttcctcccttctttctttttaggaaggcgctggggtgtgcggcggcaacggcggcggtgaagggatcctcttgtgcccggagaaataggggagtgggggcccaagaacgagaagacgagaacgcgtcgccctgcgctatgtcagaatggggcgggtgtgaggggaacagctctcttgcgatcagctcaggagtatgagcctcccggaggacggcatgagttctggacacttcaggagtcctcagctagtgacatggtcgatatggataaactcataaacaacttggaggtccaacttaattcagaaggtggctcaatgcaggtattcaagcaggtcactgcttctgttcggaacagagatccccctgagatagaatacagaagtaatatgacttctccaacactcctggatgccaaccccatggagaacccagcactgtttaatgacatcaagattgagcccccagaagaacttttggctagtgatttcagcctgccccaagtggaaccagttgacctctcctttcacaagcccaaggctcctctccagcctgctagcatgctacaagctccaatacgtccccccaagccacagtcttctccccagacccttgtggtgtccacgtcaacatctgacatgagcacttcagcaaacattcctactgttctgaccccaggctctgtcctgacctcctctcagagcactggtagccagcagatcttacatgtcattcacactatcccctcagtcagtctgccaaataagatgggtggcctgaagaccatcccagtggtagtgcagtctctgcccatggtgtatactactttgcctgcagatgggggccctgcagccattacagtcccactcattggaggagatggtaaaaatgctggatcagtgaaagttgaccccacctccatgtctccactggaaattccaagtgacagtgaggagagtacaattgagagtggatcctcagccttgcagagtctgcagggactacagcaagagagagaagccttataaatgcacctgggatggctgctcctggaaatttgctcgctcagatgagctcactcgccatttccgcaagcacacaggcatcaagccttttcggtgcacagactgcaaccgcagcttttctcgttctgaccacctgtccctgcatcgccgtcgccatgacaccatgtgagccgcacaggtcacactagagaagctgcgctggtatctttcctggtcgtgtgctgaggttgggacaattttttcctctttgacttcagcttgcatatggggttgaagcagcccactgagccaagttgaggagactggaggaaaagagagctggtctcccgtggggctcttcatattctaccttcacttctccactgtccagacccgtttttttcaacctccacatgggttgaattccagtgtggcacccatggctgccttcccatccccccctgctctgaaataggacatttttcctacagtaacaaaacaggaatcaaactcaaggctgtgaacaaacatacgctgctttattctttccaatttttctcttgttttctagaactcttatccatatgtttttaaaataagtacctaaaagtggtttgatagtgtcctaaacgacttttttaacttcctaaatggaaagagcataacaatgtagttgattggtaagatttacagggatttggtttctgagtttgaggcacattcccagtgaataagctgagtcccataccacactcaaaaggttttaataaatctaatcctatttcttcttaaagtttggttttcagacagtgctggtgcttctgcttcttaagttcatcaagggaatgaggagttcttgtccttctcctcctcttttttttcttttccactttctccttcaggattaaagattttgctgcacaattgttatttgttaggttaaatttggacaaatattcaaagcacacatagacatataagtaaggagaaaaatgttccaggagagtaggttgggcagtgacaggaacaaacagacctaggatgatcctgagaacaaatagaggggttcctttacttgtataggatatcaaaagtgctgttaatcacaaacctcattcaaatggcaggctgtcgagacagtgtcttgaggggctggctgtactgtttattttttcgtttacacaaagaagcaattgagtatattgcatgatgagaaatcacacactagggtcatgttatacagaagtaaggggttggaaaaatggaatgttgttcactccatggaattattggcattcattcctgtgtttcaaatgaaacatagatgcttttcatgaaaactgacctacaaaaagcaatttgatgttctgcaactgctatgaaaacctaagccatttattttagctgatagcagattgcataatatactcatttagctgcccaatcagattgttttataatattacctggggtacaaaatcctctgttcctggccctggaccacagatctacctccacatggcatatttcctttctggggtcaggggtaggggagggggctttgcatcacttgaatttagactcagcctctctttaaaagattgtctttatattgaacacctttttcttttcaaccctgcttgaatactttaggttactatttcctgaggctgtccattctcactatattgtagaattctagcaccaagaagggatcccgttaaccatctagtcctatccatccctcatattttacagatgagacaaatacgggtcagatttttttctccagatgtttctttgagcccttatacacctgcacgcttattctcctggggatcacataattttatttatttattttttgagagacggtttcactccatcacccaggctggagtgcagtggcgtaatcttggctcactgcaacctccgcctcctgggttcaagtgattctcctgcctcagcctcccaaatagcttggattacaggtgcgtgccaccacacctagctaagttttgtattattagtagagatggggtttcgccatgttggccaggctggtctcaaactcctgacctcaagtgatccccccacctcggcctcccaaagtgctgggatcacaggtgtgagtcaccacacctggccaggatcacattattaaaccaaattaaagtttatgtgattggttgcaatatttgtctaattttatatgttttcttcaggaaaactttagaactcaaaaatcatttacagctgattaaatagcaagtaaaatgtacttgtggtcattgccgtataacattaggcacacgcttctaacacttctataatatctagattttatttacctcattttaacttgcaatgtctgtctatctcatgaactctccataaatccaagaactgcctgtagttttcaaaatgacatgtgggtttttactgttatcattgttatttcgatagggctttttcctgattttgggtatacaagttccaaacttgcataataattgctaacgcactaggcgatatctagggccagtctgttaaaggggacctctaatgtagctataagacaggttggtaaagatgaactaacataagtttaagctaataattcagtagttgatgcagtatttcacagtagagcccgagcttactcatttttttcaaaatttggatcctgatactcctttttcagagttcagaactgaactgctcccctaagacctcagaatcttttgcattgagacatatgatctatttataaataaaggttatcaaatatcttgttgaactaattaggttgatcaaattaggatcccaaatattggggtccctgacatctgagcctttatctaaaaatgtttctgtaacataatgacagcctttatgtttgttaattgcctatagtaaagaagcaattttaagcctattctcatttccctctcccctacaaaaaatgataaaagctttccaattacttacatatgctctaacaagtgtctcaggattcattaacagaattttatagagtacagtaattcaaatatagcacagtacagagtttaccaaaaacacataaaactttgctagatagacagtgaggtggaaaggaactaaaatgtatctctcttgaatagcatttggggttcaattgaatttgttgtgtttacaacagcaaagcaccgttagcctggacagttgcttatggcatcgatagggttggataatattctgggatttgttgcagcagaattcctctatctgatgatcagcagttgaacataaacttcataattatagtaaaatttaggaaaaactatgagtgtgaagagtatgaactgattgggtagattaggcagagtgcattatgggcaagacaaaggttttcgatattaacttcttttaaaataaactttttattttcaaacagtttcagttttacagaaaaaatgtgaagctagtacagagaggtctcatttaccccacacccagtttctcctgttattagcatctcacattaatatgtggtatatttgttacaattaataaaacacattgatatgttaatattattaa

SEQ ID NO: 15532 - DNA, 1543 bp, Homo sapiens
  source 1..1543: mol_type = unassigned DNA
cccctgatttttgggttggatgcttgagagctttgtttcccttgttccgagagtggcccagctgggtctgaatcgactccctcccctttcgaccccctcctcattttccagcccggagaaataggggagtgggggcccaagaacgagaagacgagaacgcgtcgccctgcgctatgtcagaatggggcgggtgtgaggggaacagctctcttgcgatcagctcaggagtatgagcctcccggaggacggcatgagttctggacacttcaggagtcctcagctagtgacatggtcgatatggataaactcataaacaacttggaggtccaacttaattcagaaggtggctcaatgcaggtattcaagcaggtcactgcttctgttcggaacagagatccccctgagatagaatacagaagtaatatgacttctccaacactcctggatgccaaccccatggagaacccagcactgtttaatgacatcaagattgagcccccagaagaacttttggctagtgatttcagcctgccccaagtggaaccagttgacctctcctttcacaagcccaaggctcctctccagcctgctagcatgctacaagctccaatacgtccccccaagccacagtcttctccccagacccttgtggtgtccacgtcaacatctgacatgagcacttcagcaaacattcctactgttctgaccccaggctctgtcctgacctcctctcagagcactggtagccagcagatcttacatgtcattcacactatcccctcagtcagtctgccaaataagatgggtggcctgaagaccatcccagtggtagtgcagtctctgcccatggtgtatactactttgcctgcagatgggggccctgcagccattacagtcccactcattggaggagatggtaaaaatgctggatcagtgaaagttgaccccacctccatgtctccactggaaattccaagtgacagtgaggagagtacaattgagagtggatcctcagccttgcagagtctgcagggactacagcaagaaccagcagcaatggcccaaatgcagggagaagagtcgcttgacttgaagagaagacggattcaccaatgtgactttgcaggatgcagcaaagtgtacaccaaaagctctcacctgaaagctcaccgcagaatccatacaggagagaagccttataaatgcacctgggatggctgctcctggaaatttgctcgctcagatgagctcactcgccatttccgcaagcacacaggcatcaagccttttcggtgcacagactgcaaccgcagcttttctcgttctgaccacctgtccctgcatcgccgtcgccatgacaccatgtgagccgcacaggtcacactagagaagctgcgctggtatctttcctggtcgtgtgctgaggttgggacaattttttcctctttgacttcagcttgcatatggggttgaagcagcccactgagccaagttgaggagactggaggaaaagagagctggtctcccgtggggctcttcatat

SEQ ID NO: 15533 - DNA, 2934 bp, Homo sapiens
  source 1..2934: mol_type = unassigned DNA
gagggcgagaagccgccgttgacaattacgtctgggtccaagcaaacatgaggcagctgccagccggcctgggcagtcttgtctgcctcggctgtgaagtggggaggctggcaacagttttcttcagcgcccaggatgcagccggctaaggaagtgacaaaggcgtcggacggcagcctcctgggggacctcgggcacacaccacttagcaagaaggagggtatcaagtggcagaggccgaggctcagccgccaggctttgatgagatgctgcctggtcaagtggatcctgtccagcacagccccacagggctcagatagcagcgacagtgagctggagctgtccacggtgcgccaccagccagaggggctggaccagctgcaggcccagaccaagttcaccaagaaggagctgcagtctctctacaggggctttaagaatgagtgtcccacgggcctggtggacgaagacaccttcaaactcatttacgcgcagttcttccctcagggagatgccaccacctatgcacacttcctcttcaacgcctttgatgcggacgggaacggggccatccactttgaggactttgtggttggcctctccatcctgctgcggggcacagtccacgagaagctcaagtgggcctttaatctctacgacattaacaaggatggctacatcaccaaagaggagatgctggccatcatgaagtccatctatgacatgatgggccgccacacctaccccatcctgcgggaggacgcgccggcggagcacgtggagaggttcttcgagaaaatggaccggaaccaggatggggtagtgaccattgaagagttcctggaggcctgtcagaaggatgagaacatcatgagctccatgcagctgtttgagaatgtcatctaggacacgtccaaaggagtgcatggccacagccacctccacccccaagaaacctccatcctgccaggagcagcctccaagaaacttttaaaaaatagatttgcaaaaagtgaacagattgctacacacacacacacacacacacacacacacacacacagccattcatctgggctggcagaggggacagagttcagggaggggctgagtctggctaggggccgagtccaggagccccagccagcccttcccaggccagcgaggcgaggctgcctctgggtgagtggctgacagagcaggtctgcaggccaccagctgctggatgtcaccaagaaggggctcgagtgcccctgcaggggagggtccaatctccggtgtgagcccacctcgtcccgttctccattctgctttcttgccacacagtgggccggccccaggctcccctggtctcctccccgtagccactctctgcccactacctatgcttctagaaagcccctcacctcaggaccccagagggaccagctggggggcaggggggagagggggtaatggaggccaagcctgcagctttctggaaattcttccctgggggtcccaggatcccctgctactccactgacctggaagagctgggtaccaggccacccactgtggggcaagcctgagtggtgaggggccactgggccccattctccctccatggcaggaaggcgggggatttcaagtttagggattgggtcgtggtggagaatctgagggcactctctgccagctccacagggtgggatgagcctctccttgccccagtcctggttcagtgggaatgcagtgggtggggctgtacacaccctccagcacagactgttccctccaaggtcctcttaggtcccgggaggaacgtggttcagagactggcagccagggagcccggggcagagctcagaggagtctgggaaggggcgtgtccctcctcttcctgtagtgcccctcccatggcccagcagcttggctgagccccctctcctgaagcagtgtcgccgtccctctgccttgcacaaaaagcacaagcattccttagcagctcaggcgcagccctagtgggagcccagcacactgcttctcggaggccaggccctcctgctggctgaggcttgggcccagtagccccaatatggtggccctggggaagaggccttgggggtctgctctgtgcctgggatcagtggggccccaaagcccagcccggctgaccaacattcaaaagcacaaaccctggggactctgcttggctgtcccctccatctggggatggagaatgccagcccaaagctggagccaatggtgagggctgagagggctgtggctgggtggtcagcagaaacccccaggaggagagagatgctgctcccgcctgattggggcctcacccagaaggaacccggtcccaggccgcatggcccctccaggaacattcccacataatacattccatcacagccagcccagctccactcagggctggcccggggagtccccgtgtgccccaagaggctagccccagggtgagcagggccctcagaggaaaggcagtatggcggaggccatgggggcccctcggcattcacacacagcctggcctcccctgcggagctgcatggacgcctggctccaggctccaggctgactgggggcctctgcctccaggagggcatcagctttccctggctcagggatcttctccctcccctcacccgctgcccagccctcccagctggtgtcactctgcctctaaggccaaggcctcaggagagcatcaccaccacacccctgccggccttggccttggggccagactggctgcacagcccaaccaggaggggtctgcctcccacgctgggacacagaccggccgcatgtctgcatggcagaagcgtctcccttggccacggcctgggagggtggttcctgttctcagcatccactaatattcagtcctgtatattttaataaaataaacttgacaaagga

SEQ ID NO: 15534 - DNA, 2732 bp, Homo sapiens
  source 1..2732: mol_type = unassigned DNA
atgcagccccggaaggaagtgacaaaggcgtcggacggcagcctcctgggggacctcgggcacacaccacttagcaagaaggagggtatcaagtggcagaggccgaggctcagccgccaggctttgatgagatgctgcctggtcaagtggatcctgtccagcacagccccacagggctcagatagcagcgacagtgagctggagctgtccacggtgcgccaccagccagaggggctggaccagctgcaggcccagaccaagttcaccaagaaggagctgcagtctctctacaggggctttaagaatggagatgccaccacctatgcacacttcctcttcaacgcctttgatgcggacgggaacggggccatccactttgaggactttgtggttggcctctccatcctgctgcggggcacagtccacgagaagctcaagtgggcctttaatctctacgacattaacaaggatggctacatcaccaaagaggagatgctggccatcatgaagtccatctatgacatgatgggccgccacacctaccccatcctgcgggaggacgcgccggcggagcacgtggagaggttcttcgagaaaatggaccggaaccaggatggggtagtgaccattgaagagttcctggaggcctgtcagaaggatgagaacatcatgagctccatgcagctgtttgagaatgtcatctaggacacgtccaaaggagtgcatggccacagccacctccacccccaagaaacctccatcctgccaggagcagcctccaagaaacttttaaaaaatagatttgcaaaaagtgaacagattgctacacacacacacacacacacacacacacacacacacagccattcatctgggctggcagaggggacagagttcagggaggggctgagtctggctaggggccgagtccaggagccccagccagcccttcccaggccagcgaggcgaggctgcctctgggtgagtggctgacagagcaggtctgcaggccaccagctgctggatgtcaccaagaaggggctcgagtgcccctgcaggggagggtccaatctccggtgtgagcccacctcgtcccgttctccattctgctttcttgccacacagtgggccggccccaggctcccctggtctcctccccgtagccactctctgcccactacctatgcttctagaaagcccctcacctcaggaccccagagggaccagctggggggcaggggggagagggggtaatggaggccaagcctgcagctttctggaaattcttccctgggggtcccaggatcccctgctactccactgacctggaagagctgggtaccaggccacccactgtggggcaagcctgagtggtgaggggccactgggccccattctccctccatggcaggaaggcgggggatttcaagtttagggattgggtcgtggtggagaatctgagggcactctctgccagctccacagggtgggatgagcctctccttgccccagtcctggttcagtgggaatgcagtgggtggggctgtacacaccctccagcacagactgttccctccaaggtcctcttaggtcccgggaggaacgtggttcagagactggcagccagggagcccggggcagagctcagaggagtctgggaaggggcgtgtccctcctcttcctgtagtgcccctcccatggcccagcagcttggctgagccccctctcctgaagcagtgtcgccgtccctctgccttgcacaaaaagcacaagcattccttagcagctcaggcgcagccctagtgggagcccagcacactgcttctcggaggccaggccctcctgctggctgaggcttgggcccagtagccccaatatggtggccctggggaagaggccttgggggtctgctctgtgcctgggatcagtggggccccaaagcccagcccggctgaccaacattcaaaagcacaaaccctggggactctgcttggctgtcccctccatctggggatggagaatgccagcccaaagctggagccaatggtgagggctgagagggctgtggctgggtggtcagcagaaacccccaggaggagagagatgctgctcccgcctgattggggcctcacccagaaggaacccggtcccaggccgcatggcccctccaggaacattcccacataatacattccatcacagccagcccagctccactcagggctggcccggggagtccccgtgtgccccaagaggctagccccagggtgagcagggccctcagaggaaaggcagtatggcggaggccatgggggcccctcggcattcacacacagcctggcctcccctgcggagctgcatggacgcctggctccaggctccaggctgactgggggcctctgcctccaggagggcatcagctttccctggctcagggatcttctccctcccctcacccgctgcccagccctcccagctggtgtcactctgcctctaaggccaaggcctcaggagagcatcaccaccacacccctgccggccttggccttggggccagactggctgcacagcccaaccaggaggggtctgcctcccacgctgggacacagaccggccgcatgtctgcatggcagaagcgtctcccttggccacggcctgggagggtggttcctgttctcagcatccactaatattcagtcctgtatattttaataaaataaacttgacaaagg

SEQ ID NO: 15535 - DNA, 985 bp, Homo sapiens
  source 1..985: mol_type = unassigned DNA
gccgccgccgccgccgcgcctcgaagtttgccggctgactcggaaagttgcgctcgggctcggccgccgcgtccggtccccgcgtccagcctccggcctgacccgctcgccgccgccgccgccctccacggggccccggcccagccaacccagcagccccgcctgccgggggcatgtgagccgtcgccgcccccgagaggccgtgcgggctgcaggggccccggtgcctccgaggcagcgcgtgggcgaggggtgcgcccgggccccagggccccaggcagcccggcttgccatgggcatccagggcatggagctgtgcgccatggccgtggtggtgctgctgttcatcgccgtcctcaagcagttcggcatcctggagcccatatccatggaagatagcagcgacagtgagctggagctgtccacggtgcgccaccagccagaggggctggaccagctgcaggcccagaccaagttcaccaagaaggagctgcagtctctctacaggggctttaagaatgagtgtcccacgggcctggtggacgaagacaccttcaaactcatttacgcgcagttcttccctcagggagatgccaccacctatgcacacttcctcttcaacgcctttgatgcggacgggaacggggccatccactttgaggactttgtggttggcctctccatcctgctgcggggcacagtccacgagaagctcaagtgggcctttaatctctacgacattaacaaggatggctacatcaccaaagaggagatgctggccatcatgaagtccatctatgacatgatgggccgccacacctaccccatcctgcgggaggacgcgccggcggagcacgtggagaggttcttcgagaaaatggaccggaaccaggatggggtagtgaccattgaagagttcctggaggcctgtcagaaggatgagaacatcatgagctccatgcagctgtttgagaatgtcatctag

SEQ ID NO: 15536 - DNA, 952 bp, Homo sapiens
  source 1..952: mol_type = unassigned DNA
aagcctgacgttgctacgattctgtaattaactccctccactccaaaggggtctggaggctgggatgctctgccagctcagaggatgttgactctggagtgggagtccgaaggactgcaaacagtgggtattgttgtgattatatgtgcatctctgaagcttcttcatttgctgggactgattgatttttcggaagacagcgtggaagatgaactggagatggccaccgtcaggcatcggcctgaagcccttgagcttctggaagcccagagcaaatttaccaagaaagagcttcagatcctttacagaggatttaagaatgaatgccccagtggtgttgttaatgaagaaaccttcaaagagatttactcgcagttctttccacagggagactctacaacatatgcacattttctgttcaatgcatttgatacagaccacaatggagctgtgagtttcgaggatttcatcaaaggtctttccattttgctccgggggacagtacaagaaaaactcaattgggcatttaatctgtatgacataaataaagatggctacatcactaaagaggaaatgcttgatataatgaaagcaatatacgatatgatgggtaaatgtacatatcctgtcctcaaagaagatgctcccagacaacacgttgaaacattttttcagaaaatggacaaaaataaagatggggttgttaccatagatgagttcattgaaagctgccaaaaagatgaaaacataatgcgctccatgcagctctttgaaaatgtgatttaacttgtcaaatagatcctgaatccaacagacaaatgtgaactattctaccacccttaaagttggagctaccacttttagcatagattgctcagcttgacactgaagcatattatgcaaacaagctttgttttaatataaagcaatccccaaaagatttgagctttca

SEQ ID NO: 15537 - DNA, 2481 bp, Homo sapiens
  source 1..2481: mol_type = unassigned DNA
aactgcttctggagaggggatgccgagccgaaccagagctgggttactacaagtgtgaaccggcagcctgtctgttgccacagaagaacttggtcaccacactgagaagccgtgttttctcacctccctgttactgttgtagctgtatctggcttctctagcattttaaaggaatttctgattgaggcgctaacagctaattccacaggagttgtaaggcagcctgtgcataaactgagacagaagtttctcctcagagactctctttttattattattattattattattggcaaagacttctggctctcctcagaggaataccttgttgcttaagatgagtggctgtagaaagcggtgtaaacgtgaaatactgaaatttgcccagtaccttctcagactattaacaggttctcttcatacagacagcgtggaagatgaactggagatggccaccgtcaggcatcggcctgaagcccttgagcttctggaagcccagagcaaatttaccaagaaagagcttcagatcctttacagaggatttaagaatgaatgccccagtggtgttgttaatgaagaaaccttcaaagagatttactcgcagttctttccacagggagactctacaacatatgcacattttctgttcaatgcatttgatacagaccacaatggagctgtgagtttcgaggatttcatcaaaggtctttccattttgctccgggggacagtacaagaaaaactcaattgggcatttaatctgtatgacataaataaagatggctacatcactaaagaggaaatgcttgatataatgaaagcaatatacgatatgatgggtaaatgtacatatcctgtcctcaaagaagatgctcccagacaacacgttgaaacattttttcagaaaatggacaaaaataaagatggggttgttaccatagatgagttcattgaaagctgccaaaaagatgaaaacataatgcgctccatgcagctctttgaaaatgtgatttaacttgtcaaatagatcctgaatccaacagacaaatgtgaactattctaccacccttaaagttggagctaccacttttagcatagattgctcagcttgacactgaagcatattatgcaaacaagctttgttttaatataaagcaatccccaaaagatttgagctttcagttataaatttgcatccttttcataatgccactgagttcaggggatggtctaactcatttcatactctgtgaatattcaaaagtaatagaatctggcatatagttttattggttccttagccatgggattattgaggctttcacatatcagtgattttaaaatatcagtgttttttgctactcatttgtatgtattcagtcctaggattttgaatggttttctaatatagtgacatctgcatttaatttccagaaattaaattaattttcatgtttgaatgctgtaattccatttaaattccatttatatactttaaggaaacaagattacaacaattaaaaaaacacatagttccagtttctatggccttcccaccttctgttagaaattagttttatctggcatttttaaacatttaaaaattattaaacatttaaaaattagtttattatcagatatcagcatatgcctaataaaacttattttaataagcatttaattttccataatatgttacagccaaggcctatataataattttggatttgttcaatctttcttacaggctgttttctattgtatcaatcattagtatcaatcattaagtggaagttgaagaaggcatcaaacaaaacaaggatgtttacagacatatgcaaagggtcaggatatctatcctccagtatatagtaatgcttaataacaagtaatcctaacagcattaaaggccaaatctgtcctctttcccctgacttccttacagcatgtttatttatattacaagccattcagggacaaagaaagaaaccttgactaccccactgtctactaagaacaaacagcaagcaaaattagcaagcaaaattcactttgaaagcaccagtggttccattacattgacaactactaccaagatttagtagaaaataagtgctcaacaactaatccagattacagtatgatttagctcatcataattcagattatttttaatcatcttagccaaaactgtaaagttgccacattactaaagccacacacatcgtccctgttttgtagaaatatcacaaagaccaagaggctacagaaggaggaaatttgcaactgtctttgcaacaataaatcaggtatctattctggtgtagagataggatgttgaaagctgccctgctatcaccagtgtagaaattaagagtagtacaatacatgtacactgaaatttgccatcacgtgtttgtgtaaactcaatgtgcacattttgtatttcaaaaagaaaaaataaaagcaaaataaaatgtt

SEQ ID NO: 15538 - DNA, 1645 bp, Homo sapiens
  source 1..1645: mol_type = unassigned DNA
aatgtagtttaatggctttacaaagaaagccaggcagaggagcacttctcagtggctgtggtcggaccatgacctagctgaccatgaacttggaagggcttgaaatgatagcagttctgatcgtcattgtgctttttgttaaattattggaacagtttgggctgattgaagcaggtttagaagacagcgtggaagatgaactggagatggccaccgtcaggcatcggcctgaagcccttgagcttctggaagcccagagcaaatttaccaagaaagagcttcagatcctttacagaggatttaagaatgaatgccccagtggtgttgttaatgaagaaaccttcaaagagatttactcgcagttctttccacagggagactctacaacatatgcacattttctgttcaatgcatttgatacagaccacaatggagctgtgagtttcgaggatttcatcaaaggtctttccattttgctccgggggacagtacaagaaaaactcaattgggcatttaatctgtatgacataaataaagatggctacatcactaaagaggaaatgcttgatataatgaaagcaatatacgatatgatgggtaaatgtacatatcctgtcctcaaagaagatgctcccagacaacacgttgaaacattttttcagaaaatggacaaaaataaagatggggttgttaccatagatgagttcattgaaagctgccaaaaagatgaaaacataatgcgctccatgcagctctttgaaaatgtgatttaacttgtcaaatagatcctgaatccaacagacaaatgtgaactattctaccacccttaaagttggagctaccacttttagcatagattgctcagcttgacactgaagcatattatgcaaacaagctttgttttaatataaagcaatccccaaaagatttgagctttcagttataaatttgcatccttttcataatgccactgagttcaggggatggtctaactcatttcatactctgtgaatattcaaaagtaatagaatctggcatatagttttattggttccttagccatgggattattgaggctttcacatatcagtgattttaaaatatcagtgttttttgctactcatttgtatgtattcagtcctaggattttgaatggttttctaatatagtgacatctgcatttaatttccagaaattaaattaattttcatgtttgaatgctgtaattccatttaaattccatttatatactttaaggaaacaagattacaacaattaaaaaaacacatagttccagtttctatggccttcccaccttctgttagaaattagttttatctggcatttttaaacatttaaaaattattaaacatttaaaaattagtttattatcagatatcagcatatgcctaataaaacttattttaataagcatttaattttccataatatgttacagccaaggcctatataataattttggatttgttcaatctttcttacaggctgttttctattgtatcaatcattagtatcaatcattaagtggaagttgaagaaggcatcaaacaaaacaaggatgtttacagacatatgcaaagggtcaggatatctatcctccagtatatagtaatgcttaataaca

SEQ ID NO: 15539 - DNA, 1767 bp, Homo sapiens
  source 1..1767: mol_type = unassigned DNA
ctgcagcccgctccgcgcgccctgcccgcagccgccgccgaagctctcgctcccagcgccacggacgcccccgggccgagcggcggtgcgctcccgtgcagacccgtggacagacgcccctggccggtggactctcgagtctcgcttctgcaccctgcgtccctagacatgaatgtgaggagggtggaaagcatttcggctcagctggaggaggccagctctacaggcggtttcctgtacgctcagaacagcaccaagcgcagcattaaagagcggctcatgaagctcttgccctgctcagctgccaaaacgtcgtctcctgctattcaaaacagcgtggaagatgaactggagatggccaccgtcaggcatcggcctgaagcccttgagcttctggaagcccagagcaaatttaccaagaaagagcttcagatcctttacagaggatttaagaatgaatgccccagtggtgttgttaatgaagaaaccttcaaagagatttactcgcagttctttccacagggagactctacaacatatgcacattttctgttcaatgcatttgatacagaccacaatggagctgtgagtttcgaggatttcatcaaaggtctttccattttgctccgggggacagtacaagaaaaactcaattgggcatttaatctgtatgacataaataaagatggctacatcactaaagaggaaatgcttgatataatgaaagcaatatacgatatgatgggtaaatgtacatatcctgtcctcaaagaagatgctcccagacaacacgttgaaacattttttcagaaaatggacaaaaataaagatggggttgttaccatagatgagttcattgaaagctgccaaaaagatgaaaacataatgcgctccatgcagctctttgaaaatgtgatttaacttgtcaaatagatcctgaatccaacagacaaatgtgaactattctaccacccttaaagttggagctaccacttttagcatagattgctcagcttgacactgaagcatattatgcaaacaagctttgttttaatataaagcaatccccaaaagatttgagctttcagttataaatttgcatccttttcataatgccactgagttcaggggatggtctaactcatttcatactctgtgaatattcaaaagtaatagaatctggcatatagttttattggttccttagccatgggattattgaggctttcacatatcagtgattttaaaatatcagtgttttttgctactcatttgtatgtattcagtcctaggattttgaatggttttctaatatagtgacatctgcatttaatttccagaaattaaattaattttcatgtttgaatgctgtaattccatttaaattccatttatatactttaaggaaacaagattacaacaattaaaaaaacacatagttccagtttctatggccttcccaccttctgttagaaattagttttatctggcatttttaaacatttaaaaattattaaacatttaaaaattagtttattatcagatatcagcatatgcctaataaaacttattttaataagcatttaattttccataatatgttacagccaaggcctatataataattttggatttgttcaatctttcttacaggctgttttctattgtatcaatcattagtatcaatcattaagtggaagttgaagaaggcatcaaacaaaacaaggatgtttacagacatatgcaaagggtcaggatatctatcct

SEQ ID NO: 15540 - DNA, 1538 bp, Homo sapiens
  source 1..1538: mol_type = unassigned DNA
gtttcctgtacgctcagaacagcaccaagcgcagcattaaagagcggctcatgaagctcttgccctgctcagctgccaaaacgtcgtctcctgctattcaaagcaacgtggaagatgaactggagatggccaccgtcaggcatcggcctgaagcccttgagcttctggaagcccagagcaaatttaccaagaaagagcttcagatcctttacagaggatttaagaatgaatgccccagtggtgttgttaatgaagaaaccttcaaagagatttactcgcagttctttccacagggagactctacaacatatgcacattttctgttcaatgcatttgatacagaccacaatggagctgtgagtttcgaggatttcatcaaaggtctttccattttgctccgggggacagtacaagaaaaactcaattgggcatttaatctgtatgacataaataaagatggctacatcactaaagaggaaatgcttgatataatgaaagcaatatacgatatgatgggtaaatgtacatatcctgtcctcaaagaagatgctcccagacaacacgttgaaacattttttcagaaaatggacaaaaataaagatggggttgttaccatagatgagttcattgaaagctgccaaaaagatgaaaacataatgcgctccatgcagctctttgaaaatgtgatttaacttgtcaaatagatcctgaatccaacagacaaatgtgaactattctaccacccttaaagttggagctaccacttttagcatagattgctcagcttgacactgaagcatattatgcaaacaagctttgttttaatataaagcaatccccaaaagatttgagctttcagttataaatttgcatccttttcataatgccactgagttcaggggatggtctaactcatttcatactctgtgaatattcaaaagtaatagaatctggcatatagttttattggttccttagccatgggattattgaggctttcacatatcagtgattttaaaatatcagtgttttttgctactcatttgtatgtattcagtcctaggattttgaatggttttctaatatagtgacatctgcatttaatttccagaaattaaattaattttcatgtttgaatgctgtaattccatttaaattccatttatatactttaaggaaacaagattacaacaattaaaaaaacacatagttccagtttctatggccttcccaccttctgttagaaattagttttatctggcatttttaaacatttaaaaattattaaacatttaaaaattagtttattatcagatatcagcatatgcctaataaaacttattttaataagcatttaattttccataatatgttacagccaaggcctatataataattttggatttgttcaatctttcttacaggctgttttctattgtatcaatcattagtatcaatcattaagtggaagttgaagaaggcatcaaacaaaacaaggatgtttacagacatatgcaaagggtcaggatatctatcct

SEQ ID NO: 15541 - DNA, 1641 bp, Homo sapiens
  source 1..1641: mol_type = unassigned DNA
agcgccacggacgcccccgggccgagcggcggtgcgctcccgtgcagacccgtggacagacgcccctggccggtggactctcgagtctcgcttctgcaccctgcgtccctagacatgaatgtgaggagggtggaaagcatttcggctcagctggaggaggccagctctacaggcgacagcgtggaagatgaactggagatggccaccgtcaggcatcggcctgaagcccttgagcttctggaagcccagagcaaatttaccaagaaagagcttcagatcctttacagaggatttaagaatgaatgccccagtggtgttgttaatgaagaaaccttcaaagagatttactcgcagttctttccacagggagactctacaacatatgcacattttctgttcaatgcatttgatacagaccacaatggagctgtgagtttcgaggatttcatcaaaggtctttccattttgctccgggggacagtacaagaaaaactcaattgggcatttaatctgtatgacataaataaagatggctacatcactaaagaggaaatgcttgatataatgaaagcaatatacgatatgatgggtaaatgtacatatcctgtcctcaaagaagatgctcccagacaacacgttgaaacattttttcagaaaatggacaaaaataaagatggggttgttaccatagatgagttcattgaaagctgccaaaaagatgaaaacataatgcgctccatgcagctctttgaaaatgtgatttaacttgtcaaatagatcctgaatccaacagacaaatgtgaactattctaccacccttaaagttggagctaccacttttagcatagattgctcagcttgacactgaagcatattatgcaaacaagctttgttttaatataaagcaatccccaaaagatttgagctttcagttataaatttgcatccttttcataatgccactgagttcaggggatggtctaactcatttcatactctgtgaatattcaaaagtaatagaatctggcatatagttttattggttccttagccatgggattattgaggctttcacatatcagtgattttaaaatatcagtgttttttgctactcatttgtatgtattcagtcctaggattttgaatggttttctaatatagtgacatctgcatttaatttccagaaattaaattaattttcatgtttgaatgctgtaattccatttaaattccatttatatactttaaggaaacaagattacaacaattaaaaaaacacatagttccagtttctatggccttcccaccttctgttagaaattagttttatctggcatttttaaacatttaaaaattattaaacatttaaaaattagtttattatcagatatcagcatatgcctaataaaacttattttaataagcatttaattttccataatatgttacagccaaggcctatataataattttggatttgttcaatctttcttacaggctgttttctattgtatcaatcattagtatcaatcattaagtggaagttgaagaaggcatcaaacaaaacaaggatgtttacagacatatgcaaagggtcaggatatctatcctccagtatatagtaatgcttaataacaagta

SEQ ID NO: 15542 - DNA, 1301 bp, Homo sapiens
  source 1..1301: mol_type = unassigned DNA
aagatggaggctctgtgtgagaaggaatgcagggcagcctctggttgcagagagcagcacccggtttgacagctagcaatgcaattgtgacctcagacctacaatgtcaaggaattggcttctgccaacaaccagaatgagcatgaaagtggattagtccttggaacttccagataagagcccagccagctatacttggatttcagcctgtgagattctcagcagagaacccagtcaagtgtgtccagacgtccaacctacagaactacagcgtggaagatgaactggagatggccaccgtcaggcatcggcctgaagcccttgagcttctggaagcccagagcaaatttaccaagaaagagcttcagatcctttacagaggatttaagaatgaatgccccagtggtgttgttaatgaagaaaccttcaaagagatttactcgcagttctttccacagggagactctacaacatatgcacattttctgttcaatgcatttgatacagaccacaatggagctgtgagtttcgaggatttcatcaaaggtctttccattttgctccgggggacagtacaagaaaaactcaattgggcatttaatctgtatgacataaataaagatggctacatcactaaagaggaaatgcttgatataatgaaagcaatatacgatatgatgggtaaatgtacatatcctgtcctcaaagaagatgctcccagacaacacgttgaaacattttttcagaaaatggacaaaaataaagatggggttgttaccatagatgagttcattgaaagctgccaaaaagatgaaaacataatgcgctccatgcagctctttgaaaatgtgatttaacttgtcaaatagatcctgaatccaacagacaaatgtgaactattctaccacccttaaagttggagctaccacttttagcatagattgctcagcttgacactgaagcatattatgcaaacaagctttgttttaatataaagcaatccccaaaagatttgagctttcagttataaatttgcatccttttcataatgccactgagttcaggggatggtctaactcatttcatactctgtgaatattcaaaagtaatagaatctggcatatagttttattggttccttagccatgggattattgaggctttcacatatcagtgattttaaaatatcagtgttttttgctactcatttgtatgtattcagtcctaggattttgaatggttttctaatatagtgacatctgcatttaatttccagaaattaaattaattttcatgtttga

SEQ ID NO: 15543 - DNA, 609 bp, Homo sapiens
  source 1..609: mol_type = unassigned DNA
aggaatgaatgcgggctttgaagactgcttggtatttgatgagttaatggataaattcagtaacgaccttagtttgtgtcttcctgtgttctcaagattgagaatcccagatgatcacgcgatttcagacctatccatgtacaattacatagagatgcgagcacatgtcaactcaagctggttcatttttcagaagaacatggagagatttcttcatgcgattatgccatcgacctttatccctctctatacaatggtcactttttccagaataagataccatgaggctgtgcagcgttggcattggcaaaaaaaggtgataaacaaaggactctttttcttgggatcactgatagccatcagcagtacctacctacttatacactacatgtcaccacgatctttcctccgcttgagaagaccatggaactggatagctcacttccggaatacaacatgtttccccgcaaaggccgtggactccctagaacaaatttccaatctcattagcaggctgctgagtcactcagaaatccttcaaacatgattaattatgaagatgaaacactagagtcatataagaaataaaaattgggcaataaaataaaa

SEQ ID NO: 15544 - DNA, 4888 bp, Homo sapiens
  source 1..4888: mol_type = unassigned DNA
gacagaagcaacaataattgtgaaaaatacttcagcagttatggactcatctgtcattcaaaggaaaaaagtagctgtcattggtggtggcttggttggctcattacaagcatgctttcttgcaaagaggaatttccagattgatgtatatgaagctagggaagatactcgagtggctaccttcacacgtggaagaagcattaacttagccctttctcatagaggacgacaagccttgaaagctgttggcctggaagatcagattgtatcccaaggtattcccatgagagcaagaatgatccactctctttcaggaaaaaagtctgcaattccctatgggacaaagtctcagtatattctttctgtaagcagagaaaatctaaacaaggatctattgactgctgctgagaaataccccaatgtgaaaatgcactttaaccacaggctgttgaaatgtaatccagaggaaggaatgatcacagtgcttggatctgacaaagttcccaaagatgtcacttgtgacctcattgtaggatgtgatggagcctattcaactgtcagatctcacctgatgaagaaacctcgctttgattacagtcagcagtacattcctcatgggtacatggagttgactattccacctaagaacggagattatgccatggaacctaattatctgcatatttggcctagaaatacctttatgatgattgcacttcctaacatgaacaaatcattcacatgtactttgttcatgccctttgaagagtttgaaaaacttctaaccagtaatgatgtggtagatttcttccagaaatactttccggatgccatccctctaattggagagaaactcctagtgcaagatttcttcctgttgcctgcccagcccatgatatctgtaaagtgctcttcatttcactttaaatctcactgtgtactgctgggagatgcagctcatgctatagtgccgttttttgggcaaggaatgaatgcgggctttgaagactgcttggtatttgatgagttaatggataaattcagtaacgaccttagtttgtgtcttcctgtgttctcaagattgagaatcccagatgatcacgcgatttcagacctatccatgtacaattacatagaggtcactttttccagaataagataccatgaggctgtgcagcgttggcattggcaaaaaaaggtgataaacaaaggactctttttcttgggatcactgatagccatcagcagtacctacctacttatacactacatgtcaccacgatctttcctccgcttgagaagaccatggaactggatagctcacttccggaatacaacatgtttccccgcaaaggccgtggactccctagaacaaatttccaatctcattagcaggtgatagaaaggttttgtggtagcaaatgcatgatttctctgtgaccaaaattaagcatgaaaaaaatgtttccattgccatatttgattcactagtggaagatagtgttctgcttataattaaactgaatgtagagtatctctgtatgttaattgcaattactggttggggggtgcattttaaaagatgaaacatgcagcttccctacattacacacactcaggttgagtcattctaactataaaagtgcaatgactaagatccttcacttctctgaaagtaaggccctagatgcctcagggaagacagtaatcatgccttttctttaaaagacacaataggactcgcaacagcattgactcaacacctaggactaaaaatcacaacttaactagcatgttaactgcacttttcattacgtgaatggaacttacctaaccacagggctcagacttactagataaaaccagaaatggaaataaggaattcaggggagttccagagacttacaaaatgaactcattttattttcccaccttcaaatataagtattatcatctatctgtttatcgtctatctatctatcatctatctatctatctatcatctatctatctatctatctatctatctatctatctatctatctctatttatttatgtatttagagatcaggtctcactctgttgaccaggctggagtgcagtggtgagatctgggttcactgcaacctctgcctcctgggctcaagcaatcctcccacttcagcctcccaaatagctggggctaccatggtatttttcagtagagaccgggtcttgccatgctgcccaggccagtctcaaactcctggcctcatgtgatctgcccacctcagcctcccaaagtacagggattagagttgtgagccaccgctgccagcccagagttaccctctaaagataagaaaaaggctattaatatcatactaagtgaaggacaggaaagggttttattcataaattaaatgtctacatgtgccagaatggaaaggaaacaaggggagacaacttttatagaaatacaaagccattactttattcaatttcagaccctcagaagcaatttactaatttattcttcgactacatactgcagcagaaccagcaatacacttgatttttaaaagcacatttagtgaaatgttttctttggttcatccttctttaacaggctgctgagtcactcagaaatccttcaaacatgattaattatgaagatgaaacactagagtcatataagaaataaaaattgggcaataaaataaaatgattcagtgtttcttttctatattgtcaatgaaaaccttgagttctaataatccatgttcagtttgtagggaaagaaaaaataatttttccttctacccactttaggttccttggctggggcccctataacaaaagacagattgacaagagaaaaacaaacataaatttattagcgggtatatgtaatatatatgtgggaaatacaggggaatgagcaaatctcaaagagctggcgtcttagaactccctggcttatatagcatcgacaaagaacagtaaatttttagagaaacaacaaaacaaagaaaaagagctttgagtctgtaggggcagcaatttgggggaagcaaatatatgggagtttgccttgtagattcctctggtgctggtctccaggctgacaaggattcaaagttgtctctgaaactcctctttgtcatactgcacatataaaacgtcttttgtttccaacaagaggattttctttttcattctagaattatctccttgataacttgatcagatataggacatgacactgaatagagtccaacagtacaaaaaaaattcagtatgttctagctacttcacacatgtgtacgcgacagttatttttacagtaaggtattttcgagaaaaatgcattacgtgttttggaaaatagagtaatttaaaaaatatatttgaaatgaaaatctccaacacattagaagatgatgatgttagatgcccatcgtgtgccacaagtggttttttcattatgtaaagcacccgttgaattaaaagaatttgtttttgttcaacctcttcctgaggcccaagagcatatgggcaattcggatttcctgctggaccacaaggttctgttgatattacatagaacgggtattccagacacttcttatgatgaaagtccaaaagtggcatccaatttaaggccccatctttcgttgccattcttcattcctacaaaggacgaacttggattacatcaactttggacccattggttttgtcgctgtcgtcaactgacagtgattcatcactggtgatgataaaaatgatggaagaagagttgaaagtcacttttttctttggcctgtccccatctttctgtgacatcacaatgggtctgatctgcatttcacttccagctgctggtaggtctttagcaggcctctggcacctcagcagtcggaggcacagaagctgcaaaagggatcttcgaaactgggcagagaaaaaataaagtggaatattaagtaaaagttgggcactaatctggattaacattcgaggaaatcagttgagctgaatttaagttgttttttgtttgttagcaggtgtggatgtggggttatgtggtcatgctcagatctacctaaatcaccccagagctttatgtcttttattcattctaattcttattaaccggaatatgtaggaccatttcaataccttgtaatcctccaagcttcaatctgcacacactttctatgagggcaggtacaactattaagagattttgaacattaagttagtccacaaatattcagtgggcatctactaggtgacagccactgtgctataattagagactttttactataagcatcaaaaacagataaggctcttcctggcagagtttacagcctggtgtacttgctaatgtctctttaattaggtgaagaattttttttttctatcgaaattactaatcagttggggaaaaaaatactatagcagacagcactaatgtcatcaacaaacattgttcttctccgtgtcctgggtacaacatcgaataatatttcttggcctcctttccgcttctcctctctgctgttcctctctacaagaacctgggaggccaacgcctaaagatcataatatcacacaatggaaggaacctagattcctaaatgactgcataggacagatcccatctcctccacccaatacattattagactgaactgtgacctgaaatgagcaataaactctgtattaattcactgaaatgttggggttgcttgttatagtagtcggtccatcatgaccagtaaaacataaatcaaaagttaatgtaattgttatcccattatttagagcgaaataaatgttgaatatatggactttctcagattaggaaataccaattaaaaatataataaatagcta

SEQ ID NO: 15545 - DNA, 1868 bp, Homo sapiens
  source 1..1868: mol_type = unassigned DNA
gcttaaaaatttctgtgtcttacacagaagatagaaaaaatagagtgtctccaattggatggattttttaaaaaatttggttattgtaatggatttattttttcttagagctgagctgattgtactttggccaactaatgggttaatactgtcaagggaaattagccctgactaaacattgccgctggctcatgaatgcactaggcttggggcagtataaaaactcagagaaatcagtgtgtaggagacacagaaatcagtgtcactcagtgacagaagcaacaataattgtgaaaaatacttcagcagttatggactcatctgtcattcaaaggaaaaaagtagctgtcattggtggtggcttggttggctcattacaagcatgctttcttgcaaagaggaatttccagattgatgtatatgaagctagggaagatactcgagtggctaccttcacacgtggaagaagcattaacttagccctttctcatagaggacgacaagccttgaaagctgttggcctggaagatcagattgtatcccaaggtattcccatgagagcaagaatgatccactctctttcaggaaaaaagtctgcaattccctatgggacaaagtctcagtatattctttctgtaagcagagaaaatctaaacaaggatctattgactgctgctgagaaataccccaatgtgaaaatgcactttaaccacaggctgttgaaatgtaatccagaggaaggaatgatcacagtgcttggatctgacaaagttcccaaagatgtcacttgtgacctcattgtaggatgtgatggagcctattcaactgtcagatctcacctgatgaagaaacctcgctttgattacagtcagcagtacattcctcatgggtacatggagttgactattccacctaagaacggagattatgccatggaacctaattatctgcatatttggcctagaaatacctttatgatgattgcacttcctaacatgaacaaatcattcacatgtactttgttcatgccctttgaagagtttgaaaaacttctaaccagtaatgatgtggtagatttcttccagaaatactttccggatgccatccctctaattggagagaaactcctagtgcaagatttcttcctgttgcctgcccagcccatgatatctgtaaagtgctcttcatttcactttaaatctcactgtgtactgctgggagatgcagctcatgctatagtgccgttttttgggcaaggaatgaatgcgggctttgaagactgcttggtatttgatgagttaatggataaattcagtaacgaccttagtttgtgtcttcctgtgttctcaagattgagaatcccagatgatcacgcgatttcagacctatccatgtacaattacatagagaagaacatggagagatttcttcatgcgattatgccatcgacctttatccctctctatacaatggtcactttttccagaataagataccatgaggctgtgcagcgttggcattggcaaaaaaaggtgataaacaaaggactctttttcttgggatcactgatagccatcagcagtacctacctacttatacactacatgtcaccacgatctttcctccgcttgagaagaccatggaactggatagctcacttccggaatacaacatgtttccccgcaaaggccgtggactccctagaacaaatttccaatctcattagcaggtgatagaaaggttttgtggtagcaaatgcatgatttctctgtgaccaaaattaagcatgaaaaaaatgtttccattgccatatttgattcactagtggaagatagtgttctgcttataattaaactgaatgtagagta

SEQ ID NO: 15546 - DNA, 5261 bp, Homo sapiens
  source 1..5261: mol_type = unassigned DNA
gcttaaaaatttctgtgtcttacacagaagatagaaaaaatagagtgtctccaattggatggattttttaaaaaatttggttattgtaatggatttattttttcttagagctgagctgattgtactttggccaactaatgggttaatactgtcaagggaaattagccctgactaaacattgccgctggctcatgaatgcactaggcttggggcagtataaaaactcagagaaatcagtgtgtaggagacacagaaatcagtgtcactcagtgacagaagcaacaataattgtgaaaaatacttcagcagttatggactcatctgtcattcaaaggaaaaaagtagctgtcattggtggtggcttggttggctcattacaagcatgctttcttgcaaagaggaatttccagattgatgtatatgaagctagggaagatactcgagtggctaccttcacacgtggaagaagcattaacttagccctttctcatagaggacgacaagccttgaaagctgttggcctggaagatcagattgtatcccaaggtattcccatgagagcaagaatgatccactctctttcaggaaaaaagtctgcaattccctatgggacaaagtctcagtatattctttctgtaagcagagaaaatctaaacaaggatctattgactgctgctgagaaataccccaatgtgaaaatgcactttaaccacaggctgttgaaatgtaatccagaggaaggaatgatcacagtgcttggatctgacaaagttcccaaagatgtcacttgtgacctcattgtaggatgtgatggagcctattcaactgtcagatctcacctgatgaagaaacctcgctttgattacagtcagcagtacattcctcatgggtacatggagttgactattccacctaagaacggagattatgccatggaacctaattatctgcatatttggcctagaaatacctttatgatgattgcacttcctaacatgaacaaatcattcacatgtactttgttcatgccctttgaagagtttgaaaaacttctaaccagtaatgatgtggtagatttcttccagaaatactttccggatgccatccctctaattggagagaaactcctagtgcaagatttcttcctgttgcctgcccagcccatgatatctgtaaagtgctcttcatttcactttaaatctcactgtgtactgctgggagatgcagctcatgctatagtgccgttttttgggcaaggaatgaatgcgggctttgaagactgcttggtatttgatgagttaatggataaattcagtaacgaccttagtttgtgtcttcctgtgttctcaagattgagaatcccagatgatcacgcgatttcagacctatccatgtacaattacatagagatgcgagcacatgtcaactcaagctggttcatttttcagaagaacatggagagatttcttcatgcgattatgccatcgacctttatccctctctatacaatggtcactttttccagaataagataccatgaggctgtgcagcgttggcattggcaaaaaaaggtgataaacaaaggactctttttcttgggatcactgatagccatcagcagtacctacctacttatacactacatgtcaccacgatctttcctccgcttgagaagaccatggaactggatagctcacttccggaatacaacatgtttccccgcaaaggccgtggactccctagaacaaatttccaatctcattagcaggtgatagaaaggttttgtggtagcaaatgcatgatttctctgtgaccaaaattaagcatgaaaaaaatgtttccattgccatatttgattcactagtggaagatagtgttctgcttataattaaactgaatgtagagtatctctgtatgttaattgcaattactggttggggggtgcattttaaaagatgaaacatgcagcttccctacattacacacactcaggttgagtcattctaactataaaagtgcaatgactaagatccttcacttctctgaaagtaaggccctagatgcctcagggaagacagtaatcatgccttttctttaaaagacacaataggactcgcaacagcattgactcaacacctaggactaaaaatcacaacttaactagcatgttaactgcacttttcattacgtgaatggaacttacctaaccacagggctcagacttactagataaaaccagaaatggaaataaggaattcaggggagttccagagacttacaaaatgaactcattttattttcccaccttcaaatataagtattatcatctatctgtttatcgtctatctatctatcatctatctatctatctatcatctatctatctatctatctatctatctatctatctatctatctctatttatttatgtatttagagatcaggtctcactctgttgaccaggctggagtgcagtggtgagatctgggttcactgcaacctctgcctcctgggctcaagcaatcctcccacttcagcctcccaaatagctggggctaccatggtatttttcagtagagaccgggtcttgccatgctgcccaggccagtctcaaactcctggcctcatgtgatctgcccacctcagcctcccaaagtacagggattagagttgtgagccaccgctgccagcccagagttaccctctaaagataagaaaaaggctattaatatcatactaagtgaaggacaggaaagggttttattcataaattaaatgtctacatgtgccagaatggaaaggaaacaaggggagacaacttttatagaaatacaaagccattactttattcaatttcagaccctcagaagcaatttactaatttattcttcgactacatactgcagcagaaccagcaatacacttgatttttaaaagcacatttagtgaaatgttttctttggttcatccttctttaacaggctgctgagtcactcagaaatccttcaaacatgattaattatgaagatgaaacactagagtcatataagaaataaaaattgggcaataaaataaaatgattcagtgtttcttttctatattgtcaatgaaaaccttgagttctaataatccatgttcagtttgtagggaaagaaaaaataatttttccttctacccactttaggttccttggctggggcccctataacaaaagacagattgacaagagaaaaacaaacataaatttattagcgggtatatgtaatatatatgtgggaaatacaggggaatgagcaaatctcaaagagctggcgtcttagaactccctggcttatatagcatcgacaaagaacagtaaatttttagagaaacaacaaaacaaagaaaaagagctttgagtctgtaggggcagcaatttgggggaagcaaatatatgggagtttgccttgtagattcctctggtgctggtctccaggctgacaaggattcaaagttgtctctgaaactcctctttgtcatactgcacatataaaacgtcttttgtttccaacaagaggattttctttttcattctagaattatctccttgataacttgatcagatataggacatgacactgaatagagtccaacagtacaaaaaaaattcagtatgttctagctacttcacacatgtgtacgcgacagttatttttacagtaaggtattttcgagaaaaatgcattacgtgttttggaaaatagagtaatttaaaaaatatatttgaaatgaaaatctccaacacattagaagatgatgatgttagatgcccatcgtgtgccacaagtggttttttcattatgtaaagcacccgttgaattaaaagaatttgtttttgttcaacctcttcctgaggcccaagagcatatgggcaattcggatttcctgctggaccacaaggttctgttgatattacatagaacgggtattccagacacttcttatgatgaaagtccaaaagtggcatccaatttaaggccccatctttcgttgccattcttcattcctacaaaggacgaacttggattacatcaactttggacccattggttttgtcgctgtcgtcaactgacagtgattcatcactggtgatgataaaaatgatggaagaagagttgaaagtcacttttttctttggcctgtccccatctttctgtgacatcacaatgggtctgatctgcatttcacttccagctgctggtaggtctttagcaggcctctggcacctcagcagtcggaggcacagaagctgcaaaagggatcttcgaaactgggcagagaaaaaataaagtggaatattaagtaaaagttgggcactaatctggattaacattcgaggaaatcagttgagctgaatttaagttgttttttgtttgttagcaggtgtggatgtggggttatgtggtcatgctcagatctacctaaatcaccccagagctttatgtcttttattcattctaattcttattaaccggaatatgtaggaccatttcaataccttgtaatcctccaagcttcaatctgcacacactttctatgagggcaggtacaactattaagagattttgaacattaagttagtccacaaatattcagtgggcatctactaggtgacagccactgtgctataattagagactttttactataagcatcaaaaacagataaggctcttcctggcagagtttacagcctggtgtacttgctaatgtctctttaattaggtgaagaattttttttttctatcgaaattactaatcagttggggaaaaaaatactatagcagacagcactaatgtcatcaacaaacattgttcttctccgtgtcctgggtacaacatcgaataatatttcttggcctcctttccgcttctcctctctgctgttcctctctacaagaacctgggaggccaacgcctaaagatcataatatcacacaatggaaggaacctagattcctaaatgactgcataggacagatcccatctcctccacccaatacattattagactgaactgtgacctgaaatgagcaataaactctgtattaattcactgaaatgttggggttgcttgttatagtagtcggtccatcatgaccagtaaaacataaatcaaaagttaatgtaattgttatcccattatttagagcgaaataaatgttgaatatatggactttctcagattaggaaataccaattaaaaatataataaatagcta

SEQ ID NO: 15547 - DNA, 1751 bp, Homo sapiens
  source 1..1751: mol_type = unassigned DNA
atttgcagcgcaagcagcctagcgtgcggccgcggcgcccaggtcggaaaggaggcggcatcatggagctgaagaaggacatcaacgctgtatctatcgacatgctgctgatcgtgcactcggagaagcggcgcgccgcacagggtacgctctcagaccagcaggcgaacccgagctcgctgctgcagcgcggaggaggattccaaggtgttggaaatggagtccgaagatggcagaaattagaaggaaatgactttcacgaaaacttggtggagaagcagcaccctcagcagccccaggtcatcacttcctacaacagccaagggacacaactgactgtggaagtccaccctcgagatgccatgccccagctgctcaagaagttctccttggctaaacgtttacaaggtgataaaaatggaaacacaagaccccggcaacctggagggaaagatgcccatgcctacccctgggatcgatctagcctgaaatccatgtccctggacctgcagcagtttgagaaattggatatctacgcctcacaggtgacagccaagagtggcctagacgaactggtgagtgacctgctccaggaggcccacactgacctggaaagggtccgcgccatctggatctggatctgccatcacatagagtatgacattgcagctgctcaggagaaggaccgccaagccttcaaacccactgacatcctgcggacccagaagaccaactgtgatggctatgctggcctcttcgagagaatgtgcaggctcgccggagtgcagtgtatgaccgtgcctggctactccaagggtttcggctaccagacagggcagagcttctcgggggagtttgaccatgcctggaatgctgtgtacctggagggaagatggcacctggtggacagcacctggggcagcggcctggtggacaccatcacctccaaattcaccttcctctacaatgagttctacttcctcacccaccctgcactgttcatcgaggaccacttcccagacaacaagaactggcagctgctaaaacctcctcaatctctgaggcagtttgagaacaacatgtatcacaagagtgaattctacaacaaagggatgctgagtgcccacccagagacttccatgatcagaacagtgaatgggaaggccacggtcaccattgagagctgcgccccgacgctgttcatgttcatgctcaatggcaagcaagagcatgggctgctgagcctaaggaagaatgggatgaagttggaggtgtaccctccaaccatgggcactcacaagctgcagatctttgccaagggcaactccgacatctacagctcagtgctggagtacacgctcaagtgcaattatgtggacatgggtgtccagctgcctgctgagcttcaccagcccgtgggccccagctggttctcggagcagatgggcatcatgaagccctcccaccctgaccctatcatccacaccagcgacgggcgctgctccatcagcttcagcgtggaggagggcattaatgtcctggcttccctccacggggatgatggccccatcactgaggagacacagcggcgctacatcttccagctgcaccgggagaagcagaccgagctgaaagtccagctgccccatgcaggcaagtttgccctcaaggaagtctatgtcatggtgctggagaatgccaaccacaatttctactcctacatcctgaaatacaaagtgaatgcccagtga

SEQ ID NO: 15548 - DNA, 2345 bp, Homo sapiens
  source 1..2345: mol_type = unassigned DNA
atttgcagcgcaagcagcctagcgtgcggccgcggcgcccaggtcggaaaggaggcggcatcatggagctgaagaaggacatcaacgctgtatctatcgacatgctgctgatcgtgcactcggagaagcggcgcgccgcacagggtacgctctcagaccagcaggcgaacccgagctcgctgctgcagcgcggaggaggattccaaggtgttggaaatggagtccgaagatggcagaaattagaaggaaatgactttcacgaaaacttggtggagaagcagcaccctcagcagccccaggtcatcacttcctacaacagccaagggacacaactgactgtggaagtccaccctcgagatgccatgccccagctgctcaagaagttctccttggctaaacgtttacaaggtgataaaaatggaaacacaagaccccggcaacctggagggaaagatgcccatgcctacccctgggatcgatctagcctgaaatccatgtccctggacctgcagcagtttgagaaattggatatctacgcctcacaggtgacagccaagagtggcctagacgaactggtgagtgacctgctccaggaggcccacactgacctggaaagggtccgcgccatctggatctggatctgccatcacatagagtatgacattgcagctgctcaggagaaggaccgccaagccttcaaacccactgacatcctgcggacccagaagaccaactgtgatggctatgctggcctcttcgagagaatgtgcaggctcgccggagtgcagtgtatgaccgtgcctggctactccaagggtttcggctaccagacagggcagagcttctcgggggagtttgaccatgcctggaatgctgtgtacctggagggaagatggcacctggtggacagcacctggggcagcggcctggtggacaccatcacctccaaattcaccttcctctacaatgagttctacttcctcacccaccctgcactgttcatcgaggaccacttcccagacaacaagaactggcagctgctaaaacctcctcaatctctgaggcagtttgagaacaacatgtatcacaagagtgaattctacaacaaagggatgctgagtgcccacccagagacttccatgatcagaacagtgaatgggaaggccacggtcaccattgagagctgcgccccgacgctgttcatgttcatgctcaatggcaagcaagagcatgggctgctgagcctaaggaagaatgggatgaagttggaggtgtaccctccaaccatgggcactcacaagctgcagatctttgccaagggcaactccgacatctacagctcagtgctggagtacacgctcaagtgcaattatgtggacatgggtgtccagctgcctgctgagcttcaccagcccgtgggccccagctggttctcggagcagatgggcatcatgaagccctcccaccctgaccctatcatccacaccagcgacgggcgctgctccatcagcttcagcgtggaggagggcattaatgtcctggcttccctccacggggatgatggccccatcactgaggagacacagcggcgctacatcttccagctgcaccgggagaagcagaccgagctgaaagtccagctgccccatgcaggcaagtttgccctcaagatctttgtcaagaagaggcaggaaccaggaaactacatcttcgtctttaattaccttgtatgctgtgccaacaccaaggtgaactggcccatgttccctgagagctttggcaactggggacaggacaatgagctgctggaacctctgtcaggtgtgcttcctgccaaccggaatgtcccattcaaattgaagctgcatggtattgccaaagtcctggtgaaggggcaggacacatggcccctgaccctgaaccacgagggctactgggagggaagctgcagcacagctggctgccaggaagtctatgtcatggtgctggagaatgccaaccacaatttctactcctacatcctgaaatacaaagtgaatgcccagtgagggctgtgccccggtcttaccctcccaaagggccaaggccagacctccccagggagggctcgaaggaagtgcagggagccctggacaccactgagtctgcatgaaatcccttctaggcctctgcctcagtgtcccacctctgccacaggagctgtgatctttgtgttctgaaggcttcactcaggtgtggctgtgactgagggggcagaggcagtggctctttagaaggaaaaggtgctatgtaaatctaaggtattgtaaactgtacacctgcatccagatgccccttctcgtatt

SEQ ID NO: 15549 - DNA, 3288 bp, Homo sapiens
  source 1..3288: mol_type = unassigned DNA
cagaagggagctcatgtgctggttctctcagctttgttctgatctctcatatcagatgggaggggtacagctgggcagggtccagggccagagatgggaagctggttataggtttttcccgacttccctccctcctttgctactgcagataccctgtcctcacatccccttggagcccctggcccactaccctagtctgagcactgagatgtcattgctcatatattcttgctttggcttgctctgcagttctttggtgtaaggtcaatgcctctattctgggagcttctttttctttccttttgcccaacattgagactcttccatttatttccaacaattcatcccttgtcctttcctctgttcagggcagctggcagcttatccagcagttaaagtatctcataatcccaaccaaaaggcctaagagatacagggagcctccattaaaaatatcatactggaccaggtgtggcggctcatgcctgtaatcccagcactttgggaggctgaggcgggtggatcacctgaggtcaggagttcaagactagcctgggcaacatggtgaaacccccatctctactaaaaatataaaaaattagctgggcgtggtggtgggtgtctgtaatcccagttactcaggatgctgaggcaggagaatcgcttgaacctggggggcggaagttgcagtgagccaagatcacgccattgcactccggtctcagcaacaagaacgaaactccgtctcaaaaaaaagaagtatgtatcagtcttactggctgggtgcggtggctcacacctgtaattccagtactttgggaggctgaggcgggaggatcacttgagcccaggagtttgagaccagcgtaggcaacatagtgagaccccatctgtacaaaaaatgtcattaaattattagctgggcatggtgcatgtgcctgtagtcctagataccacagtagctagctgagctgggaggattgtttgagcccaggaattcaaggctacagcaagctatgattgtaccactgtaccccagcctgggcgacagagtgagaccctgtgtctaaagaaaaaaaaccatattgaatgtctagagtttccctgggcccaggactccaccatgctcttcaggcagagacagttactcccctaccccagtccagccccagagttcatacttgcaagttcccaggtgacaggtggggtcctgcctgctgttgtgacaacgaatgccgacttttaattcaaactatttaaatactggccccgccgttgactagcattgtgttctgggccaagtgatttaacttcttaaatgggaatagggttgttgtaaaggtccaaggaggtgatgtcttttgaagcttacatggcaggtactcagtttatactggttccctgtctgcctctatgccatagatgtccgctgtttcttcccagccaccccactgttgccacaactgcctcaggacaagctgggaagggcttgtctgggtagggaagatttatacttggttcaccaggttctttgggcgaacgcatagcctccttccaggcacttaccttctgacacaagccaggcctctgagtgcaccttggaggccagaggttcctgagtgcctcagggctcaggttatgattctgccctggagggccctctttcccagcttatttctccttcctttctcactgcccacaccccaggctttcctagagaacctattcctttgtttgccaatgggctctgggctggtcttagccagcttggccctggccgtggcagctcctttttttcccctagagtcccccacccctgggcttccaggtgggcatgaagctggaggctgttgaccgcatgaacccgtcccttgtctgcgtggccagtgtgaccgatgtggtggacagccgcttcctggtgcactttgacaactgggatgatacttatgactactggtgtgatcccagcagcccctacatccacccagtgggctggtgccagaagcaaggaaagcccctcacccctccacaagactacccagaccctgataacttctgttgggagaaatatctggaagaaactggggcctctgctgtccccacctgggccttcaaggtgcgaccccctcacagcttcctggtcaatatgaagctggaggctgtggaccgcaggaacccagccctgattcgcgtggccagcgtggaggatgtggaggaccatcggataaagatccactttgatggctggagtcatggctatgatttctggatcgacgctgaccacccagacatccaccctgccggctggtgctccaagacaggacatcccctgcagcctcctctcggacccagagagcccagctctgcctcccctgggggctgtccccctctcagctataggagcctgccccacactaggacctccaaatacagctttcaccaccggaagtgccccactcctggttgcgacggctctggccatgtcacaggcaagttcacagctcaccattgcctctcaggctgcccactggctgagaggaaccagagccggctgaaagcggagctgtctgactcggaggcctcagcccgcaagaagaacctctcaggcttctccccaaggaagaagcctcgccatcacggccgaattggacgccctccgaagtatcgaaagattccgcaggaagatttccagaccctcacgcccgatgtcgtgcaccagtccctcttcatgtcagccctgtcggcccaccctgaccgctcactctcagtgtgctgggagcagcactgcaagctcctgccaggagtagcgggcatctcagcctcgacagtcgccaagtggaccatcgatgaggtcttcggctttgttcagaccctgacaggttgtgaggaccaagcacgcctcttcaaagacgaggtaaggtgcaagtgcagagtgggagacagagccggggtcactgtccttaagacggcaggaagcaggtgccctccccagcgtcacttctgctaaggagggacccgtgttgccccaccaggcaagaatagtcagagtgacccatgtatctgggaagactctagtctggactgtggcccagcttggggaccttgtgtgctcagatcatcttcaggaaggaaaaggcatcctggagacaggagtccattcactcctctgctctctacccactcatttgcttgccaaacttagctttgccagtgatagtcaatattaaagtgtacttttttcccctttaatccaatatagttgataattaaagtgtattttgaatgaca

SEQ ID NO: 15550 - DNA, 2532 bp, Homo sapiens
  source 1..2532: mol_type = unassigned DNA
gctgagggcgtgagctggcatgaggcgaagagagggccatggcaccgactccgagatgggtcaaggacccgtacgggagtcgcaatcctcagaccctcccgcgctccagttccggataagcgagtataagccgctgaacatggcgggagtggagcagcccccgagccccgagctgcggcaggaaggcgtgaccgaatacgaagatggcggggccccggcgggagatggcgaggcgggcccccaacaggcggaggaccacccccagaatcctccagaagatcccaatcaggaccccccagaggatgatagcacctgtcagtgccaggcgtgcgggcctcaccaagccgcgggtccagatcttggttcctctaatgatggctgccctcagctgttccaggagcggtcagtcatagtggagaactcctcaggctctaccagcgcttctgagctcctcaaacccatgaagaagaggaagcgcagggaataccagagcccatcagaggaggagtcggagccagaggccatggagaagcaagaagaaggaaaggacccagagggacaacccactgctagcaccccagagagtgaggagtggagcagcagccagcctgcaacaggtgagaagaaggaatgctggtcgtgggagtcctacctagaggagcagaaggccattactgctccagtcagcctcttccaggactcccaggcagtcactcacaacaagaatggcttcaaactgggcatgaagttggaaggcattgaccctcaacacccgtccatgtacttcatcctcaccgtggctgaggtatgtggctatcgcctacgcctgcactttgatgggtattctgagtgccatgacttctgggtcaatgccaactcccctgacattcaccctgctggctggttcgagaagacgggccacaagctgcagcctcccaaaggttacaaggaggaggagttcagctggagccagtacctgcgcagcacaagagctcaggctgcccccaagcacctgtttgtgagccagagccacagtcccccacccctgggcttccaggtgggcatgaagctggaggctgttgaccgcatgaacccgtcccttgtctgcgtggccagtgtgaccgatgtggtggacagccgcttcctggtgcactttgacaactgggatgatacttatgactactggtgtgatcccagcagcccctacatccacccagtgggctggtgccagaagcaaggaaagcccctcacccctccacaagactacccagaccctgataacttctgttgggagaaatatctggaagaaactggggcctctgctgtccccacctgggccttcaaggtgcgaccccctcacagcttcctggtcaatatgaagctggaggctgtggaccgcaggaacccagccctgattcgcgtggccagcgtggaggatgtggaggaccatcggataaagatccactttgatggctggagtcatggctatgatttctggatcgacgctgaccacccagacatccaccctgccggctggtgctccaagacaggacatcccctgcagcctcctctcggacccagagagcccagctctgcctcccctgggggctgtccccctctcagctataggagcctgccccacactaggacctccaaatacagctttcaccaccgtctcttcttccccaggaagtgccccactcctggttgcgacggctctggccatgtcacaggcaagttcacagctcaccattgcctctcaggctgcccactggctgagaggaaccagagccggctgaaagcggagctgtctgactcggaggcctcagcccgcaagaagaacctctcaggcttctccccaaggaagaagcctcgccatcacggccgaattggacgccctccgaagtatcgaaagattccgcaggaagatttccagaccctcacgcccgatgtcgtgcaccagtccctcttcatgtcagccctgtcggcccaccctgaccgctcactctcagtgtgctgggagcagcactgcaagctcctgccaggagtagcgggcatctcagcctcgacagtcgccaagtggaccatcgatgaggtcttcggctttgttcagaccctgacaggttgtgaggaccaagcacgcctcttcaaagacgaggtaaggtgcaagtgcagagtgggagacagagccggggtcactgtccttaagacggcaggaagcaggtgccctccccagcgtcacttctgctaaggagggacccgtgttgccccaccaggcaagaatagtcagagtgacccatgtatctgggaagactctagtctggactgtggcccagcttggggaccttgtgtgctcagatcatcttcaggaaggaaaaggcatcctggagacaggagtccattcactcctctgctctctacccactcatttgcttgccaaacttagctttgccagtgatagtcaatattaaagtgtacttttttcccctttaatccaatatagttgataattaaagtgtattttgaatgaca

SEQ ID NO: 15551 - DNA, 3218 bp, Homo sapiens
  source 1..3218: mol_type = unassigned DNA
agagtggggcaccctgggactggaccccgcaggtgcttgggggcgtagcctggagtgagggtttggctggtgtagcttggagtgaggccccctggcgtggagtcttgaggcctgctgagggcgtgagctggcatgaggcgaagagagggccatggcaccgactccgagatgggtcaaggacccgtacgggagtcgcaatcctcagaccctcccgcgctccagttccggataagcgagtataagccgctgaacatggcgggagtggagcagcccccgagccccgagctgcggcaggaaggcgtgaccgaatacgaagatggcggggccccggcgggagatggcgaggcgggcccccaacaggcggaggaccacccccagaatcctccagaagatcccaatcaggaccccccagaggatgatagcacctgtcagtgccaggcgtgcgggcctcaccaagccgcgggtccagatcttggttcctctaatgatggctgccctcagctgttccaggagcggtcagtcatagtggagaactcctcaggctctaccagcgcttctgagctcctcaaacccatgaagaagaggaagcgcagggaataccagagcccatcagaggaggagtcggagccagaggccatggagaagcaagaagaaggaaaggacccagagggacaacccactgctagcaccccagagagtgaggagtggagcagcagccagcctgcaacaggtgagaagaaggaatgctggtcgtgggagtcctacctagaggagcagaaggccattactgctccagtcagcctcttccaggactcccaggcagtcactcacaacaagaatggcttcaaactgggcatgaagttggaaggcattgaccctcaacacccgtccatgtacttcatcctcaccgtggctgaggtatgtggctatcgcctacgcctgcactttgatgggtattctgagtgccatgacttctgggtcaatgccaactcccctgacattcaccctgctggctggttcgagaagacgggccacaagctgcagcctcccaaaggttacaaggaggaggagttcagctggagccagtacctgcgcagcacaagagctcaggctgcccccaagcacctgtttgtgagccagagccacagtcccccacccctgggcttccaggtgggcatgaagctggaggctgttgaccgcatgaacccgtcccttgtctgcgtggccagtgtgaccgatgtggtggacagccgcttcctggtgcactttgacaactgggatgatacttatgactactggtgtgatcccagcagcccctacatccacccagtgggctggtgccagaagcaaggaaagcccctcacccctccacaagactacccagaccctgataacttctgttgggagaaatatctggaagaaactggggcctctgctgtccccacctgggccttcaaggtgcgaccccctcacagcttcctggtcaatatgaagctggaggctgtggaccgcaggaacccagccctgattcgcgtggccagcgtggaggatgtggaggaccatcggataaagatccactttgatggctggagtcatggctatgatttctggatcgacgctgaccacccagacatccaccctgccggctggtgctccaagacaggacatcccctgcagcctcctctcggacccagagagcccagctctgcctcccctgggggctgtccccctctcagctataggagcctgccccacactaggacctccaaatacagctttcaccaccggaagtgccccactcctggttgcgacggctctggccatgtcacaggcaagttcacagctcaccattgcctctcaggctgcccactggctgagaggaaccagagccggctgaaagcggagctgtctgactcggaggcctcagcccgcaagaagaacctctcaggcttctccccaaggaagaagcctcgccatcacggccgaattggacgccctccgaagtatcgaaagattccgcaggaagatttccagaccctcacgcccgatgtcgtgcaccagtccctcttcatgtcagccctgtcggcccaccctgaccgctcactctcagtgtgctgggagcagcactgcaagctcctgccaggagtagcgggcatctcagcctcgacagtcgccaagtggaccatcgatgaggtcttcggctttgttcagaccctgacaggttgtgaggaccaagcacgcctcttcaaagacgaggcaagaatagtcagagtgacccatgtatctgggaagactctagtctggactgtggcccagcttggggaccttgtgtgctcagatcatcttcaggaaggaaaaggcatcctggagacaggagtccattcactcctctgctctctacccactcatttgcttgccaaacttagctttgccagtgatagtcaatattaaagtgtacttttttcccctttaatccaatatagttgataattaaagtgtattttgaatgacacagatattgtgatttactgcaaggatcctaacacacacttaaaatcaagagccaaggagtagtgagttgtagataaaaaaagaatgtcagctttggagacagtctgggtttaaatcccagttctgtcaatttgagctgtttactgtctctgagcctacatcttcttgtctgtaaaatggagataaaatgggtttaatgaggtctaccttgcagagccattgtgagcattggaaatgatgaatgaatcataccagaacgtctagtataattacagtcatgcattgcttaacgatggggatacattcttagaaatgtgtcactaggcaattctgtcattgtgtaaacattatagaatgtacttacacaaacctagatgttatatgtatttttatttacatgtatattttcacatgaaataccaaatgtcacagcattattactgaatgtcagtcatttcccctacttgatctgcaatgccaatatcaagggccatgtatcaggtttctgtatatgttccactataatcttatgggaccatggttttaaatgtggaatcattgacagaaatgtctttatgtagcatatggctgtgtatcactagtatataatagagcaatattatggaggaatatgtagatccaatcactttacctatacaaaatgactgctatggtgggaacacaataaacaccagttttgactttta

SEQ ID NO: 15552 - DNA, 3044 bp, Homo sapiens
  source 1..3044: mol_type = unassigned DNA
gctaggcgctgggcggccaccggctggccaggcaggggaggtcagcatgcacttggtggccggagacagccccggttctggtcctcacctgcccgcaactgccttcatcattccagccagttcggccaccctcggcctgcccagcagtgccctggatgtgtcttgctttccccgggagccaatccatgtgggtgccccggagcaagtggccggctgcgaaccagtttctgccaccgtcctgccgcagcttagcgccgggccggccagctccagcaccagcacagtgcggcttctggaatggacagaggccgcggccccgcccccagggggcggcctgcggttccggataagcgagtataagccgctgaacatggcgggagtggagcagcccccgagccccgagctgcggcaggaaggcgtgaccgaatacgaagatggcggggccccggcgggagatggcgaggcgggcccccaacaggcggaggaccacccccagaatcctccagaagatcccaatcaggaccccccagaggatgatagcacctgtcagtgccaggcgtgcgggcctcaccaagccgcgggtccagatcttggttcctctaatgatggctgccctcagctgttccaggagcggtcagtcatagtggagaactcctcaggctctaccagcgcttctgagctcctcaaacccatgaagaagaggaagcgcagggaataccagagcccatcagaggaggagtcggagccagaggccatggagaagcaagaagaaggaaaggacccagagggacaacccactgctagcaccccagagagtgaggagtggagcagcagccagcctgcaacaggtgagaagaaggaatgctggtcgtgggagtcctacctagaggagcagaaggccattactgctccagtcagcctcttccaggactcccaggcagtcactcacaacaagaatggcttcaaactgggcatgaagttggaaggcattgaccctcaacacccgtccatgtacttcatcctcaccgtggctgaggtatgtggctatcgcctacgcctgcactttgatgggtattctgagtgccatgacttctgggtcaatgccaactcccctgacattcaccctgctggctggttcgagaagacgggccacaagctgcagcctcccaaaggttacaaggaggaggagttcagctggagccagtacctgcgcagcacaagagctcaggctgcccccaagcacctgtttgtgagccagagccacagtcccccacccctgggcttccaggtgggcatgaagctggaggctgttgaccgcatgaacccgtcccttgtctgcgtggccagtgtgaccgatgtggtggacagccgcttcctggtgcactttgacaactgggatgatacttatgactactggtgtgatcccagcagcccctacatccacccagtgggctggtgccagaagcaaggaaagcccctcacccctccacaagactacccagaccctgataacttctgttgggagaaatatctggaagaaactggggcctctgctgtccccacctgggccttcaaggtgcgaccccctcacagcttcctggtcaatatgaagctggaggctgtggaccgcaggaacccagccctgattcgcgtggccagcgtggaggatgtggaggaccatcggataaagatccactttgatggctggagtcatggctatgatttctggatcgacgctgaccacccagacatccaccctgccggctggtgctccaagacaggacatcccctgcagcctcctctcggacccagagagcccagctctgcctcccctgggggctgtccccctctcagctataggagcctgccccacactaggacctccaaatacagctttcaccaccggaagtgccccactcctggttgcgacggctctggccatgtcacaggcaagttcacagctcaccattgcctctcaggctgcccactggctgagaggaaccagagccggctgaaagcggagctgtctgactcggaggcctcagcccgcaagaagaacctctcaggcttctccccaaggaagaagcctcgccatcacggccgaattggacgccctccgaagtatcgaaagattccgcaggaagatttccagaccctcacgcccgatgtcgtgcaccagtccctcttcatgtcagccctgtcggcccaccctgaccgctcactctcagtgtgctgggagcagcactgcaagctcctgccaggagtagcgggcatctcagcctcgacagtcgccaagtggaccatcgatgaggtcttcggctttgttcagaccctgacaggttgtgaggaccaagcacgcctcttcaaagacgaggcaagaatagtcagagtgacccatgtatctgggaagactctagtctggactgtggcccagcttggggaccttgtgtgctcagatcatcttcaggaaggaaaaggcatcctggagacaggagtccattcactcctctgctctctacccactcatttgcttgccaaacttagctttgccagtgatagtcaatattaaagtgtacttttttcccctttaatccaatatagttgataattaaagtgtattttgaatgacacagatattgtgatttactgcaaggatcctaacacacacttaaaatcaagagccaaggagtagtgagttgtagataaaaaaagaatgtcagctttggagacagtctgggtttaaatcccagttctgtcaatttgagctgtttactgtctctgagcctacatcttcttgtctgtaaaatggagataaaatgggtttaatgaggtctaccttgcagagccattgtgagcattggaaatgatgaatgaatcataccagaacgtctagtataattacagtcatgcattgcttaacgatggggatacattcttagaaatgtgtcactaggcaattctgtcattgtgtaaacattatagaatgtacttacacaaacctagatgttatatgtatttttatttacatgtatattttcacatga

SEQ ID NO: 15553 - DNA, 4322 bp, Homo sapiens
  source 1..4322: mol_type = unassigned DNA
cagaaggccattactgctccagtcagcctcttccaggactcccaggcagtcactcacaacaagaatggcttcaaactgggcatgaagttggaaggcattgaccctcaacacccgtccatgtacttcatcctcaccgtggctgaggtatgtggctatcgcctacgcctgcactttgatgggtattctgagtgccatgacttctgggtcaatgccaactcccctgacattcaccctgctggctggttcgagaagacgggccacaagctgcagcctcccaaaggttacaaggaggaggagttcagctggagccagtacctgcgcagcacaagagctcaggctgcccccaagcacctgtttgtgagccagagccacagtcccccacccctgggcttccaggtgggcatgaagctggaggctgttgaccgcatgaacccgtcccttgtctgcgtggccagtgtgaccgatgtggtggacagccgcttcctggtgcactttgacaactgggatgatacttatgactactggtgtgatcccagcagcccctacatccacccagtgggctggtgccagaagcaaggaaagcccctcacccctccacaagactacccagaccctgataacttctgttgggagaaatatctggaagaaactggggcctctgctgtccccacctgggccttcaaggtgcgaccccctcacagcttcctggtcaatatgaagctggaggctgtggaccgcaggaacccagccctgattcgcgtggccagcgtggaggatgtggaggaccatcggataaagatccactttgatggctggagtcatggctatgatttctggatcgacgctgaccacccagacatccaccctgccggctggtgctccaagacaggacatcccctgcagcctcctctcggacccagagagcccagctctgcctcccctgggggctgtccccctctcagctataggagcctgccccacactaggacctccaaatacagctttcaccaccggaagtgccccactcctggttgcgacggctctggccatgtcacaggcaagttcacagctcaccattgcctctcaggctgcccactggctgagaggaaccagagccggctgaaagcggagctgtctgactcggaggcctcagcccgcaagaagaacctctcaggcttctccccaaggaagaagcctcgccatcacggccgaattggacgccctccgaagtatcgaaagattccgcaggaagatttccagaccctcacgcccgatgtcgtgcaccagtccctcttcatgtcagccctgtcggcccaccctgaccgctcactctcagtgtgctgggagcagcactgcaagctcctgccaggagtagcgggcatctcagcctcgacagtcgccaagtggaccatcgatgaggtcttcggctttgttcagaccctgacaggttgtgaggaccaagcacgcctcttcaaagacgagatgattgacggcgaggccttccttttgctgacacaggcggacattgtgaagatcatgagcgtcaagctgggcccagccttgaagatctataacgccattctcatgttcaaaaacgctgatgacaccttaaagtgactggcccagggctgggccctcctgcagcccctgcttggcctccctctccagctgatgctttcttcctgacctgaattcctcataccccacacgtccccatgctccacctatatctgaccaggctggtccttcttagagggtgcatgggagctgaggagccctggggagggtaggcacccagccccaagtcctagagctcattcgtcaccaggcatgttggtgagggcgtgactggcaggggcattactcatggagtcagttggactgtggcagcccccacagccccagtggacttttattgtattaccaaagggtctttttcttggcagtggaggagagactagtagagcagcagtccttcaatctgaggcccctttcccttttttggtatctctgtgtacttttctctccttggctcctttcctcctgccaagaagtgaccccaccacaaatgtatttactcctggaggtacctcctctctttctgtctgctggttttgctgccctcattctgctgcttcgtttcctgggcagtgcccccagccagaccccactggctcttccccctgagatatgtgaacctcggaaacatgttttcctaagatcccttggaagtctctagctgcctttctctcttttgcccagaattgagagattttgagccaagatgccttcctgaacttacccagttctggaccagttggcattttagtgtcccacgccaagtccaagtttcagcagaatgagcaggtggtttgagcctgttttatagatggcagaggttgaggttccactgctgttttccatacacccttcatgtgttgagtctgggaaggagtaagcctagcctgccagtagcctaggttaggagaccagcataaggatttgttagacaatctcgggtctttggccagaggggcagctccagcaggcatagtggtgcctgaagttaggaatactgtactctctgtagctttggacctcagccaaggtattgcccatggggtgatggctccaggcctgccaggccttctgccatgagaatgtagcactctgtgtagcacacacccccatgacatcatttaacctgtcccttaaatgttgaccattagctcttgcagcgtcttacaaagacgacttgaagttgggagttaggaaggtgaacttttctatctgaattctccgggtccctgaagccctccttgccgctctccatctgtcttgcactgccagctgggtccctgctggggctctgggacttccacttctcagtccacataggaacccagcttccactgagtcactgccaaacctgcctcccagcctgggtgggaagggggagagccactggtaggagccagccccacatggaggtgaggagccactgccaacctcccgtgtccaggtgctgatgtgggcctgcggagtgtggggctggtgccttcacccagaccccttcaatcatgtgatgtgtgtgtgtgtgcatgtgtgtgtgtgtgtgtgtgtgtggcactctcagaagtgtttgacagggtgcagatgtgaggcttagtgttgggaaaatgccaagggctattatcattaaaatttgaagctttatttttcccttagaagtgggaaacccagagctctgttgatttcctaccacaacccagtaggggcctctctctgccatgggctggacagctttttgaggaagccattcagctcccacagttgagctcccacagggctttaggtgtccattccctctcaactgcttagaggcagctttgagcacagccttcctggaaggaagctaggcaagacctgccacacagcgaaggttgggtttacaagggtgacattggtacccccttggccaagagtaaagaagaacaagtctaagccttgcttttatcttagttgtctgggtggtagcagaactcatcagctccttatcctcagtctgttcctctataaaagatgagagatgttcactgactttgtgcagtgagaaggcagcaagtactcacggctggtgctgtgggacctcacagcttctaaggagaggggctgggagggcctttgccatcagatctgccaagcacctaatgcttgcctgtggtgaaggcaagatggaccaagggccttggagaaaagggctcccaggcttctgaactttgaggcctcagcactttctgcattatcgtcaaactctttggaaagaaaccaaatcattaaaaagtagaaagaaatctgcctcttgtctgccctactgcccctttacccccactctgtccccaaatgatattattgcaccttgacctgggagcgcagagaggggagggagttggcagagacttctggtgccctctgccctcctagcaacagatgccacttatattttggcccctggcagcctcgcccagcccctgatcagcccaggcctagggcagttaggacctttctgtttattttctgaagcagagagaatgatctcagagtttgcaaatgaagccttttttgcactttcattcacatgcactttggtggggttacatttttgtacttgcctcttgtgtgtgcacatgtgtgtatgtgttctttaagagaatcttctggcttaagctaaggtgactcttgaaggagaaaaagttacaaacaaaatgtggtgtgatctgtcagtgtatcaaaacaacataaataaacttgaacaactgata

SEQ ID NO: 15554 - DNA, 3157 bp, Homo sapiens
  source 1..3157: mol_type = unassigned DNA
gcaggcgcgcggcgcccggctcggaccgtagctaggcgctgggcggccaccggctggccaggcaggcctgccaggatggaggggcatgctgggatggaggggcatgctgaaatggagatgctgaggacactgaaggggccttccacaggggaggtcagcatgcacttggtggccggagacagccccggttctggtcctcacctgcccgcaactgccttcatcattccagccagttcggccaccctcggcctgcccagcagtgccctggatgtgtcttgctttccccgggagccaatccatgtgggtgccccggagcaagtggccggctgcgaaccagtttctgccaccgtcctgccgcagcttagcgccgggccggccagctccagcaccagcacagtgcggcttctggaatggacagaggccgcggccccgcccccagggggcggcctgcggttccggataagcgagtataagccgctgaacatggcgggagtggagcagcccccgagccccgagctgcggcaggaaggcgtgaccgaatacgaagatggcggggccccggcgggagatggcgaggcgggcccccaacaggcggaggaccacccccagaatcctccagaagatcccaatcaggaccccccagaggatgatagcacctgtcagtgccaggcgtgcgggcctcaccaagccgcgggtccagatcttggttcctctaatgatggctgccctcagctgttccaggagcggtcagtcatagtggagaactcctcaggctctaccagcgcttctgagctcctcaaacccatgaagaagaggaagcgcagggaataccagagcccatcagaggaggagtcggagccagaggccatggagaagcaagaagaaggaaaggacccagagggacaacccactgctagcaccccagagagtgaggagtggagcagcagccagcctgcaacaggtgagaagaaggaatgctggtcgtgggagtcctacctagaggagcagaaggccattactgctccagtcagcctcttccaggactcccaggcagtcactcacaacaagaatggcttcaaactgggcatgaagttggaaggcattgaccctcaacacccgtccatgtacttcatcctcaccgtggctgaggtatgtggctatcgcctacgcctgcactttgatgggtattctgagtgccatgacttctgggtcaatgccaactcccctgacattcaccctgctggctggttcgagaagacgggccacaagctgcagcctcccaaaggttacaaggaggaggagttcagctggagccagtacctgcgcagcacaagagctcaggctgcccccaagcacctgtttgtgagccagagccacagtcccccacccctgggcttccaggtgggcatgaagctggaggctgttgaccgcatgaacccgtcccttgtctgcgtggccagtgtgaccgatgtggtggacagccgcttcctggtgcactttgacaactgggatgatacttatgactactggtgtgatcccagcagcccctacatccacccagtgggctggtgccagaagcaaggaaagcccctcacccctccacaagactacccagaccctgataacttctgttgggagaaatatctggaagaaactggggcctctgctgtccccacctgggccttcaaggtgcgaccccctcacagcttcctggtcaatatgaagctggaggctgtggaccgcaggaacccagccctgattcgcgtggccagcgtggaggatgtggaggaccatcggataaagatccactttgatggctggagtcatggctatgatttctggatcgacgctgaccacccagacatccaccctgccggctggtgctccaagacaggacatcccctgcagcctcctctcggacccagagagcccagctctgcctcccctgggggctgtccccctctcagctataggagcctgccccacactaggacctccaaatacagctttcaccaccggaagtgccccactcctggttgcgacggctctggccatgtcacaggcaagttcacagctcaccattgcctctcaggctgcccactggctgagaggaaccagagccggctgaaagcggagctgtctgactcggaggcctcagcccgcaagaagaacctctcaggcttctccccaaggaagaagcctcgccatcacggccgaattggacgccctccgaagtatcgaaagattccgcaggaagatttccagaccctcacgcccgatgtcgtgcaccagtccctcttcatgtcagccctgtcggcccaccctgaccgctcactctcagtgtgctgggagcagcactgcaagctcctgccaggagtagcgggcatctcagcctcgacagtcgccaagtggaccatcgatgaggtcttcggctttgttcagaccctgacaggttgtgaggaccaagcacgcctcttcaaagacgaggcaagaatagtcagagtgacccatgtatctgggaagactctagtctggactgtggcccagcttggggaccttgtgtgctcagatcatcttcaggaaggaaaaggcatcctggagacaggagtccattcactcctctgctctctacccactcatttgcttgccaaacttagctttgccagtgatagtcaatattaaagtgtacttttttcccctttaatccaatatagttgataattaaagtgtattttgaatgacacagatattgtgatttactgcaaggatcctaacacacacttaaaatcaagagccaaggagtagtgagttgtagataaaaaaagaatgtcagctttggagacagtctgggtttaaatcccagttctgtcaatttgagctgtttactgtctctgagcctacatcttcttgtctgtaaaatggagataaaatgggtttaatgaggtctaccttgcagagccattgtgagcattggaaatgatgaatgaatcataccagaacgtctagtataattacagtcatgcattgcttaacgatggggatacattcttagaaatgtgtcactaggcaattctgtcattgtgtaaacattatagaatgtacttacacaaacctagatgttatatgtatttttatttacatgtatattttcacatga

SEQ ID NO: 15555 - DNA, 573 bp, Homo sapiens
  source 1..573: mol_type = unassigned DNA
gcaggcgcgcggcgcccggctcggaccgtagctaggcgctgggcggccaccggctggccaggcagccagttcggccaccctcggcctgcccagcagtgccctggatgtgtcttgctttccccgggagccaatccatgtgggtgccccggagcaagtggccggctgcgaaccagtttctgccaccgtcctgccgcagcttagcgccgggccggccagctccagcaccagcacagtgcggcttctggaatggacagaggccgcggccccgcccccagggggcggcctgcggttccggataagcgagtataagccgctgaacatggcgggagtggagcagcccccgagccccgagctgcggcaggaaggcgtgaccgaatacgaagatggcggggccccggcgggagatggcgaggcgggcccccaacaggcggaggaccacccccagaatcctccagaagatcccaatcaggaccccccagaggatgatagcacctgtcagtgccaggcgtgcgggcctcaccaagccgcgggtccagatcttggttcctctaatgatggctgccctcagctgtt

SEQ ID NO: 15556 - DNA, 460 bp, Homo sapiens
  source 1..460: mol_type = unassigned DNA
gctaggcgctgggcggccaccggctggccaggcaggggaggtcagcatgcacttggtggccggagacagccccggttctggtcctcacctgcccgcaactgccttcatcattccagccagttcggccaccctcggcctgcccagcagtgccctggatgtgtcttgctttccccgggagccaatccatgtgggtgccccggagcaagtggccggctgcgaaccagtttctgccaccgtcctgccgcagcttagcgccgggccggccagctccagcaccagcacagtgcggcttctggaatggacagaggccgcggccccgcccccagggggcggcctgcggttccggataagcgagtataagccgctgaacatggcgggagtggagcagcccccgagccccgagctgcggcaggaaggcgtgaccgaatacgaagatggcggggccccggcgggagatggc

SEQ ID NO: 15557 - DNA, 3335 bp, Homo sapiens
  source 1..3335: mol_type = unassigned DNA
agagtggggcaccctgggactggaccccgcaggtgcttgggggcgtagcctggagtgagggtttggctggtgtagcttggagtgaggccccctggcgtggagtcttgaggcctgctgagggcgtgagctggcatgaggcgaagagagggccatggcaccgactccgagatgggtcaaggacccgtacgggagtcgcaatcctcagaccctcccgcgctccagttccggataagcgagtataagccgctgaacatggcgggagtggagcagcccccgagccccgagctgcggcaggaaggcgtgaccgaatacgaagatggcggggccccggcgggagatggcgaggcgggcccccaacaggcggaggaccacccccagaatcctccagaagatcccaatcaggaccccccagaggatgatagcacctgtcagtgccaggcgtgcgggcctcaccaagccgcgggtccagatcttggttcctctaatgatggctgccctcagctgttccaggagcggtcagtcatagtggagaactcctcaggctctaccagcgcttctgagctcctcaaacccatgaagaagaggaagcgcagggaataccagagcccatcagaggaggagtcggagccagaggccatggagaagcaagaagaaggaaaggacccagagggacaacccactgctagcaccccagagagtgaggagtggagcagcagccagcctgcaacaggtgagaagaaggaatgctggtcgtgggagtcctacctagaggagcagaaggccattactgctccagtcagcctcttccaggactcccaggcagtcactcacaacaagaatggcttcaaactgggcatgaagttggaaggcattgaccctcaacacccgtccatgtacttcatcctcaccgtggctgaggtatgtggctatcgcctacgcctgcactttgatgggtattctgagtgccatgacttctgggtcaatgccaactcccctgacattcaccctgctggctggttcgagaagacgggccacaagctgcagcctcccaaaggttacaaggaggaggagttcagctggagccagtacctgcgcagcacaagagctcaggctgcccccaagcacctgtttgtgagccagagccacagtcccccacccctgggcttccaggtgggcatgaagctggaggctgttgaccgcatgaacccgtcccttgtctgcgtggccagtgtgaccgatgtggtggacagccgcttcctggtgcactttgacaactgggatgatacttatgactactggtgtgatcccagcagcccctacatccacccagtgggctggtgccagaagcaaggaaagcccctcacccctccacaagactacccagaccctgataacttctgttgggagaaatatctggaagaaactggggcctctgctgtccccacctgggccttcaaggtgcgaccccctcacagcttcctggtcaatatgaagctggaggctgtggaccgcaggaacccagccctgattcgcgtggccagcgtggaggatgtggaggaccatcggataaagatccactttgatggctggagtcatggctatgatttctggatcgacgctgaccacccagacatccaccctgccggctggtgctccaagacaggacatcccctgcagcctcctctcggacccagagagcccagctctgcctcccctgggggctgtccccctctcagctataggagcctgccccacactaggacctccaaatacagctttcaccaccggaagtgccccactcctggttgcgacggctctggccatgtcacaggcaagttcacagctcaccattgcctctcaggctgcccactggctgagaggaaccagagccggctgaaagcggagctgtctgactcggaggcctcagcccgcaagaagaacctctcaggcttctccccaaggaagaagcctcgccatcacggccgaattggacgccctccgaagtatcgaaagattccgcaggaagatttccagaccctcacgcccgatgtcgtgcaccagtccctcttcatgtcagccctgtcggcccaccctgaccgctcactctcagtgtgctgggagcagcactgcaagctcctgccaggagtagcgggcatctcagcctcgacagtcgccaagtggaccatcgatgaggtcttcggctttgttcagaccctgacaggttgtgaggaccaagcacgcctcttcaaagacgaggtaaggtgcaagtgcagagtgggagacagagccggggtcactgtccttaagacggcaggaagcaggtgccctccccagcgtcacttctgctaaggagggacccgtgttgccccaccaggcaagaatagtcagagtgacccatgtatctgggaagactctagtctggactgtggcccagcttggggaccttgtgtgctcagatcatcttcaggaaggaaaaggcatcctggagacaggagtccattcactcctctgctctctacccactcatttgcttgccaaacttagctttgccagtgatagtcaatattaaagtgtacttttttcccctttaatccaatatagttgataattaaagtgtattttgaatgacacagatattgtgatttactgcaaggatcctaacacacacttaaaatcaagagccaaggagtagtgagttgtagataaaaaaagaatgtcagctttggagacagtctgggtttaaatcccagttctgtcaatttgagctgtttactgtctctgagcctacatcttcttgtctgtaaaatggagataaaatgggtttaatgaggtctaccttgcagagccattgtgagcattggaaatgatgaatgaatcataccagaacgtctagtataattacagtcatgcattgcttaacgatggggatacattcttagaaatgtgtcactaggcaattctgtcattgtgtaaacattatagaatgtacttacacaaacctagatgttatatgtatttttatttacatgtatattttcacatgaaataccaaatgtcacagcattattactgaatgtcagtcatttcccctacttgatctgcaatgccaatatcaagggccatgtatcaggtttctgtatatgttccactataatcttatgggaccatggttttaaatgtggaatcattgacagaaatgtctttatgtagcatatggctgtgtatcactagtatataatagagcaatattatggaggaatatgtagatccaatcactttacctatacaaaatgactgctatggtgggaacacaataaacaccagttttgactttt

SEQ ID NO: 15558 - DNA, 865 bp, Homo sapiens
  source 1..865: mol_type = unassigned DNA
tgacttctgggtcaatgccaactcccctgacattcaccctgctggctggttcgagaagacgggccacaagctgcagcctcccaaagagtcccccacccctgggcttccaggtgggcatgaagctggaggctgttgaccgcatgaacccgtcccttgtctgcgtggccagtgtgaccgatgtggtggacagccgcttcctggtgcactttgacaactgggatgatacttatgactactggtgtgatcccagcagcccctacatccacccagtgggctggtgccagaagcaaggaaagcccctcacccctccacaagactacccagaccctgataacttctgttgggagaaatatctggaagaaactggggcctctgctgtccccacctgggccttcaaggtgcgaccccctcacagcttcctggtcaatatgaagctggaggctgtggaccgcaggaacccagccctgattcgcgtggccagcgtggaggatgtggaggaccatcggataaagatccactttgatggctggagtcatggctatgatttctggatcgacgctgaccacccagacatccaccctgccggctggtgctccaagacaggacatcccctgcagcctcctctcggacccagagagcccagctctgcctcccctgggggctgtccccctctcagctataggagcctgccccacactaggacctccaaatacagctttcaccaccggaagtgccccactcctggttgcgacggctctggccatgtcacaggcaagttcacagctcaccattgcctctcaggctgcccactggctgagaggaaccagagccggctgaaagcggagctgtctgactcggaggcctc

SEQ ID NO: 15559 - DNA, 3296 bp, Homo sapiens
  source 1..3296: mol_type = unassigned DNA
gaatggcgggagcaggcacggaaccggcttttcctccttcctgcagcgtgattggcccgcggctcagggaggcgaccaatgagtgctctcgcggagagcgacggggcaggccaatatggcttcctgcacctggtgacgcttggcgaaactgaggtctcatggagaagccccggagtattgaggagaccccatcttcagaaccaatggaggaagaggaagatgacgacttggagctgtttggtggctatgatagtttccggagttataacagcagtgtgggcagtgagagcagctcctatctggaggagtcaagtgaagcagaaaatgaggatcgggaagcaggggaactgccgacctccccgctgcatttgctcagccctgggactcctcgctccttggatggcagtggttctgagccagctgtctgtgagatgtgtggtatcgtgggtacaagggaagccttcttctccaagaccaagaggttctgcagcgtctcctgctccaggagctactcctccaactccaagaaagccagtatcttggctaggttacagggaaaaccaccgaccaaaaaagccaaagtcctgcacaaggctgcctggtctgccaaaattggagccttcctccactctcaagggacaggacagctggcagatgggacaccaacaggacaagacgctctggtcttgggcttcgactgggggaagttcctgaaggatcacagttacaaggctgctcccgtcagctgtttcaagcacgtcccactctatgaccagtgggaggatgtgatgaaagggatgaaggtggaggtgctcaacagtgatgctgtgctccccagccgggtgtactggatcgcctctgtcatccagacagcagggtatcgggtgctgcttcggtatgaaggctttgaaaatgacgccagccatgacttctggtgcaacctgggaacagtggatgtccaccccattggctggtgtgccatcaacagcaagatcctagtgcccccacggaccatccatgccaagttcaccgactggaagggctacctcatgaaacggctggtgggctccaggacgcttcccgtggatttccacatcaagatggtggagagcatgaagtacccctttaggcagggcatgcggctggaagtggtggacaagtcccaggtgtcacgcactcgcatggctgtggtggacacagtaatcgggggtcgcctacggctcctctacgaggatggtgacagtgacgacgacttctggtgccacatgtggagccccctgatccacccagtgggttggtcacgacgtgtgggccacggcatcaagatgtcagagaggcgaagtgacatggcccatcaccccaccttccggaagatctactgtgatgccgttccttacctcttcaagaaggtacgagcagtctacacagaaggcggttggtttgaggaagggatgaagctggaggccattgaccccctgaatctgggcaacatctgcgtggcaactgtctgtaaggttctcctggatggatacctgatgatctgtgtggacggggggccctccacagatggcttggactggttctgctaccatgcctcttcccacgccatcttcccggccaccttctgtcagaagaatgacattgagctcacaccgccaaaaggttatgaggcacagactttcaactgggagaactacttggagaagaccaagtcgaaagccgctccatcgagactctttaacatggattgcccaaaccatggcttcaaggtgggcatgaagctggaggccgtggacctgatggagccccggctcatctgtgtggccacggtgaaacgagtggtgcatcggctcctcagcatccactttgacggctgggacagcgagtacgaccagtgggtggactgcgagtccccagacatctaccccgtcggctggtgtgagctcaccggctaccagctccagcctcctgtggccgcagaaccggccacaccgctgaaggccaaagaggccacaaagaagaaaaagaaacagtttgggaagaaaaggaaaagaatcccgcccactaagacgcgacccctcagacaggggtccaagaagcccctgctggaggacgaccctcagggtgccaggaagatctcgtcggagcctgttcctggcgagatcattgctgtgcgtgtgaaggaagagcatctagacgtggcctcgcccgacaaggcttcaagtccagagctgcctgtctccgtcgagaacatcaagcaggaaacagacgactgagccttcctgcctccagcctggcttctagctggaagccagcccagcgtttctctaccaccaccaccatgcctccacctgactttggcttggagactgatcctctctgtgtaaattctgcccggtgctgtgaaggctggacggtggaggacctgctggggtctcctgggacccgcctgttgcttctgccctcccctgtggaaaggtctatatgacgggccgcctgaggccccagaactcgtctgtgaaccaccttttccagccagagttcccaaagctggaacgctagctgcctgctcttccttaagatggcctccccccgacccgccacggccctcagttgccagggatggggccaccactgtcacactgtggaatacaagacagtgaactctgtctgcctgaacgagccatgtaaattaagttctagagcagctctctgagcaggataaggtcccctgacagtgagttgtgtggtgggggcagcctctgcctcaaaaattcaccaagcagaatgcctctcagcctcatgtgttggtcctctgctcctcctagctccccagggatgttggggacccagcttgtctcggcagctaagaagcagtgaccaggatgtggattttggcgacctgtgtggtggccttgagctgctttctgtgtttgtgaggactgactcccatttcctaaaggaaatgcccccggggaggacattgggaggaagatggcctgagtgtgcactttggctctgctacctgctcctgaagccccgctaaaaataattcatccaagattcctttgtagttaaagggtccagttctgactggagcctctagagagctgggcttgtatgttcttttggccttttgttcctacctaaatgaagaaaccatgcctggaggggccgtgaacacagaaccctcaagacaaggatgacagagctggaggacacatctagctgccattgcaacctcactgggctccccagactctgtgtgtgagaaattaaaccccctgcttgcttga

SEQ ID NO: 15560 - DNA, 864 bp, Homo sapiens
  source 1..864: mol_type = unassigned DNA
gagaccccatcttcagaaccaatggaggaagaggaagatgacgacttggagctgtttggtggctatgatagtttccggagttataacagcagtgtgggcagtgagagcagctcctatctggaggagtcaagtgaagcagaaaatgaggatcgggaagcaggggaactgccgacctccccgctgcatttgctcagccctgggactcctcgctccttggatggcagtggttctgagccagggaaaaccaccgaccaaaaaagccaaagtcctgcacaaggctgcctggtctgccaaaattggagccttcctccactctcaagggacaggacagctggcagatgggacaccaacaggacaagacgctctggtcttgggcttcgactgggggaagttcctgaaggatcacagttacaaggctgctcccgtcagctgtttcaagcacgtcccactctatgaccagtgggaggatgtgatgaaagggatgaaggtggaggtgctcaacagtgatgctgtgctccccagccgggtgtactggatcgcctctgtcatccagacagcagggtatcgggtgctgcttcggtatgaaggctttgaaaatgacgccagccatgacttctggtgcaacctgggaacagtggatgtccaccccattggctggtgtgccatcaacagcaagatcctagtgcccccacggaccatccatgccaagttcaccgactggaagggctacctcatgaaacggctggtgggctccaggacgcttcccgtggatttccacatcaaggtcggcagtgagcccttaactgatgtgcctccttccgctcttccatttttctgcatcctgcatgccactcactggagcat

SEQ ID NO: 15561 - DNA, 3888 bp, Homo sapiens
  source 1..3888: mol_type = unassigned DNA
cgccgggaaagatggtcgtggcgctgcggtacgtgtggcctctcctcctctgcagcccctgcctgcttatccagatccccgaggaatatgaaggacaccatgtgatggagccacctgtcatcacggaacagtctccacggcgcctggttgtcttccccacagatgacatcagcctcaagtgtgaggccagtggcaagcccgaagtgcagttccgctggacgagggatggtgtccacttcaaacccaaggaagagctgggtgtgaccgtgtaccagtcgccccactctggctccttcaccatcacgggcaacaacagcaactttgctcagaggttccagggcatctaccgctgctttgccagcaataagctgggcaccgccatgtcccatgagatccggctcatggccgagggtgcccccaagtggccaaaggagacagtgaagcccgtggaggtggaggaaggggagtcagtggttctgccttgcaaccctcccccaagtgcagagcctctccggatctactggatgaacagcaagatcttgcacatcaagcaggacgagcgggtgacgatgggccagaacggcaacctctactttgccaatgtgctcacctccgacaaccactcagactacatctgccacgcccacttcccaggcaccaggaccatcattcagaaggaacccattgacctccgggtcaaggccaccaacagcatgattgacaggaagccgcgcctgctcttccccaccaactccagcagccacctggtggccttgcaggggcagccattggtcctggagtgcatcgccgagggctttcccacgcccaccatcaaatggctgcgccccagtggccccatgccagccgaccgtgtcacctaccagaaccacaacaagaccctgcagctgctgaaagtgggcgaggaggatgatggcgagtaccgctgcctggccgagaactcactgggcagtgcccggcatgcgtactatgtcaccgtggaggctgccccgtactggctgcacaagccccagagccatctatatgggccaggagagactgcccgcctggactgccaagtccagggcaggccccaaccagaggtcacctggagaatcaacgggatccctgtggaggagctggccaaagaccagaagtaccggattcagcgtggcgccctgatcctgagcaacgtgcagcccagtgacacaatggtgacccaatgtgaggcccgcaaccggcacgggctcttgctggccaatgcctacatctacgttgtccagctgccagccaagatcctgactgcggacaatcagacgtacatggctgtccagggcagcactgcctaccttctgtgcaaggccttcggagcgcctgtgcccagtgttcagtggctggacgaggatgggacaacagtgcttcaggacgaacgcttcttcccctatgccaatgggaccctgggcattcgagacctccaggccaatgacaccggacgctacttctgcctggctgccaatgaccaaaacaatgttaccatcatggctaacctgaaggttaaagatgcaactcagatcactcaggggccccgcagcacaatcgagaagaaaggttccagggtgaccttcacgtgccaggcctcctttgacccctccttgcagcccagcatcacctggcgtggggacggtcgagacctccaggagcttggggacagtgacaagtacttcatagaggatgggcgcctggtcatccacagcctggactacagcgaccagggcaactacagctgcgtggccagtaccgaactggatgtggtggagagtagggcacagctcttggtggtggggagccctgggccggtgccacggctggtgctgtccgacctgcacctgctgacgcagagccaggtgcgcgtgtcctggagtcctgcagaagaccacaatgcccccattgagaaatatgacattgaatttgaggacaaggaaatggcgcctgaaaaatggtacagtctgggcaaggttccagggaaccagacctctaccaccctcaagctgtcgccctatgtccactacacctttagggttactgccataaacaaatatggccccggggagcccagcccggtctctgagactgtggtcacacctgaggcagccccagagaagaaccctgtggatgtgaagggggaaggaaatgagaccaccaatatggtcatcacgtggaagccgctccggtggatggactggaacgccccccaggttcagtaccgcgtgcagtggcgccctcaggggacacgagggccctggcaggagcagattgtcagcgaccccttcctggtggtgtccaacacgtccaccttcgtgccctatgagatcaaagtccaggccgtcaacagccagggcaagggaccagagccccaggtcactatcggctactctggagaggactacccccaggcaatccctgagctggaaggcattgaaatcctcaactcaagtgccgtgctggtcaagtggcggccggtggacctggcccaggtcaagggccacctccgcggatacaatgtgacgtactggagggagggcagtcagaggaagcacagcaagagacatatccacaaagaccatgtggtggtgcccgccaacaccaccagtgtcatcctcagtggcttgcggccctatagctcctaccacctggaggtgcaggcctttaacgggcgaggatcggggcccgccagcgagttcaccttcagcaccccagagggagtgcctggccaccccgaggcgttgcacctggagtgccagtcgaacaccagcctgctgctgcgctggcagcccccactcagccacaacggcgtgctcaccggctacgtgctctcctaccaccccctggatgaggggggcaaggggcaactgtccttcaaccttcgggaccccgaacttcggacacacaacctgaccgatctcagcccccacctgcggtaccgcttccagcttcaggccaccaccaaagagggccctggtgaagccatcgtacgggaaggaggcactatggccttgtctgggatctcagattttggcaacatctcagccacagcgggtgaaaactacagtgtcgtctcctgggtccccaaggagggccagtgcaacttcaggttccatatcttgttcaaagccttgggagaagagaagggtggggcttccctttcgccacagtatgtcagctacaaccagagctcctacacgcagtgggacctgcagcctgacactgactacgagatccacttgtttaaggagaggatgttccggcaccaaatggctgtgaagaccaatggcacaggccgcgtgaggctccctcctgctggcttcgccactgagggctggttcatcggctttgtgagtgccatcatcctcctgctcctcgtcctgctcatcctctgcttcatcaagcgcagcaagggcggcaaatactcagtgaaggataaggaggacacccaggtggactctgaggcccgaccgatgaaagatgagaccttcggcgagtacagtgacaacgaggagaaggcctttggcagcagccagccatcgctcaacggggacatcaagcccctgggcagtgacgacagcctggccgattatgggggcagcgtggatgttcagttcaacgaggatggttcgttcattggccagtacagtggcaagaaggagaaggaggcggcagggggcaatgacagctcaggggccacttcccccatcaaccctgccgtggccctagaatagtggagtccaggacaggagatgctgtgcccctggccttgggatccaggcccctccctctccagcaggcccatgggaggctggagttggggcagaggagaacttgctgcctcggatc

SEQ ID NO: 15562 - DNA, 5000 bp, Homo sapiens
  source 1..5000: mol_type = unassigned DNA
tgcccccactcccaactcccgccccaagccgcccaccagcccccttcccctccggccggagcctgaaccgagcccggctggctgtgctgcgcggtgccgccgggaaagatggtcgtggcgctgcggtacgtgtggcctctcctcctctgcagcccctgcctgcttatccagatccccgaggaattgatggagccacctgtcatcacggaacagtctccacggcgcctggttgtcttccccacagatgacatcagcctcaagtgtgaggccagtggcaagcccgaagtgcagttccgctggacgagggatggtgtccacttcaaacccaaggaagagctgggtgtgaccgtgtaccagtcgccccactctggctccttcaccatcacgggcaacaacagcaactttgctcagaggttccagggcatctaccgctgctttgccagcaataagctgggcaccgccatgtcccatgagatccggctcatggccgagggtgcccccaagtggccaaaggagacagtgaagcccgtggaggtggaggaaggggagtcagtggttctgccttgcaaccctcccccaagtgcagagcctctccggatctactggatgaacagcaagatcttgcacatcaagcaggacgagcgggtgacgatgggccagaacggcaacctctactttgccaatgtgctcacctccgacaaccactcagactacatctgccacgcccacttcccaggcaccaggaccatcattcagaaggaacccattgacctccgggtcaaggccaccaacagcatgattgacaggaagccgcgcctgctcttccccaccaactccagcagccacctggtggccttgcaggggcagccattggtcctggagtgcatcgccgagggctttcccacgcccaccatcaaatggctgcgccccagtggccccatgccagccgaccgtgtcacctaccagaaccacaacaagaccctgcagctgctgaaagtgggcgaggaggatgatggcgagtaccgctgcctggccgagaactcactgggcagtgcccggcatgcgtactatgtcaccgtggaggctgccccgtactggctgcacaagccccagagccatctatatgggccaggagagactgcccgcctggactgccaagtccagggcaggccccaaccagaggtcacctggagaatcaacgggatccctgtggaggagctggccaaagaccagaagtaccggattcagcgtggcgccctgatcctgagcaacgtgcagcccagtgacacaatggtgacccaatgtgaggcccgcaaccggcacgggctcttgctggccaatgcctacatctacgttgtccagctgccagccaagatcctgactgcggacaatcagacgtacatggctgtccagggcagcactgcctaccttctgtgcaaggccttcggagcgcctgtgcccagtgttcagtggctggacgaggatgggacaacagtgcttcaggacgaacgcttcttcccctatgccaatgggaccctgggcattcgagacctccaggccaatgacaccggacgctacttctgcctggctgccaatgaccaaaacaatgttaccatcatggctaacctgaaggttaaagatgcaactcagatcactcaggggccccgcagcacaatcgagaagaaaggttccagggtgaccttcacgtgccaggcctcctttgacccctccttgcagcccagcatcacctggcgtggggacggtcgagacctccaggagcttggggacagtgacaagtacttcatagaggatgggcgcctggtcatccacagcctggactacagcgaccagggcaactacagctgcgtggccagtaccgaactggatgtggtggagagtagggcacagctcttggtggtggggagccctgggccggtgccacggctggtgctgtccgacctgcacctgctgacgcagagccaggtgcgcgtgtcctggagtcctgcagaagaccacaatgcccccattgagaaatatgacattgaatttgaggacaaggaaatggcgcctgaaaaatggtacagtctgggcaaggttccagggaaccagacctctaccaccctcaagctgtcgccctatgtccactacacctttagggttactgccataaacaaatatggccccggggagcccagcccggtctctgagactgtggtcacacctgaggcagccccagagaagaaccctgtggatgtgaagggggaaggaaatgagaccaccaatatggtcatcacgtggaagccgctccggtggatggactggaacgccccccaggttcagtaccgcgtgcagtggcgccctcaggggacacgagggccctggcaggagcagattgtcagcgaccccttcctggtggtgtccaacacgtccaccttcgtgccctatgagatcaaagtccaggccgtcaacagccagggcaagggaccagagccccaggtcactatcggctactctggagaggactacccccaggcaatccctgagctggaaggcattgaaatcctcaactcaagtgccgtgctggtcaagtggcggccggtggacctggcccaggtcaagggccacctccgcggatacaatgtgacgtactggagggagggcagtcagaggaagcacagcaagagacatatccacaaagaccatgtggtggtgcccgccaacaccaccagtgtcatcctcagtggcttgcggccctatagctcctaccacctggaggtgcaggcctttaacgggcgaggatcggggcccgccagcgagttcaccttcagcaccccagagggagtgcctggccaccccgaggcgttgcacctggagtgccagtcgaacaccagcctgctgctgcgctggcagcccccactcagccacaacggcgtgctcaccggctacgtgctctcctaccaccccctggatgaggggggcaaggggcaactgtccttcaaccttcgggaccccgaacttcggacacacaacctgaccgatctcagcccccacctgcggtaccgcttccagcttcaggccaccaccaaagagggccctggtgaagccatcgtacgggaaggaggcactatggccttgtctgggatctcagattttggcaacatctcagccacagcgggtgaaaactacagtgtcgtctcctgggtccccaaggagggccagtgcaacttcaggttccatatcttgttcaaagccttgggagaagagaagggtggggcttccctttcgccacagtatgtcagctacaaccagagctcctacacgcagtgggacctgcagcctgacactgactacgagatccacttgtttaaggagaggatgttccggcaccaaatggctgtgaagaccaatggcacaggccgcgtgaggctccctcctgctggcttcgccactgagggctggttcatcggctttgtgagtgccatcatcctcctgctcctcgtcctgctcatcctctgcttcatcaagcgcagcaagggcggcaaatactcagtgaaggataaggaggacacccaggtggactctgaggcccgaccgatgaaagatgagaccttcggcgagtacagtgacaacgaggagaaggcctttggcagcagccagccatcgctcaacggggacatcaagcccctgggcagtgacgacagcctggccgattatgggggcagcgtggatgttcagttcaacgaggatggttcgttcattggccagtacagtggcaagaaggagaaggaggcggcagggggcaatgacagctcaggggccacttcccccatcaaccctgccgtggccctagaatagtggagtccaggacaggagatgctgtgcccctggccttgggatccaggcccctccctctccagcaggcccatgggaggctggagttggggcagaggagaacttgctgcctcggatccccttcctaccacccggtccccactttattgccaaaacccagctgcaccccttcctgggcacacgctgctctgccccagcttgggcagatctcccacatgccaggggcctttgggtgctgttttgccagcccatttgggcagagaggctgtggtttgggggagaagaagtaggggtggcccgaaagggtctccgaaatgctgtctttcttgctccctgactgggggcagacatggtggggtctcctcaggaccagggttggcaccttccccctcccccagccactccccagccagcctggctgggactgggaacagaactcggtgtccccaccatctgctgtcttttctttgccatctctgctccaaccgggatgggagccgggcaaactggccgcgggggcaggggaggccatctggagagcccagagtccccccactcccagcatcgcactctggcagcaccgcctcttcccgccgcccagcccaccccatggccggctttcaggagctccatacacacgctgccttcggtacccaccacacaacatccaagtggcctccgtcactacctggctgcggggcgggcacacctcctcccactgcccactggccggcctcttccagccgcccccaccccccaggaccccttagcagccctgccctccctatcgtctgaacagttgtcttcctcagcctcctcccgcccccaccttgggaatgtaaatacaccgtgactttgaaagtttgtacccctgtccttccctttacgccactagtgtgtaggcagatgtctgagtccctaggtggtttctaggattgatagcaattagctttgatgaacccatcccaggaaaaataaaaacagacaaaaaaaaaggaaagattggttctcccagcactgctcagcagccacagcctccctgtatgcctgtgcttggtctactgataagccctctacaaaaaaacaaaagtatatatatatatgtacataatatcagaattataacaggcaaataaaacctgaaaatc

SEQ ID NO: 15563 - DNA, 4655 bp, Homo sapiens
  source 1..4655: mol_type = unassigned DNA
catcggcatcgcagacgcgctcgggcggcgggtccgaggccggcgtgcgcggaggctgggcgggcagcccgagcggtggccgcagcgcagtgcccccactcccaactcccgccccaagccgcccaccagcccccttcccctccggccggagcctgaaccgagcccggctggctgtgctgcgcggtgccgccgggaaagatggtcgtggcgctgcggtacgtgtggcctctcctcctctgcagcccctgcctgcttatccagatccccgaggaattgatggagccacctgtcatcacggaacagtctccacggcgcctggttgtcttccccacagatgacatcagcctcaagtgtgaggccagtggcaagcccgaagtgcagttccgctggacgagggatggtgtccacttcaaacccaaggaagagctgggtgtgaccgtgtaccagtcgccccactctggctccttcaccatcacgggcaacaacagcaactttgctcagaggttccagggcatctaccgctgctttgccagcaataagctgggcaccgccatgtcccatgagatccggctcatggccgagggtgcccccaagtggccaaaggagacagtgaagcccgtggaggtggaggaaggggagtcagtggttctgccttgcaaccctcccccaagtgcagagcctctccggatctactggatgaacagcaagatcttgcacatcaagcaggacgagcgggtgacgatgggccagaacggcaacctctactttgccaatgtgctcacctccgacaaccactcagactacatctgccacgcccacttcccaggcaccaggaccatcattcagaaggaacccattgacctccgggtcaaggccaccaacagcatgattgacaggaagccgcgcctgctcttccccaccaactccagcagccacctggtggccttgcaggggcagccattggtcctggagtgcatcgccgagggctttcccacgcccaccatcaaatggctgcgccccagtggccccatgccagccgaccgtgtcacctaccagaaccacaacaagaccctgcagctgctgaaagtgggcgaggaggatgatggcgagtaccgctgcctggccgagaactcactgggcagtgcccggcatgcgtactatgtcaccgtggaggctgccccgtactggctgcacaagccccagagccatctatatgggccaggagagactgcccgcctggactgccaagtccagggcaggccccaaccagaggtcacctggagaatcaacgggatccctgtggaggagctggccaaagaccagaagtaccggattcagcgtggcgccctgatcctgagcaacgtgcagcccagtgacacaatggtgacccaatgtgaggcccgcaaccggcacgggctcttgctggccaatgcctacatctacgttgtccagctgccagccaagatcctgactgcggacaatcagacgtacatggctgtccagggcagcactgcctaccttctgtgcaaggccttcggagcgcctgtgcccagtgttcagtggctggacgaggatgggacaacagtgcttcaggacgaacgcttcttcccctatgccaatgggaccctgggcattcgagacctccaggccaatgacaccggacgctacttctgcctggctgccaatgaccaaaacaatgttaccatcatggctaacctgaaggttaaagatgcaactcagatcactcaggggccccgcagcacaatcgagaagaaaggttccagggtgaccttcacgtgccaggcctcctttgacccctccttgcagcccagcatcacctggcgtggggacggtcgagacctccaggagcttggggacagtgacaagtacttcatagaggatgggcgcctggtcatccacagcctggactacagcgaccagggcaactacagctgcgtggccagtaccgaactggatgtggtggagagtagggcacagctcttggtggtggggagccctgggccggtgccacggctggtgctgtccgacctgcacctgctgacgcagagccaggtgcgcgtgtcctggagtcctgcagaagaccacaatgcccccattgagaaatatgacattgaatttgaggacaaggaaatggcgcctgaaaaatggtacagtctgggcaaggttccagggaaccagacctctaccaccctcaagctgtcgccctatgtccactacacctttagggttactgccataaacaaatatggccccggggagcccagcccggtctctgagactgtggtcacacctgaggcagccccagagaagaaccctgtggatgtgaagggggaaggaaatgagaccaccaatatggtcatcacgtggaagccgctccggtggatggactggaacgccccccaggttcagtaccgcgtgcagtggcgccctcaggggacacgagggccctggcaggagcagattgtcagcgaccccttcctggtggtgtccaacacgtccaccttcgtgccctatgagatcaaagtccaggccgtcaacagccagggcaagggaccagagccccaggtcactatcggctactctggagaggactacccccaggcaatccctgagctggaaggcattgaaatcctcaactcaagtgccgtgctggtcaagtggcggccggtggacctggcccaggtcaagggccacctccgcggatacaatgtgacgtactggagggagggcagtcagaggaagcacagcaagagacatatccacaaagaccatgtggtggtgcccgccaacaccaccagtgtcatcctcagtggcttgcggccctatagctcctaccacctggaggtgcaggcctttaacgggcgaggatcggggcccgccagcgagttcaccttcagcaccccagagggagtgcctggccaccccgaggcgttgcacctggagtgccagtcgaacaccagcctgctgctgcgctggcagcccccactcagccacaacggcgtgctcaccggctacgtgctctcctaccaccccctggatgaggggggcaaggggcaactgtccttcaaccttcgggaccccgaacttcggacacacaacctgaccgatctcagcccccacctgcggtaccgcttccagcttcaggccaccaccaaagagggccctggtgaagccatcgtacgggaaggaggcactatggccttgtctgggatctcagattttggcaacatctcagccacagcgggtgaaaactacagtgtcgtctcctgggtccccaaggagggccagtgcaacttcaggttccatatcttgttcaaagccttgggagaagagaagggtggggcttccctttcgccacagtatgtcagctacaaccagagctcctacacgcagtgggacctgcagcctgacactgactacgagatccacttgtttaaggagaggatgttccggcaccaaatggctgtgaagaccaatggcacaggccgcgtgaggctccctcctgctggcttcgccactgagggctggttcatcggctttgtgagtgccatcatcctcctgctcctcgtcctgctcatcctctgcttcatcaagcgcagcaagggcggcaaatactcagtgaaggataaggaggacacccaggtggactctgaggcccgaccgatgaaagatgagaccttcggcgagtacagtgacaacgaggagaaggcctttggcagcagccagccatcgctcaacggggacatcaagcccctgggcagtgacgacagcctggccgattatgggggcagcgtggatgttcagttcaacgaggatggttcgttcattggccagtacagtggcaagaaggagaaggaggcggcagggggcaatgacagctcaggggccacttcccccatcaaccctgccgtggccctagaatagtggagtccaggacaggagatgctgtgcccctggccttgggatccaggcccctccctctccagcaggcccatgggaggctggagttggggcagaggagaacttgctgcctcggatccccttcctaccacccggtccccactttattgccaaaacccagctgcaccccttcctgggcacacgctgctctgccccagcttgggcagatctcccacatgccaggggcctttgggtgctgttttgccagcccatttgggcagagaggctgtggtttgggggagaagaagtaggggtggcccgaaagggtctccgaaatgctgtctttcttgctccctgactgggggcagacatggtggggtctcctcaggaccagggttggcaccttccccctcccccagccactccccagccagcctggctgggactgggaacagaactcggtgtccccaccatctgctgtcttttctttgccatctctgctccaaccgggatgggagccgggcaaactggccgcgggggcaggggaggccatctggagagcccagagtccccccactcccagcatcgcactctggcagcaccgcctcttcccgccgcccagcccaccccatggccggctttcaggagctccatacacacgctgccttcggtacccaccacacaacatccaagtggcctccgtcactacctggctgcggggcgggcacacctcc

SEQ ID NO: 15564 - DNA, 5027 bp, Homo sapiens
  source 1..5027: mol_type = unassigned DNA
tgcccccactcccaactcccgccccaagccgcccaccagcccccttcccctccggccggagcctgaaccgagcccggctggctgtgctgcgcggtgccgccgggaaagatggtcgtggcgctgcggtacgtgtggcctctcctcctctgcagcccctgcctgcttatccagatccccgaggaatatgaaggacaccatgtgatggagccacctgtcatcacggaacagtctccacggcgcctggttgtcttccccacagatgacatcagcctcaagtgtgaggccagtggcaagcccgaagtgcagttccgctggacgagggatggtgtccacttcaaacccaaggaagagctgggtgtgaccgtgtaccagtcgccccactctggctccttcaccatcacgggcaacaacagcaactttgctcagaggttccagggcatctaccgctgctttgccagcaataagctgggcaccgccatgtcccatgagatccggctcatggccgagggtgcccccaagtggccaaaggagacagtgaagcccgtggaggtggaggaaggggagtcagtggttctgccttgcaaccctcccccaagtgcagagcctctccggatctactggatgaacagcaagatcttgcacatcaagcaggacgagcgggtgacgatgggccagaacggcaacctctactttgccaatgtgctcacctccgacaaccactcagactacatctgccacgcccacttcccaggcaccaggaccatcattcagaaggaacccattgacctccgggtcaaggccaccaacagcatgattgacaggaagccgcgcctgctcttccccaccaactccagcagccacctggtggccttgcaggggcagccattggtcctggagtgcatcgccgagggctttcccacgcccaccatcaaatggctgcgccccagtggccccatgccagccgaccgtgtcacctaccagaaccacaacaagaccctgcagctgctgaaagtgggcgaggaggatgatggcgagtaccgctgcctggccgagaactcactgggcagtgcccggcatgcgtactatgtcaccgtggaggctgccccgtactggctgcacaagccccagagccatctatatgggccaggagagactgcccgcctggactgccaagtccagggcaggccccaaccagaggtcacctggagaatcaacgggatccctgtggaggagctggccaaagaccagaagtaccggattcagcgtggcgccctgatcctgagcaacgtgcagcccagtgacacaatggtgacccaatgtgaggcccgcaaccggcacgggctcttgctggccaatgcctacatctacgttgtccagctgccagccaagatcctgactgcggacaatcagacgtacatggctgtccagggcagcactgcctaccttctgtgcaaggccttcggagcgcctgtgcccagtgttcagtggctggacgaggatgggacaacagtgcttcaggacgaacgcttcttcccctatgccaatgggaccctgggcattcgagacctccaggccaatgacaccggacgctacttctgcctggctgccaatgaccaaaacaatgttaccatcatggctaacctgaaggttaaagatgcaactcagatcactcaggggccccgcagcacaatcgagaagaaaggttccagggtgaccttcacgtgccaggcctcctttgacccctccttgcagcccagcatcacctggcgtggggacggtcgagacctccaggagcttggggacagtgacaagtacttcatagaggatgggcgcctggtcatccacagcctggactacagcgaccagggcaactacagctgcgtggccagtaccgaactggatgtggtggagagtagggcacagctcttggtggtggggagccctgggccggtgccacggctggtgctgtccgacctgcacctgctgacgcagagccaggtgcgcgtgtcctggagtcctgcagaagaccacaatgcccccattgagaaatatgacattgaatttgaggacaaggaaatggcgcctgaaaaatggtacagtctgggcaaggttccagggaaccagacctctaccaccctcaagctgtcgccctatgtccactacacctttagggttactgccataaacaaatatggccccggggagcccagcccggtctctgagactgtggtcacacctgaggcagccccagagaagaaccctgtggatgtgaagggggaaggaaatgagaccaccaatatggtcatcacgtggaagccgctccggtggatggactggaacgccccccaggttcagtaccgcgtgcagtggcgccctcaggggacacgagggccctggcaggagcagattgtcagcgaccccttcctggtggtgtccaacacgtccaccttcgtgccctatgagatcaaagtccaggccgtcaacagccagggcaagggaccagagccccaggtcactatcggctactctggagaggactacccccaggcaatccctgagctggaaggcattgaaatcctcaactcaagtgccgtgctggtcaagtggcggccggtggacctggcccaggtcaagggccacctccgcggatacaatgtgacgtactggagggagggcagtcagaggaagcacagcaagagacatatccacaaagaccatgtggtggtgcccgccaacaccaccagtgtcatcctcagtggcttgcggccctatagctcctaccacctggaggtgcaggcctttaacgggcgaggatcggggcccgccagcgagttcaccttcagcaccccagagggagtgcctggccaccccgaggcgttgcacctggagtgccagtcgaacaccagcctgctgctgcgctggcagcccccactcagccacaacggcgtgctcaccggctacgtgctctcctaccaccccctggatgaggggggcaaggggcaactgtccttcaaccttcgggaccccgaacttcggacacacaacctgaccgatctcagcccccacctgcggtaccgcttccagcttcaggccaccaccaaagagggccctggtgaagccatcgtacgggaaggaggcactatggccttgtctgggatctcagattttggcaacatctcagccacagcgggtgaaaactacagtgtcgtctcctgggtccccaaggagggccagtgcaacttcaggttccatatcttgttcaaagccttgggagaagagaagggtggggcttccctttcgccacagtatgtcagctacaaccagagctcctacacgcagtgggacctgcagcctgacactgactacgagatccacttgtttaaggagaggatgttccggcaccaaatggctgtgaagaccaatggcacaggccgcgtgaggctccctcctgctggcttcgccactgagggctggttcatcggctttgtgagtgccatcatcctcctgctcctcgtcctgctcatcctctgcttcatcaagcgcagcaagggcggcaaatactcagtgaaggataaggaggacacccaggtggactctgaggcccgaccgatgaaagatgagaccttcggcgagtacaggtccctggagagtgacaacgaggagaaggcctttggcagcagccagccatcgctcaacggggacatcaagcccctgggcagtgacgacagcctggccgattatgggggcagcgtggatgttcagttcaacgaggatggttcgttcattggccagtacagtggcaagaaggagaaggaggcggcagggggcaatgacagctcaggggccacttcccccatcaaccctgccgtggccctagaatagtggagtccaggacaggagatgctgtgcccctggccttgggatccaggcccctccctctccagcaggcccatgggaggctggagttggggcagaggagaacttgctgcctcggatccccttcctaccacccggtccccactttattgccaaaacccagctgcaccccttcctgggcacacgctgctctgccccagcttgggcagatctcccacatgccaggggcctttgggtgctgttttgccagcccatttgggcagagaggctgtggtttgggggagaagaagtaggggtggcccgaaagggtctccgaaatgctgtctttcttgctccctgactgggggcagacatggtggggtctcctcaggaccagggttggcaccttccccctcccccagccactccccagccagcctggctgggactgggaacagaactcggtgtccccaccatctgctgtcttttctttgccatctctgctccaaccgggatgggagccgggcaaactggccgcgggggcaggggaggccatctggagagcccagagtccccccactcccagcatcgcactctggcagcaccgcctcttcccgccgcccagcccaccccatggccggctttcaggagctccatacacacgctgccttcggtacccaccacacaacatccaagtggcctccgtcactacctggctgcggggcgggcacacctcctcccactgcccactggccggcctcttccagccgcccccaccccccaggaccccttagcagccctgccctccctatcgtctgaacagttgtcttcctcagcctcctcccgcccccaccttgggaatgtaaatacaccgtgactttgaaagtttgtacccctgtccttccctttacgccactagtgtgtaggcagatgtctgagtccctaggtggtttctaggattgatagcaattagctttgatgaacccatcccaggaaaaataaaaacagacaaaaaaaaaggaaagattggttctcccagcactgctcagcagccacagcctccctgtatgcctgtgcttggtctactgataagccctctacaaaaaaacaaaagtatatatatatatgtacataatatcagaattataacaggcaaataaaacctgaaaatc

SEQ ID NO: 15565 - DNA, 5113 bp, Homo sapiens
  source 1..5113: mol_type = unassigned DNA
tcgcagacgcgctcgggcggcgggtccgaggccggcgtgcgcggaggctgggcgggcagcccgagcggtggccgcagcgcagtgcccccactcccaactcccgccccaagccgcccaccagcccccttcccctccggccggagcctgaaccgagcccggctggctgtgctgcgcggtgccgccgggaaagatggtcgtggcgctgcggtacgtgtggcctctcctcctctgcagcccctgcctgcttatccagatccccgaggaatatgaaggacaccatgtgatggagccacctgtcatcacggaacagtctccacggcgcctggttgtcttccccacagatgacatcagcctcaagtgtgaggccagtggcaagcccgaagtgcagttccgctggacgagggatggtgtccacttcaaacccaaggaagagctgggtgtgaccgtgtaccagtcgccccactctggctccttcaccatcacgggcaacaacagcaactttgctcagaggttccagggcatctaccgctgctttgccagcaataagctgggcaccgccatgtcccatgagatccggctcatggccgagggtgcccccaagtggccaaaggagacagtgaagcccgtggaggtggaggaaggggagtcagtggttctgccttgcaaccctcccccaagtgcagagcctctccggatctactggatgaacagcaagatcttgcacatcaagcaggacgagcgggtgacgatgggccagaacggcaacctctactttgccaatgtgctcacctccgacaaccactcagactacatctgccacgcccacttcccaggcaccaggaccatcattcagaaggaacccattgacctccgggtcaaggccaccaacagcatgattgacaggaagccgcgcctgctcttccccaccaactccagcagccacctggtggccttgcaggggcagccattggtcctggagtgcatcgccgagggctttcccacgcccaccatcaaatggctgcgccccagtggccccatgccagccgaccgtgtcacctaccagaaccacaacaagaccctgcagctgctgaaagtgggcgaggaggatgatggcgagtaccgctgcctggccgagaactcactgggcagtgcccggcatgcgtactatgtcaccgtggaggctgccccgtactggctgcacaagccccagagccatctatatgggccaggagagactgcccgcctggactgccaagtccagggcaggccccaaccagaggtcacctggagaatcaacgggatccctgtggaggagctggccaaagaccagaagtaccggattcagcgtggcgccctgatcctgagcaacgtgcagcccagtgacacaatggtgacccaatgtgaggcccgcaaccggcacgggctcttgctggccaatgcctacatctacgttgtccagctgccagccaagatcctgactgcggacaatcagacgtacatggctgtccagggcagcactgcctaccttctgtgcaaggccttcggagcgcctgtgcccagtgttcagtggctggacgaggatgggacaacagtgcttcaggacgaacgcttcttcccctatgccaatgggaccctgggcattcgagacctccaggccaatgacaccggacgctacttctgcctggctgccaatgaccaaaacaatgttaccatcatggctaacctgaaggttaaagatgcaactcagatcactcaggggccccgcagcacaatcgagaagaaaggttccagggtgaccttcacgtgccaggcctcctttgacccctccttgcagcccagcatcacctggcgtggggacggtcgagacctccaggagcttggggacagtgacaagtacttcatagaggatgggcgcctggtcatccacagcctggactacagcgaccagggcaactacagctgcgtggccagtaccgaactggatgtggtggagagtagggcacagctcttggtggtggggagccctgggccggtgccacggctggtgctgtccgacctgcacctgctgacgcagagccaggtgcgcgtgtcctggagtcctgcagaagaccacaatgcccccattgagaaatatgacattgaatttgaggacaaggaaatggcgcctgaaaaatggtacagtctgggcaaggttccagggaaccagacctctaccaccctcaagctgtcgccctatgtccactacacctttagggttactgccataaacaaatatggccccggggagcccagcccggtctctgagactgtggtcacacctgaggcagccccagagaagaaccctgtggatgtgaagggggaaggaaatgagaccaccaatatggtcatcacgtggaagccgctccggtggatggactggaacgccccccaggttcagtaccgcgtgcagtggcgccctcaggggacacgagggccctggcaggagcagattgtcagcgaccccttcctggtggtgtccaacacgtccaccttcgtgccctatgagatcaaagtccaggccgtcaacagccagggcaagggaccagagccccaggtcactatcggctactctggagaggactacccccaggcaatccctgagctggaaggcattgaaatcctcaactcaagtgccgtgctggtcaagtggcggccggtggacctggcccaggtcaagggccacctccgcggatacaatgtgacgtactggagggagggcagtcagaggaagcacagcaagagacatatccacaaagaccatgtggtggtgcccgccaacaccaccagtgtcatcctcagtggcttgcggccctatagctcctaccacctggaggtgcaggcctttaacgggcgaggatcggggcccgccagcgagttcaccttcagcaccccagagggagtgcctggccaccccgaggcgttgcacctggagtgccagtcgaacaccagcctgctgctgcgctggcagcccccactcagccacaacggcgtgctcaccggctacgtgctctcctaccaccccctggatgaggggggcaaggggcaactgtccttcaaccttcgggaccccgaacttcggacacacaacctgaccgatctcagcccccacctgcggtaccgcttccagcttcaggccaccaccaaagagggccctggtgaagccatcgtacgggaaggaggcactatggccttgtctgggatctcagattttggcaacatctcagccacagcgggtgaaaactacagtgtcgtctcctgggtccccaaggagggccagtgcaacttcaggttccatatcttgttcaaagccttgggagaagagaagggtggggcttccctttcgccacagtatgtcagctacaaccagagctcctacacgcagtgggacctgcagcctgacactgactacgagatccacttgtttaaggagaggatgttccggcaccaaatggctgtgaagaccaatggcacaggccgcgtgaggctccctcctgctggcttcgccactgagggctggttcatcggctttgtgagtgccatcatcctcctgctcctcgtcctgctcatcctctgcttcatcaagcgcagcaagggcggcaaatactcagtgaaggataaggaggacacccaggtggactctgaggcccgaccgatgaaagatgagaccttcggcgagtacaggtccctggagagtgacaacgaggagaaggcctttggcagcagccagccatcgctcaacggggacatcaagcccctgggcagtgacgacagcctggccgattatgggggcagcgtggatgttcagttcaacgaggatggttcgttcattggccagtacagtggcaagaaggagaaggaggcggcagggggcaatgacagctcaggggccacttcccccatcaaccctgccgtggccctagaatagtggagtccaggacaggagatgctgtgcccctggccttgggatccaggcccctccctctccagcaggcccatgggaggctggagttggggcagaggagaacttgctgcctcggatccccttcctaccacccggtccccactttattgccaaaacccagctgcaccccttcctgggcacacgctgctctgccccagcttgggcagatctcccacatgccaggggcctttgggtgctgttttgccagcccatttgggcagagaggctgtggtttgggggagaagaagtaggggtggcccgaaagggtctccgaaatgctgtctttcttgctccctgactgggggcagacatggtggggtctcctcaggaccagggttggcaccttccccctcccccagccactccccagccagcctggctgggactgggaacagaactcggtgtccccaccatctgctgtcttttctttgccatctctgctccaaccgggatgggagccgggcaaactggccgcgggggcaggggaggccatctggagagcccagagtccccccactcccagcatcgcactctggcagcaccgcctcttcccgccgcccagcccaccccatggccggctttcaggagctccatacacacgctgccttcggtacccaccacacaacatccaagtggcctccgtcactacctggctgcggggcgggcacacctcctcccactgcccactggccggcctcttccagccgcccccaccccccaggaccccttagcagccctgccctccctatcgtctgaacagttgtcttcctcagcctcctcccgcccccaccttgggaatgtaaatacaccgtgactttgaaagtttgtacccctgtccttccctttacgccactagtgtgtaggcagatgtctgagtccctaggtggtttctaggattgatagcaattagctttgatgaacccatcccaggaaaaataaaaacagacaaaaaaaaaggaaagattggttctcccagcactgctcagcagccacagcctccctgtatgcctgtgcttggtctactgataagccctctacaaaaaaacaaaagtatatatatatatgtacataatatcagaattataacaggcaaataaaacctgaaaatcaaga

SEQ ID NO: 15566 - DNA, 655 bp, Homo sapiens
  source 1..655: mol_type = unassigned DNA
aagagcccgggcttacccagatgttagtcactaacgtccttccgttctctcgtctctcttcccccacccttcccttcccttctcccctctcccagtgcccccactcccaactcccgccccaagccgcccaccagcccccttcccctccggccggagcctgaaccgagcccggctggctgtgctgcgcggtgccgccgggaaagatggtcgtggcgctgcggtacgtgtggcctctcctcctctgcagcccctgcctgcttatccagatccccgaggaatatgaaggacaccatgtgatggagccacctgtcatcacggaacagtctccacggcgcctggttgtcttccccacagatgacatcagcctcaagtgtgaggccagtggcaagcccgaagtgcagttccgctggacgagggatggtgtccacttcaaacccaaggaagagctgggtgtgaccgtgtaccagtcgccccactctggctccttcaccatcacgggcaacaacagcaactttgctcagaggttccagggcatctaccgctgctttgccagcaataagctgggcaccgccatgtcccatgagatccggctcatggccgagggtgcccccaagtggccaaaggagacagtgaagcccgtggaggtggaggaagg

SEQ ID NO: 15567 - DNA, 637 bp, Homo sapiens
  source 1..637: mol_type = unassigned DNA
gagtgcaacccctcccagagaagacacaccacagaaataccagctcacatacagctcactccctgcttgcagatccacaaccacacacatgcccacggacacctgcacatgcagacacatacggggatgtgcatgccatgcacaggggagctgatggggcaacaagttggtgctgggaaggcagctggcaggaaaggtgcagacagagagtagagagggaataaaaggcaacctagaggcccagccagggctatctcttccagatttctccctccaagtgcccccactcccaactcccgccccaagccgcccaccagcccccttcccctccggccggagcctgaaccgagcccggctggctgtgctgcgcggtgccgccgggaaagatggtcgtggcgctgcggtacgtgtggcctctcctcctctgcagcccctgcctgcttatccagatccccgaggaatatgaaggacaccatgtgatggagccacctgtcatcacggaacagtctccacggcgcctggttgtcttccccacagatgacatcagcctcaagtgtgaggccagtggcaagcccgaagtgcagttccgctggacgagggatggtgtccacttcaaacccaaggaagagctgggtgt

SEQ ID NO: 15568 - DNA, 5021 bp, Homo sapiens
  source 1..5021: mol_type = unassigned DNA
tgcccccactcccaactcccgccccaagccgcccaccagcccccttcccctccggccggagcctgaaccgagcccggctggctgtgctgcgcggtgccgccgggaaagatggtcgtggcgctgcggtacgtgtggcctctcctcctctgcagcccctgcctgcttatccagatccccgaggaatcctttcctgggcacagggtggtgatggagccacctgtcatcacggaacagtctccacggcgcctggttgtcttccccacagatgacatcagcctcaagtgtgaggccagtggcaagcccgaagtgcagttccgctggacgagggatggtgtccacttcaaacccaaggaagagctgggtgtgaccgtgtaccagtcgccccactctggctccttcaccatcacgggcaacaacagcaactttgctcagaggttccagggcatctaccgctgctttgccagcaataagctgggcaccgccatgtcccatgagatccggctcatggccgagggtgcccccaagtggccaaaggagacagtgaagcccgtggaggtggaggaaggggagtcagtggttctgccttgcaaccctcccccaagtgcagagcctctccggatctactggatgaacagcaagatcttgcacatcaagcaggacgagcgggtgacgatgggccagaacggcaacctctactttgccaatgtgctcacctccgacaaccactcagactacatctgccacgcccacttcccaggcaccaggaccatcattcagaaggaacccattgacctccgggtcaaggccaccaacagcatgattgacaggaagccgcgcctgctcttccccaccaactccagcagccacctggtggccttgcaggggcagccattggtcctggagtgcatcgccgagggctttcccacgcccaccatcaaatggctgcgccccagtggccccatgccagccgaccgtgtcacctaccagaaccacaacaagaccctgcagctgctgaaagtgggcgaggaggatgatggcgagtaccgctgcctggccgagaactcactgggcagtgcccggcatgcgtactatgtcaccgtggaggctgccccgtactggctgcacaagccccagagccatctatatgggccaggagagactgcccgcctggactgccaagtccagggcaggccccaaccagaggtcacctggagaatcaacgggatccctgtggaggagctggccaaagaccagaagtaccggattcagcgtggcgccctgatcctgagcaacgtgcagcccagtgacacaatggtgacccaatgtgaggcccgcaaccggcacgggctcttgctggccaatgcctacatctacgttgtccagctgccagccaagatcctgactgcggacaatcagacgtacatggctgtccagggcagcactgcctaccttctgtgcaaggccttcggagcgcctgtgcccagtgttcagtggctggacgaggatgggacaacagtgcttcaggacgaacgcttcttcccctatgccaatgggaccctgggcattcgagacctccaggccaatgacaccggacgctacttctgcctggctgccaatgaccaaaacaatgttaccatcatggctaacctgaaggttaaagatgcaactcagatcactcaggggccccgcagcacaatcgagaagaaaggttccagggtgaccttcacgtgccaggcctcctttgacccctccttgcagcccagcatcacctggcgtggggacggtcgagacctccaggagcttggggacagtgacaagtacttcatagaggatgggcgcctggtcatccacagcctggactacagcgaccagggcaactacagctgcgtggccagtaccgaactggatgtggtggagagtagggcacagctcttggtggtggggagccctgggccggtgccacggctggtgctgtccgacctgcacctgctgacgcagagccaggtgcgcgtgtcctggagtcctgcagaagaccacaatgcccccattgagaaatatgacattgaatttgaggacaaggaaatggcgcctgaaaaatggtacagtctgggcaaggttccagggaaccagacctctaccaccctcaagctgtcgccctatgtccactacacctttagggttactgccataaacaaatatggccccggggagcccagcccggtctctgagactgtggtcacacctgaggcagccccagagaagaaccctgtggatgtgaagggggaaggaaatgagaccaccaatatggtcatcacgtggaagccgctccggtggatggactggaacgccccccaggttcagtaccgcgtgcagtggcgccctcaggggacacgagggccctggcaggagcagattgtcagcgaccccttcctggtggtgtccaacacgtccaccttcgtgccctatgagatcaaagtccaggccgtcaacagccagggcaagggaccagagccccaggtcactatcggctactctggagaggactacccccaggcaatccctgagctggaaggcattgaaatcctcaactcaagtgccgtgctggtcaagtggcggccggtggacctggcccaggtcaagggccacctccgcggatacaatgtgacgtactggagggagggcagtcagaggaagcacagcaagagacatatccacaaagaccatgtggtggtgcccgccaacaccaccagtgtcatcctcagtggcttgcggccctatagctcctaccacctggaggtgcaggcctttaacgggcgaggatcggggcccgccagcgagttcaccttcagcaccccagagggagtgcctggccaccccgaggcgttgcacctggagtgccagtcgaacaccagcctgctgctgcgctggcagcccccactcagccacaacggcgtgctcaccggctacgtgctctcctaccaccccctggatgaggggggcaaggggcaactgtccttcaaccttcgggaccccgaacttcggacacacaacctgaccgatctcagcccccacctgcggtaccgcttccagcttcaggccaccaccaaagagggccctggtgaagccatcgtacgggaaggaggcactatggccttgtctgggatctcagattttggcaacatctcagccacagcgggtgaaaactacagtgtcgtctcctgggtccccaaggagggccagtgcaacttcaggttccatatcttgttcaaagccttgggagaagagaagggtggggcttccctttcgccacagtatgtcagctacaaccagagctcctacacgcagtgggacctgcagcctgacactgactacgagatccacttgtttaaggagaggatgttccggcaccaaatggctgtgaagaccaatggcacaggccgcgtgaggctccctcctgctggcttcgccactgagggctggttcatcggctttgtgagtgccatcatcctcctgctcctcgtcctgctcatcctctgcttcatcaagcgcagcaagggcggcaaatactcagtgaaggataaggaggacacccaggtggactctgaggcccgaccgatgaaagatgagaccttcggcgagtacagtgacaacgaggagaaggcctttggcagcagccagccatcgctcaacggggacatcaagcccctgggcagtgacgacagcctggccgattatgggggcagcgtggatgttcagttcaacgaggatggttcgttcattggccagtacagtggcaagaaggagaaggaggcggcagggggcaatgacagctcaggggccacttcccccatcaaccctgccgtggccctagaatagtggagtccaggacaggagatgctgtgcccctggccttgggatccaggcccctccctctccagcaggcccatgggaggctggagttggggcagaggagaacttgctgcctcggatccccttcctaccacccggtccccactttattgccaaaacccagctgcaccccttcctgggcacacgctgctctgccccagcttgggcagatctcccacatgccaggggcctttgggtgctgttttgccagcccatttgggcagagaggctgtggtttgggggagaagaagtaggggtggcccgaaagggtctccgaaatgctgtctttcttgctccctgactgggggcagacatggtggggtctcctcaggaccagggttggcaccttccccctcccccagccactccccagccagcctggctgggactgggaacagaactcggtgtccccaccatctgctgtcttttctttgccatctctgctccaaccgggatgggagccgggcaaactggccgcgggggcaggggaggccatctggagagcccagagtccccccactcccagcatcgcactctggcagcaccgcctcttcccgccgcccagcccaccccatggccggctttcaggagctccatacacacgctgccttcggtacccaccacacaacatccaagtggcctccgtcactacctggctgcggggcgggcacacctcctcccactgcccactggccggcctcttccagccgcccccaccccccaggaccccttagcagccctgccctccctatcgtctgaacagttgtcttcctcagcctcctcccgcccccaccttgggaatgtaaatacaccgtgactttgaaagtttgtacccctgtccttccctttacgccactagtgtgtaggcagatgtctgagtccctaggtggtttctaggattgatagcaattagctttgatgaacccatcccaggaaaaataaaaacagacaaaaaaaaaggaaagattggttctcccagcactgctcagcagccacagcctccctgtatgcctgtgcttggtctactgataagccctctacaaaaaaacaaaagtatatatatatatgtacataatatcagaattataacaggcaaataaaacctgaaaatc

SEQ ID NO: 15569 - DNA, 1537 bp, Homo sapiens
  source 1..1537: mol_type = unassigned DNA
ccggcgtgcgcggaggctgggcgggcagcccgagcggtggccgcagcgcagtgcccccactcccaactcccgccccaagccgcccaccagcccccttcccctccggccggagcctgaaccgagcccggctggctgtgctgcgcggtgccgccgggaaagatggtcgtggcgctgcggtacgtgtggcctctcctcctctgcagcccctgcctgcttatccagatccccgaggaattgatggagccacctgtcatcacggaacagtctccacggcgcctggttgtcttccccacagatgacatcagcctcaagtgtgaggccagtggcaagcccgaagtgcagttccgctggacgagggatggtgtccacttcaaacccaaggaagagctgggtgtgaccgtgtaccagtcgccccactctggctccttcaccatcacgggcaacaacagcaactttgctcagaggttccagggcatctaccgctgctttgccagcaataagctgggcaccgccatgtcccatgagatccggctcatggccgagggtgcccccaagtggccaaaggagacagtgaagcccgtggaggtggaggaaggggagtcagtggttctgccttgcaaccctcccccaagtgcagagcctctccggatctactggatgaacagcaagatcttgcacatcaagcaggacgagcgggtgacgatgggccagaacggcaacctctactttgccaatgtgctcacctccgacaaccactcagactacatctgccacgcccacttcccaggcaccaggaccatcattcagaaggaacccattgacctccgggtcaaggccaccaacagcatgattgacaggaagccgcgcctgctcttccccaccaactccagcagccacctggtggccttgcaggggcagccattggtcctggagtgcatcgccgagggctttcccacgcccaccatcaaatggctgcgccccagtggccccatgccagccgaccgtgtcacctaccagaaccacaacaagaccctgcagctgctgaaagtgggcgaggaggatgatggcgagtaccgctgcctggccgagaactcactgggcagtgcccggcatgcgtactatgtcaccgtggaggctgccccgtactggctgcacaagccccaccccccaggaccccttagcagccctgccctccctatcgtctgaacagttgtcttcctcagcctcctcccgcccccaccttgggaatgtaaatacaccgtgactttgaaagtttgtacccctgtccttccctttacgccactagtgtgtaggcagatgtctgagtccctaggtggtttctaggattgatagcaattagctttgatgaacccatcccaggaaaaataaaaacagacaaaaaaaaaggaaagattggttctcccagcactgctcagcagccacagcctccctgtatgcctgtgcttggtctactgataagccctctacaaaaaaacaaaagtatatatatatatgtacataatatcagaattataac

SEQ ID NO: 15570 - DNA, 5033 bp, Homo sapiens
  source 1..5033: mol_type = unassigned DNA
tgcccccactcccaactcccgccccaagccgcccaccagcccccttcccctccggccggagcctgaaccgagcccggctggctgtgctgcgcggtgccgccgggaaagatggtcgtggcgctgcggtacgtgtggcctctcctcctctgcagcccctgcctgcttatccagatccccgaggaatcctttcctgggcacagggtggtgatggagccacctgtcatcacggaacagtctccacggcgcctggttgtcttccccacagatgacatcagcctcaagtgtgaggccagtggcaagcccgaagtgcagttccgctggacgagggatggtgtccacttcaaacccaaggaagagctgggtgtgaccgtgtaccagtcgccccactctggctccttcaccatcacgggcaacaacagcaactttgctcagaggttccagggcatctaccgctgctttgccagcaataagctgggcaccgccatgtcccatgagatccggctcatggccgagggtgcccccaagtggccaaaggagacagtgaagcccgtggaggtggaggaaggggagtcagtggttctgccttgcaaccctcccccaagtgcagagcctctccggatctactggatgaacagcaagatcttgcacatcaagcaggacgagcgggtgacgatgggccagaacggcaacctctactttgccaatgtgctcacctccgacaaccactcagactacatctgccacgcccacttcccaggcaccaggaccatcattcagaaggaacccattgacctccgggtcaaggccaccaacagcatgattgacaggaagccgcgcctgctcttccccaccaactccagcagccacctggtggccttgcaggggcagccattggtcctggagtgcatcgccgagggctttcccacgcccaccatcaaatggctgcgccccagtggccccatgccagccgaccgtgtcacctaccagaaccacaacaagaccctgcagctgctgaaagtgggcgaggaggatgatggcgagtaccgctgcctggccgagaactcactgggcagtgcccggcatgcgtactatgtcaccgtggaggctgccccgtactggctgcacaagccccagagccatctatatgggccaggagagactgcccgcctggactgccaagtccagggcaggccccaaccagaggtcacctggagaatcaacgggatccctgtggaggagctggccaaagaccagaagtaccggattcagcgtggcgccctgatcctgagcaacgtgcagcccagtgacacaatggtgacccaatgtgaggcccgcaaccggcacgggctcttgctggccaatgcctacatctacgttgtccagctgccagccaagatcctgactgcggacaatcagacgtacatggctgtccagggcagcactgcctaccttctgtgcaaggccttcggagcgcctgtgcccagtgttcagtggctggacgaggatgggacaacagtgcttcaggacgaacgcttcttcccctatgccaatgggaccctgggcattcgagacctccaggccaatgacaccggacgctacttctgcctggctgccaatgaccaaaacaatgttaccatcatggctaacctgaaggttaaagatgcaactcagatcactcaggggccccgcagcacaatcgagaagaaaggttccagggtgaccttcacgtgccaggcctcctttgacccctccttgcagcccagcatcacctggcgtggggacggtcgagacctccaggagcttggggacagtgacaagtacttcatagaggatgggcgcctggtcatccacagcctggactacagcgaccagggcaactacagctgcgtggccagtaccgaactggatgtggtggagagtagggcacagctcttggtggtggggagccctgggccggtgccacggctggtgctgtccgacctgcacctgctgacgcagagccaggtgcgcgtgtcctggagtcctgcagaagaccacaatgcccccattgagaaatatgacattgaatttgaggacaaggaaatggcgcctgaaaaatggtacagtctgggcaaggttccagggaaccagacctctaccaccctcaagctgtcgccctatgtccactacacctttagggttactgccataaacaaatatggccccggggagcccagcccggtctctgagactgtggtcacacctgaggcagccccagagaagaaccctgtggatgtgaagggggaaggaaatgagaccaccaatatggtcatcacgtggaagccgctccggtggatggactggaacgccccccaggttcagtaccgcgtgcagtggcgccctcaggggacacgagggccctggcaggagcagattgtcagcgaccccttcctggtggtgtccaacacgtccaccttcgtgccctatgagatcaaagtccaggccgtcaacagccagggcaagggaccagagccccaggtcactatcggctactctggagaggactacccccaggcaatccctgagctggaaggcattgaaatcctcaactcaagtgccgtgctggtcaagtggcggccggtggacctggcccaggtcaagggccacctccgcggatacaatgtgacgtactggagggagggcagtcagaggaagcacagcaagagacatatccacaaagaccatgtggtggtgcccgccaacaccaccagtgtcatcctcagtggcttgcggccctatagctcctaccacctggaggtgcaggcctttaacgggcgaggatcggggcccgccagcgagttcaccttcagcaccccagagggagtgcctggccaccccgaggcgttgcacctggagtgccagtcgaacaccagcctgctgctgcgctggcagcccccactcagccacaacggcgtgctcaccggctacgtgctctcctaccaccccctggatgaggggggcaaggggcaactgtccttcaaccttcgggaccccgaacttcggacacacaacctgaccgatctcagcccccacctgcggtaccgcttccagcttcaggccaccaccaaagagggccctggtgaagccatcgtacgggaaggaggcactatggccttgtctgggatctcagattttggcaacatctcagccacagcgggtgaaaactacagtgtcgtctcctgggtccccaaggagggccagtgcaacttcaggttccatatcttgttcaaagccttgggagaagagaagggtggggcttccctttcgccacagtatgtcagctacaaccagagctcctacacgcagtgggacctgcagcctgacactgactacgagatccacttgtttaaggagaggatgttccggcaccaaatggctgtgaagaccaatggcacaggccgcgtgaggctccctcctgctggcttcgccactgagggctggttcatcggctttgtgagtgccatcatcctcctgctcctcgtcctgctcatcctctgcttcatcaagcgcagcaagggcggcaaatactcagtgaaggataaggaggacacccaggtggactctgaggcccgaccgatgaaagatgagaccttcggcgagtacaggtccctggagagtgacaacgaggagaaggcctttggcagcagccagccatcgctcaacggggacatcaagcccctgggcagtgacgacagcctggccgattatgggggcagcgtggatgttcagttcaacgaggatggttcgttcattggccagtacagtggcaagaaggagaaggaggcggcagggggcaatgacagctcaggggccacttcccccatcaaccctgccgtggccctagaatagtggagtccaggacaggagatgctgtgcccctggccttgggatccaggcccctccctctccagcaggcccatgggaggctggagttggggcagaggagaacttgctgcctcggatccccttcctaccacccggtccccactttattgccaaaacccagctgcaccccttcctgggcacacgctgctctgccccagcttgggcagatctcccacatgccaggggcctttgggtgctgttttgccagcccatttgggcagagaggctgtggtttgggggagaagaagtaggggtggcccgaaagggtctccgaaatgctgtctttcttgctccctgactgggggcagacatggtggggtctcctcaggaccagggttggcaccttccccctcccccagccactccccagccagcctggctgggactgggaacagaactcggtgtccccaccatctgctgtcttttctttgccatctctgctccaaccgggatgggagccgggcaaactggccgcgggggcaggggaggccatctggagagcccagagtccccccactcccagcatcgcactctggcagcaccgcctcttcccgccgcccagcccaccccatggccggctttcaggagctccatacacacgctgccttcggtacccaccacacaacatccaagtggcctccgtcactacctggctgcggggcgggcacacctcctcccactgcccactggccggcctcttccagccgcccccaccccccaggaccccttagcagccctgccctccctatcgtctgaacagttgtcttcctcagcctcctcccgcccccaccttgggaatgtaaatacaccgtgactttgaaagtttgtacccctgtccttccctttacgccactagtgtgtaggcagatgtctgagtccctaggtggtttctaggattgatagcaattagctttgatgaacccatcccaggaaaaataaaaacagacaaaaaaaaaggaaagattggttctcccagcactgctcagcagccacagcctccctgtatgcctgtgcttggtctactgataagccctctacaaaaaaacaaaagtatatatatatatgtacataatatcagaattataacaggcaaataaaacctgaaaatc

SEQ ID NO: 15571 - DNA, 1377 bp, Homo sapiens
  source 1..1377: mol_type = unassigned DNA
ggggagcgtgcgtaggggatggtgccagcgctgcgttatttggttggtgcctgcggacgggcccgcgggcttttcgccggtggctcccctggggcgtgcgggttcgcgtctgggaggccaagaccgctgtgtggaggtagccgcagcgccagcaccagctcatttgatatagtcatcgttggtggcggaattgtggggcttgcctctgccagagcactcatcctgcgacatccatcactttctattggtgttctggaaaaggagaaagatttagctgttcaccagactggacataacagtggtgtcatacatagtggaatttattataaacctgagtctctgaaagccaaattatgtgtacaaggtgcagccctcctctatgagtactgtcagcaaaagggaatttcctacaagcagtgtggcaagcttatagtagctgttgaacaagaagaaattcccagacttcaggccctatatgagaaaggcctccagaatggtgtcccgggcctgaggctgatccagcaggaggatataaaaaagaaggagccatattgtaggggtctaatggctattgattgtccacatactggcattgtggactatcggcaggtggctttgtcatttgcccaggatttccaagaagcaggtggctctgtcttgaccaattttgaagtaaaaggtattgaaatggctaaagaaagtccttcaagaagtatagatggaatgcaatatccaattgttataaagaatacaaagggagaggaaattcgatgtcagtatgttgtgacatgtgcaggactttactcagaccgtatttcagagttgagtggctgcactcctgatcctcgaattgtaccattccggggagattacctgcttttgaagccagaaaaatgttatcttgtaaaaggaaatatttatccggtcccagatagccggtttcctttcctaggagttcacttcacaccaaggatggatggcagtatttggctagggcctaatgcagttcttgcctttaaacgagagggttacagaccctttgacttcagtgccacagatgttatggatataattatcaatagtggcttgattaaactggcatcccagaatttttcctatggagttactgaaatgtataaagcatgttttcttggtgcaacagtgaagtatcttcaaaaattcatccctgaaattactatcagtgatatacttaggcaggtggctgtgagaggaccgagctggctatggcagcaacccatgaaagtgagtgataacaacatttattgtttcctgtggcgttgctttgctttgctattgactggtagcgcttgtagctttaaataaattgaggaagtatgagagagtaaatggaagaaa

SEQ ID NO: 15572 - DNA, 3446 bp, Homo sapiens
  source 1..3446: mol_type = unassigned DNA
agtttctcccacggccccatgtccgcatggcggtgaaggtcgaagacgcgcgacccaaagggccaggttttcagtcagcccagcgttggcgacgggcgagggcagaacacaaccaccaccctagtcccgcccggctcggggcctagcttctctactcacagcgtcggagggagggagggagggagcgagccagcgtccccgcgtctgcggcaccctggccggcccttcgccctccgacgcgcgcgcctattggccaccgcagcctctcccacatggggcgaaggcgcgccacttcattggcccccgcgtgaggggcggggctaaagagcgcgggtcctcggccgtggagggtcaagtggcttcttctgagcgctgagggaggggagcgtgcgtaggggatggtgccagcgctgcgttatttggttggtgcctgcggacgggcccgcgggcttttcgccggtggctcccctggggcgtgcgggttcgcgtctgggaggccaagaccgctgtgtggaggtagccgcagcgccagcaccagctcatttgatatagtcatcgttggtggcggaattgtggggcttgcctctgccagagcactcatcctgcgacatccatcactttctattggtgttctggaaaaggagaaagatttagctgttcaccagactggacataacagtggtgtcatacatagtggaatttattataaacctgagtctctgaaagccaaattatgtgtacaaggtgcagccctcctctatgagtactgtcagcaaaagggaatttcctacaagcagtgtggcaagcttatagtagctgttgaacaagaagaaattcccagacttcaggccctatatgagaaaggcctccagaatggtgtcccgggcctgaggctgatccagcaggaggatataaaaaagaaggagccatattgtaggggtctaatggctattgattgtccacatactggcattgtggactatcggcaggtggctttgtcatttgcccaggatttccaagaagcaggtggctctgtcttgaccaattttgaagtaaaaggtattgaaatggctaaagaaagtccttcaagaagtatagatggaatgcaatatccaattgttataaagaatacaaagggagaggaaattcgatgtcagtatgttgtgacatgtgcaggactttactcagaccgtatttcagagttgagtggctgcactcctgatcctcgaattgtaccattccggggagattacctgcttttgaagccagaaaaatgttatcttgtaaaaggaaatatttatccggtcccagatagccggtttcctttcctaggagttcacttcacaccaaggatggatggcagtatttggctagggcctaatgcagttcttgcctttaaacgagagggttacagaccctttgacttcagtgccacagatgttatggatataattatcaatagtggcttgattaaactggcatcccagaatttttcctatggagttactgaaatgtataaagcatgttttcttggtgcaacagtgaagtatcttcaaaaattcatccctgaaattactatcagtgatatacttaggggcccagctggagtaagagcccaggccctggatagagatggaaatctggtagaagattttgtatttgatgcaggagttggggatattggaaatcgcattcttcatgtgagaaatgcaccttctcctgctgctacttcttccattgcaatttctggaatgattgcagatgaagtacaacaaagatttgaattataaataatgaaaggagctaggtatgcactgtaatcttcatgtcagcaacaagaatgtactaattgcattctttaatttaaaaaatggtttttaaactttagtttttaggtcaaagataaccactgcattgttaaaatgatgtaacatagaaataataattttctacaaaaattagccaggcatggtggcgcatgcctgtaatctcagctactcaggaggctgaggcaggagaatcaattgaaccgagcagacggaggtgagctgagagctgagattgcaccactgcactccagcctgggtgacagagcaagaaaataataataataataattttcaaaatgttaggctgggggccgtggccagcactttgggaagccaaggcaggtagattgtagcccaggagtttgagaacagcctgggcaacatggcaaaaccctgtttctacacaaagttagctgggtctggtgcctctgtagttccagctcctcagtaggctgaggtgagaggatcacttgagcccaggaggtctaggctgcagtgagcttatgttcatgacactgcattccaggctggatgatagagcaagatcttgtctcaaaaaaaaaaaaaaaaaaaaaaaaaatccagcctgggcaacatagtgaatgaaaccccatctctacaaaaaatacaaaaattagctgggcatgatggtgtgtgcctgtagtcccagctacttgggggctgaggcaggaggatcgcttgagcccgggagatcaaggctacagtgagctgtgttcatgccactataccccagcctgggcaacaaagtgagtccctgactcaaaaaataaaaacaacaacaaaaaataaattccatgcttatttactttgcgaataaagaggcaaggtacagttttatctgtccgaatccctgacttttatttattttttttttcagacggagtttcactcttgttgcccaggcttgagtgcaatggtacgatcttggctcactgcaacctctgcctcccgggttccagcgattctcttgcctcaacctcctgagtagctgggattacaggcgcccaccaccatgcctggctaattttttgtatttttagtagagacggggttttgccatgttggccaggctggtctcgaattcctgacctcaggtgatccacctgcctcagcctcccaaaatgctgggattacaggtgcgagccatcatgctcagccctgaatccctgactttgttaatgacctgtccttaccaaccatgacctagagaagatttggctttttaagagttttggagaaagatggcataaaaatagattatttccttaaatcaattttttagcattacgctacctaagctcgtttggtctctcatagacaagaaaatacattatattgtaggttacattcttttaattttgaagagtcacaaaactcacattatttagagcaacaatatttgtatttggaaattaaaaattcatgatttcaagaaaatacataaaatttacatttttgagtagtttgaataagtttctatcttaattataatatttgtaggaaataacaaaacaaactcaaagcctttattatttccagtctctttgtaactgatgtggtatggtatcatcatgaaatctaaacagtggtacactg

SEQ ID NO: 15573 - DNA, 1958 bp, Homo sapiens
  source 1..1958: mol_type = unassigned DNA
gctaaagagcgcgggtcctcggccgtggagggtcaagtggcttcttctgagcgctgagggaggggagcgtgcgtaggggatggtgccagcgctgcgttatttggttggtgcctgcggacgggcccgcgggcttttcgccggtggctcccctggggcgtgcgggttcgcgtctgggaggccaagaccgctgtgtggaggtagccgcagcgccagcaccagctcatttgatatagtcatcgttggtggcggaattgtggggcttgcctctgccagagcactcatcctgcgacatccatcactttctattggtgttctggaaaaggagaaagatttagctgttcaccagactggacataacagtggtgtcatacatagtggaatttattataaacctgagtctctgaaagccaaattatgtgtacaaggtgcagccctcctctatgagtactgtcagcaaaagggaatttcctacaagcagtgtggcaagcttatagtagctgttgaacaagaagaaattcccagacttcaggccctatatgagaaaggcctccagaatggtgtcccgggcctgaggctgatccagcaggaggatataaaaaagaaggagccatattgtaggggtctaatggctattgattgtccacatactggcattgtggactatcggcaggtggctttgtcatttgcccaggatttccaagaagcaggtggctctgtcttgaccaattttgaagtaaaaggtattgaaatggctaaagaaagtccttcaagaagtatagatggaatgcaatatccaattgttataaagaatacaaagggagaggaaattcgatgtcagtatgttgtgacatgtgcaggactttactcagaccgtatttcagagttgagtggctgcactcctgatcctcgaattgtaccattccggggagattacctgcttttgaagccagaaaaatgttatcttgtaaaaggaaatatttatccggtcccagatagccggtttcctttcctaggagttcacttcacaccaaggatggatggcagtatttggctagggcctaatgcagttcttgcctttaaacgagagggttacagaccctttgacttcagtgccacagatgttatggatataattatcaatagtggcttgattaaactggcatcccagaatttttcctatggagttactgaaatgtataaagcatgttttcttggtgcaacagtgaagtatcttcaaaaattcatccctgaaattactatcagtgatatacttaggggcccagctggagtaagagcccaggccctggatagagatggaaatctggtagaagattttgtatttgatgcaggagttggggatattggaaatcgcattcttcatgtgagaaatgcaccttctcctgctgctacttcttccattgcaatttctggaatgattgcagatgaagtacaacaaagatttgaattataaataatgaaaggagctagacggagtttcactcttgttgcccaggcttgagtgcaatggtacgatcttggctcactgcaacctctgcctcccgggttccagcgattctcttgcctcaacctcctgagtagctgggattacaggcgcccaccaccatgcctggctaattttttgtatttttagtagagacggggttttgccatgttggccaggctggtctcgaattcctgacctcaggtgatccacctgcctcagcctcccaaaatgctgggattacaggtgcgagccatcatgctcagccctgaatccctgactttgttaatgacctgtccttaccaaccatgacctagagaagatttggctttttaagagttttggagaaagatggcataaaaatagattatttccttaaatcaattttttagcattacgctacctaagctcgtttggtctctcatagacaagaaaatacattatattgtaggttaca

SEQ ID NO: 15574 - DNA, 6595 bp, Homo sapiens
  source 1..6595: mol_type = unassigned DNA
gtgaccccaggccctggtcactccatgctttggagggtgcttttgtcaaagaggcctcctttccctcacccagagctggatttccaagaggctcccatacctagctgccctggcagactcccagggaggaaaaacagcgtggccttggcagctgccccgaggaaggagcccacaggtgacagggagaagccattgccattccctgtcctggcccccttcagcaaccctgaacactctgctccagccaaggtggtgagggcagctgttcctaaacagcgcaaaggcagcaaggttggtgactttggagatgcaatcaattggcccacacctggagagatagcccacaagagtgttcagccacagtcccacaagcctcagcctacccgtaaactgccacccaagaaggacatgaaggaacaggagaaaggagaagggagtgatagtaaggagagtccaaaaaccaaatcagatgaatcaggggaggaaaagaatggagatgaggattgccagcgaggcgggcagaagaagaaaggaaacaaacacaagtgggttccattacaaatagacatgaagcctgaagtgcccagagagaaactggcttcacgccccactcgcccaccggagcctagacacatacctgccaatcgcggagagatcaaagggtctgagtctgccacctacgtgcccgtggccccccccaccccagcctggcaaccagagatcaaaccggagcctgcctggcacgaccaggatgagacatcgagtgtgaagagtgatggggctggtggggcgcgggcttccttccgtggccgtggacgggggcgtggtcgcggccggggacgcggccggggtggcactcgaacccattttgactaccagtttggctaccgaaagtttgatggtgtggaggggcctcgtacgcccaagtacatgaacaacatcacctactactttgacaatgtcagcagcaccgagctttacagtgtggatcaggaactgctcaaagactacatcaagcgccagattgaatactacttcagcgtggacaatttagagcgagacttcttcctgcgaaggaaaatggatgctgatggtttcctacccatcacccttattgcttccttccaccgagtgcaggcccttaccactgacatttcactcatctttgcggccctaaaggacagcaaggtggtggagatcgttgatgagaaagttcgtaggagggaggaaccagaaaagtggcctcttcccccaatagtggattattcacagactgatttctcccagcttctcaactgccctgaatttgttccccgtcagcactaccaaaaggagacagagtcggcacctggctctcctcgtgcagtcaccccagtgccaaccaaaacagaggaggtcagcaacctaaagacactacccaagggcctgtctgccagcctgcctgacctggattctgagaactggattgaagtgaagaagaggcctcggccatccccagcacggcccaagaagtcagaggagtccagattttcccacctgacctctctgcctcagcagctgccttcccagcagctgatgtccaaggatcaggatgagcaagaggaactggattttctgtttgacgaggagatggagcagatggatgggcggaagaacaccttcactgcctggtctgatgaggaatctgactatgagattgatgacagggatgtcaacaagatcctcattgtcacccagacaccacattacatgcgccggcacccagggggggaccgcacaggcaaccacacctcgcgtgccaagatgagcgccgaactggccaaggtcattaatgatggcctcttctactatgagcaggacctgtgggctgaaaagtttgaacctgagtattcccagatcaagcaagaagtcgagaacttcaaaaaggtcaatatgatcagccgggagcagtttgacacactgacccctgagccccctgtggatcccaaccaggaagttcctcctgggccacctcggttccagcaagttcctacggatgccctggccaacaagttgtttggtgctcctgagccctccaccatcgcccgctctctaccaaccactgtcccagagtcaccaaactaccgcaacaccaggacccctcgcactccccggacaccacagctcaaagactcaagccagacatcacggttttacccagtggtgaaagaaggacggacactggatgccaagatgcctcgaaaaagaaagacaagacacagttcaaacccacccttggagagccatgtgggctgggtgatggattcccgtgagcacaggccccgtactgcttccatcagctccagcccctcagaagggacgcctacagttggcagctatggctgtacccctcagtcattgcccaagttccagcatccttcccatgaactgctcaaggaaaatggcttcacacaacacgtctaccataagtatcgtaggcgctgccttaatgagcggaaacgcttgggcattggccagtctcaggagatgaacacactcttccgcttctggtccttcttcctccgagatcacttcaacaaaaagatgtatgaggagttcaagcagctggctctggaggacgccaaagaaggctacagatatggtttggagtgcctttttcgatactacagttatggcctggaaaagaagttccggctggacatattcaaggattttcaggaggaaacggtgaaggactatgaagctggccaactgtatgggctggagaagttctgggccttcttgaaatattccaaagccaaaaatttggacattgaccccaaactgcaagaatacctcggcaaattccgacgtcttgaagacttccgagtagatccccccatgggtgaggagggcaaccacaagcgacactcagtggtagcaggaggtggcggcggtgagggcaggaagcggtgcccctcccagtcttccagcaggcctgctgccatgatcagccaaccccctacaccacccaccggccagcctgtccgggaagatgccaaatggacaagccagcactcgaacacacagactttgggaaagtgaaaagctccttagccctggggcttgaggggggaaaggggtagggtgggtaagagtccatgggggtgcccagtcccaggaaaggggacaatgaagggacaggcctggagttactaggacaggcctttgtgctgagtagcaatgtatacaccatttgggctatcagaggtacccctgggcaggagcctctacatccccttccccctcctctctccatgactcttgacatcctagcttcttctaaggggggagggaaaggggggagatttttatatatatatacatatatatatatcaagttttaaattattgatagttcatctggattaccaaaatcactctgcagccctgcccgaggctagtaggctgcaaccctggtccccacccctaacctcctgctccccctcaagccaactatgcagcccacaagaaggccctgcgggcccccccattgcccagcactgtctcatagaaggctctggtggtacctctgggccccaggagcatcagccccttgatcatctggggtttgtcatcaccatattttctccctgctgttcccaccatgcccttctgccatcttctgggagaaggaaaccaaaggatctaaaactggggtttgggggaaggtttcagcctctccccactccccttgccccacaccctttactccccagcccagagagacgctgcttttaccaggaaagactattgaaagatgttttattttatttttctctgacctttccatccttgaaaaaatggggaaaaaagaagaaaaaagacaaaatcgaccataaaagaccaaaaaaaaaaaaaaaatcagaaaacccccacctaatccacagaaagtaatgtctttcccctccccttggaatttttgttttgtttttggaaataatatttttttaaaagttgccttattgtggagcgggaatctgaaatacccaaatgcctgttttcctcggtggagtcaacccgaagagctcccaccttctctggatgtgcctgggcttggactggctagaatctttctctggactgttgcatgtacagtgcctccatcctggaggcaagagagttgggagtggctcgaatcagagccgtgcccaagatatccctgctgttgcatcgtttgaagctgacgtcctgtgtctgtacactgctgccactgttgtgtcctcgctctgcttgctgttgcctcacgccaggccccgtcctgccgtgacacccttcatcctacccttggaaccccaaggccaagttggttcaaactgttggagaacagagttggcctgcatctggaacacacttgtcctcagcttaccatctcctcacaccccagagtggaaaggtgaacacctgcagctgaggcttggaaacgtttcttgtgttgccctgaaaaatctttgagacctcagggaggctctgtctctcttaaaaggtggagaaagatgccattctctccctaaggtctggtggagtctccccatcttgcatacccttctgcaagccatctatctctgctcactctccaattgacccgcctgggaacaagggatgaggaggagttgggggctggggggaatcctgccagttggtgaagccctgtggcaggaaggtatatgtggacatagagtatacctgattctctttcttcagccactgactgcttgggttgggctgtgaatgataatggaatggctggagtctgctgttgtcagaaggcagggagggtgatgaaggactgacccacatggactgggatgtgtgtcggttatgggcatgactgcacgttcactctcagtgggatctgggcaacatggagttcattgtcctgttgcttacttactgcaatgtctttggccctccttttcaactggttcctctgttgggcccaaaggttgggagtaggagacagtatcccaggctgacaagggcttgccctttaccttgggcaccttgttaatttttagcctgtgcccttccccacctttgccctcccagtggttggtatgtgggaagcccatctcagttcctgtgacttcatgtctcaaaccaaggatgagcgtctggtctctgctatgatggtggtatccgaggcctttccctgcccagtctggtgcctgccccacattgtaccggacactggattcctggacccccttctcctttcctttctttccttcaggtcacgcagccctgtactgtatccagcaccacagaaacctcagtgtttttcctctgctggtttggggcacaaggaagccttagggtatggggaaaggctgttattacctagagtttactcccaggccagggggctgccatcttcttcacagacatccctgaaaggaagcccctttggggcagggaggtgaggacttcatctcaacatcggctggtggttggtaggggagctttttcttttctttcctttttttttgtttttgtttttgtttttgtttttggtaacatgttaggagttaatgttgcaaagagtagtttacatcttcactttctgaagacacttgaatttaggaccgatgtatctgtgacaagcatgccagaagtggcaggggccatcagggctaaccacttcacacctaccatcgtcccatggggatccaagacctgagataaagcaacagcctgcccagatccctctgttcatcctatcccttccaaggttggtccatgccaacataacctctgggcatcagacatcagcaggtctgtgtgcctcagccctgttaaggggcaggtttctctttagccctcttcctgcacttgggagcaaaggcactaccagtagagaagggccatccagccgtgccccagcctggacccctggggctcagatagaggtgctgagcccctgtgtcaaagttgttaaatgtttttgttttgttccattgtagctctttttttttttttttcccctttcctggtgattgattttacaaaagaaagtaagctgcttagaaggccctggaagggaagtgaggaggagggacaaggaagatgactagttacggagggtgagggttgttttttgccaaaaagcctgggtagagtgatctgaattatctggcaccctcctgaatggaaccccagagtacctcctgtgtggaagggtccctggattttccctaacacccaccctctcccccttcagccatgctgatggcagagaagataagaacttggagcccatttctcactggagaggaaaacttgtcatctggctttgcggagaaggttccaccttacgctcgtagtacattatctttactatgtgctaggatatcatatttaaaaggacaaaaaaatgtaaaatacttgaatgagcttgtattataacattaatattattgagagtatctgctttccaggctgaagtgattcattcattattctagtcctgctttagtcctttgtaatttgtggtaattatgcttttctttttaatacaaaaaaatgtataaaaataaacacttgaaaaggcaaaata

SEQ ID NO: 15575 - DNA, 2630 bp, Homo sapiens
  source 1..2630: mol_type = unassigned DNA
ggatttacggcggctgcatctaactgggagggggccgcacctcgcgtgaaccccgacccttctctgcagggactggggcccagcgccccggaggaaggcgtcgcgggcgctctgctagccaagttcgaggcgggggaggcagcctcgggcgcgcccggcttctccgggggggcgggcgcgcagatggccactcaggtggagccgctgctgcctgggggcgccacgctcttgcaggccgaagagcacggggggctggtgaggaagaagccgccgccggcgcccgagggcaagggcgagcccgggccaaacgacgtccgcgggggggagccggacggcagcgctcggagaccccggccgccctgcgccaagccgcacaaggagggcaccgggcagcaggagcgcgagagcccgcggccgctgcagctgcccggcgccgaaggcccggccatcagcgacggggaggagggcggcggcgagccaggcgctggcggaggagctgccggagccgcgggcgcggggcgccgggacttcgtggaagcccccccgcccaaggtgaacccgtggactaagaacgcattgccgccggtcctgaccaccgtgaacggacagtcccccccagaacactctgctccagccaaggtggtgagggcagctgttcctaaacagcgcaaaggcagcaaggttggtgactttggagatgcaatcaattggcccacacctggagagatagcccacaagagtgttcagccacagtcccacaagcctcagcctacccgtaaactgccacccaagaaggacatgaaggaacaggagaaaggagaagggagtgatagtaaggagagtccaaaaaccaaatcagatgaatcaggggaggaaaagaatggagatgaggattgccagcgaggcgggcagaagaagaaaggaaacaaacacaagtgggttccattacaaatagacatgaagcctgaagtgcccagagagaaactggcttcacgccccactcgcccaccggagcctagacacatacctgccaatcgcggagagatcaaagggtctgagtctgccacctacgtgcccgtggccccccccaccccagcctggcaaccagagatcaaaccggagcctgcctggcacgaccaggatgagacatcgagtgtgaagagtgatggggctggtggggcgcgggcttccttccgtggccgtggacgggggcgtggtcgcggccggggacgcggccggggtggcactcgaacccattttgactaccagtttggctaccgaaagtttgatggtgtggaggggcctcgtacgcccaagtacatgaacaacatcacctactactttgacaatgtcagcagcaccgagctttacagtgtggatcaggaactgctcaaagactacatcaagcgccagattgaatactacttcagcgtggacaatttagagcgagacttcttcctgcgaaggaaaatggatgctgatggtttcctacccatcacccttattgcttccttccaccgagtgcaggcccttaccactgacatttcactcatctttgcggccctaaaggacagcaaggtggtggagatcgttgatgagaaagttcgtaggagggaggaaccagaaaagtggcctcttcccccaatagtggattattcacagactgatttctcccagcttctcaactgccctgaatttgttccccgtcagcactaccaaaaggagacagagtcggcacctggctctcctcgtgcagtcaccccagtgccaaccaaaacagaggaggtcagcaacctaaagacactacccaagggcctgtctgccagcctgcctgacctggattctgagaactggattgaagtgaagaagaggcctcggccatccccagcacggcccaagaagtcagaggagtccagattttcccacctgacctctctgcctcagcagctgccttcccagcagctgatgtccaaggatcaggatgagcaagaggaactggattttctgtttgacgaggagatggagcagatggatgggcggaagaacaccttcactgcctggtctgatgaggaatctgactatgagattgatgacagggatgtcaacaagatcctcattgtcacccagacaccacattacatgcgccggcacccagggggggaccgcacaggcaaccacacctcgcgtgccaagatgagcgccgaactggccaaggtcattaatgatggcctcttctactatgagcaggacctgtgggctgaaaagtttgaacctgagtattcccagatcaagcaagaagtcgagaacttcaaaaaggtcaatatgatcagccgggagcagtttgacacactgacccctgagccccctgtggatcccaaccaggaagttcctcctgggccacctcggttccagcaagttcctacggatgccctggccaacaagttgtttggtgctcctgagccctccaccatcgcccgctctctaccaaccactgtcccagagtcaccaaactaccgcaacaccaggacccctcgcactccccggacaccacagctcaaagactcaagccagacatcacggttttacccagtggtgaaagaaggacggacactggatgccaagatgcctcg

SEQ ID NO: 15576 - DNA, 569 bp, Homo sapiens
  source 1..569: mol_type = unassigned DNA
acggccaccgcctgggccgcagcggttagtgggcaacggtgtggttcgggcctacctcgtcggcagagggtgggcgctggtttcagtgaaacgatccccaccgcatgctggtaacactctgctccagccaaggtggtgagggcagctgttcctaaacagcgcaaaggcagcaaggttggtgactttggagatgcaatcaattggcccacacctggagagatagcccacaagagtgttcagccacagtcccacaagcctcagcctacccgtaaactgccacccaagaaggacatgaaggaacaggagaaaggagaagggagtgatagtaaggagagtccaaaaaccaaatcagatgaatcaggggaggaaaagaatggagatgaggattgccagcgaggcgggcagaagaagaaaggaaacaaacacaagtgggttccattacaaatagacatgaagcctgaagtgcccagagagaaactggcttcacgccccactcgcccaccggagcctagacacatacctgccaatcgcggagagatcaaagggtctgagtctgccacctacgtgcc

SEQ ID NO: 15577 - DNA, 2128 bp, Homo sapiens
  source 1..2128: mol_type = unassigned DNA
acgtggtgcctccccgcgcggggagcggcatgtgactgccgaccggcgctccgcgagtcctccctctccctcctccgcgttttggtccttttggaccgtgcccctttccggggggagaacactctgctccagccaaggtggtgagggcagctgttcctaaacagcgcaaaggcagcaaggttggtgactttggagatgcaatcaattggcccacacctggagagatagcccacaagagtgttcagccacagtcccacaagcctcagcctacccgtaaactgccacccaagaaggacatgaaggaacaggagaaaggagaagggagtgatagtaaggagagtccaaaaaccaaatcagatgaatcaggggaggaaaagaatggagatgaggattgccagcgaggcgggcagaagaagaaaggaaacaaacacaagtgggttccattacaaatagacatgaagcctgaagtgcccagagagaaactggcttcacgccccactcgcccaccggagcctagacacatacctgccaatcgcggagagatcaaagggtctgagtctgccacctacgtgcccgtggccccccccaccccagcctggcaaccagagatcaaaccggagcctgcctggcacgaccaggatgagacatcgagtgtgaagagtgatggggctggtggggcgcgggcttccttccgtggccgtggacgggggcgtggtcgcggccggggacgcggccggggtggcactcgaacccattttgactaccagtttggctaccgaaagtttgatggtgtggaggggcctcgtacgcccaagtacatgaacaacatcacctactactttgacaatgtcagcagcaccgagctttacagtgtggatcaggaactgctcaaagactacatcaagcgccagattgaatactacttcagcgtggacaatttagagcgagacttcttcctgcgaaggaaaatggatgctgatggtttcctacccatcacccttattgcttccttccaccgagtgcaggcccttaccactgacatttcactcatctttgcggccctaaaggacagcaaggtggtggagatcgttgatgagaaagttcgtaggagggaggaaccagaaaagtggcctcttcccccaatagtggattattcacagactgatttctcccagcttctcaactgccctgaatttgttccccgtcagcactaccaaaaggagacagagtcggcacctggctctcctcgtgcagtcaccccagtgccaaccaaaacagaggaggtcagcaacctaaagacactacccaagggcctgtctgccagcctgcctgacctggattctgagaactggattgaagtgaagaagaggcctcggccatccccagcacggcccaagaagtcagaggagtccagattttcccacctgacctctctgcctcagcagctgccttcccagcagctgatgtccaaggatcaggatgagcaagaggaactggattttctgtttgacgaggagatggagcagatggatgggcggaagaacaccttcactgcctggtctgatgaggaatctgactatgagattgatgacagggatgtcaacaagatcctcattgtcacccagacaccacattacatgcgccggcacccagggggggaccgcacaggcaaccacacctcgcgtgccaagatgagcgccgaactggccaaggtcattaatgatggcctcttctactatgagcaggacctgtgggctgaaaagtttgaacctgagtattcccagatcaagcaagaagtcgagaacttcaaaaaggtcaatatgatcagccgggagcagtttgacacactgacccctgagccccctgtggatcccaaccaggaagttcctcctgggccacctcggttccagcaagttcctacggatgccctggccaacaagttgtttggtgctcctgagccctccaccatcgcccgctctctaccaaccactgtcccagagtcaccaaactaccgcaacaccaggacccctcgcactccccggacaccacagctcaaagactcaagccagacatcacggttttacccagtggtgaaagaaggacggacactggatgccaagatgcctcg

SEQ ID NO: 15578 - DNA, 2157 bp, Homo sapiens
  source 1..2157: mol_type = unassigned DNA
ggggcccggcgtggggaggtttggggcgcgcccggcctatgacggcgtccttgcggaagtacgggtgccgagagaagcagtagtcaataaagagagtgccgtatttcgcagattggagctgagctgtggctgccagaagatagcgaacgaatggaaactgaaagtggaaatcaggaaaaggtaatggaagaagaaagcactgaaaagaaaaaagaagttgaaaaaaagaaacggtcacgagttaaacaggtgcttgcagatattgctaagcaagtggacttctggtttggggatgcaaatcttcacaaggatagatttcttcgagaacagatagaaaaatctagagatggatatgttgatatatcactacttgtgtcttttaacaaaatgaaaaaattgactactgatgggaagttaattgccagagcattgagaagttcagctgttgtagagcttgatttggaaggcaccagaatccggaggaaaaaacctctgggggaaagaccaaaggatgaggatgaacgcacagtgtatgtggagttacttcccaaaaatgttaatcacagctggattgaaagagtatttgggaaatgtggcaatgttgtttatataagtataccacattataagtctactggagatccaaagggatttgcgtttgtggaatttgaaacaaaagaacaagcagcaaaagcaattgagtttcttaacaacccaccagaagaagcaccaagaaaacctggcatatttcctaaaacagtgaaaaataagcccattccagccttaagagttgtggaagagaagaaaaagaaaaagaagaagaaaggccgaatgaaaaaggaagacaatatccaagccaaagaagaaaacatggacacaagcaacaccagcatcagtaaaatgaaaagatccagacccacatctgagggctctgacattgagtccactgaaccccaaaagcagtgctcaaagaaaaagaaaaaacgggacagagttgaagcatctagcttacctgaagtcagaacagggaagaggaagagaagcagctctgaagatgcagaatccctagctccccgatcaaaagtaaagaaaattattcagaaagacatcattaaggaagcatcagaagcttccaaggaaaatagagatatagaaatctctactgaagaggaaaaggatactggagatctaaaagatagctctctcttgaaaacaaaaaggaaacataagaaaaaacataaagagagacataaaatgggagaagaagttataccattaagagtgctatcaaagagcgaatggatggatttgaaaaaagagtatttagcgctacaaaaagctagcatggcttctttaaaaaaaacaatatcccaaataaaatcagagtcagaaatggaaacagacagtggagtacctcaaaacactggaatgaaaaatgaaaaaacagccaacagggaagagtgtcgcacccaggagaaagttaatgcaacaggaccacagttcgtgagtggagtgattgtgaagatcattagcacagagcctctacctggcaggaaacaagtccgggatactttggcagcaatctcagaagttctttatgttgatttgctagaaggggatacagaatgccatgctagatttaaaactcctgaggatgctcaagcagtaataaatgcctatacagaaattaacaagaaacactgctggaaactcgagatcctttctggtgatcacgaacaaaggtattggcagaagattttggttgatagacaggcaaaacttaatcagcctcgggaaaagaaaagaggcactgaaaagttaatcaccaaagctgaaaagattagactggcaaagactcaacaagcgagtaaacatataagattttctgaatatgattgaaaaaaaaaacagttcacctcttaatacttcacaagatacttgagctgttcttgggagattcacttttattatggtagcactgcataattaatgtgtttttaattaaaagaaatatctttgttcctcaacttgtaaataagacttttttctagagacaaatatgatgtataccacaatttttcttaaacattttatttgttgaaattatcttagatgtcagtgtcaggtgatttagtaaataaatgtgttttgaacatt

SEQ ID NO: 15579 - DNA, 2286 bp, Homo sapiens
  source 1..2286: mol_type = unassigned DNA
aagccaaaaaccgccgctttcaaatcgccaatcaaattcttccttggcttcgagtctctcagccggccgcgctctccgatgcccagccctcctggaaccacctcgcctgtgacgtaggtggagcgcgcactgcctccgggcccgtctttctcaattgggaccggaaaacgttgtcgctcatcctatgacgcgaaagtaaccgagactatcaggatccggagacggaaatgtccgaaggccgcagtacttgaccctgtattttgggagtcgaacggagaatggaaactgaaagtggaaatcaggaaaaggtaatggaagaagaaagcactgaaaagaaaaaagaagttgaaaaaaagaaacggtcacgagttaaacaggtgcttgcagatattgctaagcaagtggacttctggtttggggatgcaaatcttcacaaggatagatttcttcgagaacagatagaaaaatctagagatggatatgttgatatatcactacttgtgtcttttaacaaaatgaaaaaattgactactgatgggaagttaattgccagagcattgagaagttcagctgttgtagagcttgatttggaaggcaccagaatccggaggaaaaaacctctgggggaaagaccaaaggatgaggatgaacgcacagtgtatgtggagttacttcccaaaaatgttaatcacagctggattgaaagagtatttgggaaatgtggcaatgttgtttatataagtataccacattataagtctactggagatccaaagggatttgcgtttgtggaatttgaaacaaaagaacaagcagcaaaagcaattgagtttcttaacaacccaccagaagaagcaccaagaaaacctggcatatttcctaaaacagtgaaaaataagcccattccagccttaagagttgtggaagagaagaaaaagaaaaagaagaagaaaggccgaatgaaaaaggaagacaatatccaagccaaagaagaaaacatggacacaagcaacaccagcatcagtaaaatgaaaagatccagacccacatctgagggctctgacattgagtccactgaaccccaaaagcagtgctcaaagaaaaagaaaaaacgggacagagttgaagcatctagcttacctgaagtcagaacagggaagaggaagagaagcagctctgaagatgcagaatccctagctccccgatcaaaagtaaagaaaattattcagaaagacatcattaaggaagcatcagaagcttccaaggaaaatagagatatagaaatctctactgaagaggaaaaggatactggagatctaaaagatagctctctcttgaaaacaaaaaggaaacataagaaaaaacataaagagagacataaaatgggagaagaagttataccattaagagtgctatcaaagagcgaatggatggatttgaaaaaagagtatttagcgctacaaaaagctagcatggcttctttaaaaaaaacaatatcccaaataaaatcagagtcagaaatggaaacagacagtggagtacctcaaaacactggaatgaaaaatgaaaaaacagccaacagggaagagtgtcgcacccaggagaaagttaatgcaacaggaccacagttcgtgagtggagtgattgtgaagatcattagcacagagcctctacctggcaggaaacaagtccgggatactttggcagcaatctcagaagttctttatgttgatttgctagaaggggatacagaatgccatgctagatttaaaactcctgaggatgctcaagcagtaataaatgcctatacagaaattaacaagaaacactgctggaaactcgagatcctttctggtgatcacgaacaaaggtattggcagaagattttggttgatagacaggcaaaacttaatcagcctcgggaaaagaaaagaggcactgaaaagttaatcaccaaagctgaaaagattagactggcaaagactcaacaagcgagtaaacatataagattttctgaatatgattgaaaaaaaaaacagttcacctcttaatacttcacaagatacttgagctgttcttgggagattcacttttattatggtagcactgcataattaatgtgtttttaattaaaagaaatatctttgttcctcaacttgtaaataagacttttttctagagacaaatatgatgtataccacaatttttcttaaacattttatttgttgaaattatcttagatgtcagtgtcaggtgatttagtaaataaatgtgttttgaacatta

SEQ ID NO: 15580 - DNA, 1047 bp, Homo sapiens
  source 1..1047: mol_type = unassigned DNA
ggggcccggcgtggggaggtttggggcgcgcccggcctatgacggcgtccttgcggaagtacgggtgccgagagaagcagtagtcaataaagagagtgccgtatttcgcagattggagctgagctgtggctgccagaagatagcgaacgaatggaaactgaaagtggaaatcaggaaaaggtaatggaagaagaaagcactgaaaagaaaaaagaagttgaaaaaaagaaacggtcacgagttaaacaggtgcttgcagatattgctaagcaagtggacttctggtttggggatgcaaatcttcacaaggatagatttcttcgagaacagatagaaaaatctagagatggatatgttgatatatcactacttgtgtcttttaacaaaatgaaaaaattgactactgatgggaagttaattgccagagcattgagaagttcagctgttgtagagcttgatttggaaggcaccagaatccggaggaaaaaacctctgggggaaagaccaaaggatgaggatgaacgcacagtgtatgtggagttacttcccaaaaatgttaatcacagctggattgaaagagtatttgggaaatgtggcaatgttgtttatataagtataccacattataagtctactggagatccaaagggatttgcgtttgtggaatttgaaacaaaagaacaagcagcaaaagcaattgagtttcttaacaacccaccagaagaagcaccaagaaaacctggcatatttcctaaaacagtgaaaaataagcccattccagccttaagagttgtggaagagaagaaaaagaaaaagaagaagaaaggccgaatgaaaaaggaagacaatatccaagccaaagaagaaaacatggacacaagcaacaccagcatcagtaaaatgaaaagatccagacccacatctgagggctctgacattgagtccactgaaccccaaaagcagtgctcaaagaaaaagaaaaaacgggacagagttgaagcatctagcttacctgaagtcagaacagggaagaggaagagaagcagc

SEQ ID NO: 15581 - DNA, 753 bp, Homo sapiens
  source 1..753: mol_type = unassigned DNA
gatggagaggagggggtgttgcgatggagagtgtccacgtcccttaatcttacacttttcacttactgacttaaaagtgcagcttagtgagataaaggtgtaattttttatattattctaggataatctggccctgtgttttaaaaggtacaaagaaactaaagctatgatccctaacatagaaggtaaattatttttaaatttaatttattaaatataaaaatgaatgttctttctgtttgtcttctgatggccaaatgtgagtccattattctctcagacagttaaaggctaatctaaatatttaactatattagctattgtggtgatttaaatatttacatctttttcttgtaattcacaggaatggaaactgaaagtggaaatcaggaaaaggtaatggaagaagaaagcactgaaaagaaaaaagaagttgaaaaaaagaaacggtcacgagttaaacaggtgcttgcagatattgctaagcaagtggacttctggtttggggatgcaaatcttcacaaggatagatttcttcgagaacagatagaaaaatctagagatggatatgttgatatatcactacttgtgtcttttaacaaaatgaaaaaattgactactgatgggaagttaattgccagagcattgagaagttcagctgttgtagagcttgatttggaaggcaccagaatccggaggaaaaaacctctgggggaaagaccaaaggatgaggatgaacgcacagtgtatgtg

SEQ ID NO: 15582 - DNA, 579 bp, Homo sapiens
  source 1..579: mol_type = unassigned DNA
gagactatcaggatccggagacggaaatgtccgaaggccgcagtacttgaccctgtattttgggagtcgaacggagactctgccatcgtcctcaaagagtaaaaaatccagttacggaagggaactaacacttgctagatatggtgtgcagagtgcgtttgcaaagaaacttaagagaaaacaaatgataggacacagggtggtggaagatctcaaagagaatggaaactgaaagtggaaatcaggaaaaggtaatggaagaagaaagcactgaaaagaaaaaagaagttgaaaaaaagaaacggtcacgagttaaacaggtgcttgcagatattgctaagcaagtggacttctggtttggggatgcaaatcttcacaaggatagatttcttcgagaacagatagaaaaatctagagatggatatgttgatatatcactacttgtgtcttttaacaaaatgaaaaaattgactactgatgggaagttaattgccagagcattgagaagttcagctgttgtagagcttgatttggaaggcaccagaatccggaggaaaaaacctctgggggaaagaccaa

SEQ ID NO: 15583 - DNA, 2332 bp, Homo sapiens
  source 1..2332: mol_type = unassigned DNA
ggaaaacgttgtcgctcatcctatgacgcgaaagtaaccgagactatcaggatccggagacggaaatgtccgaaggccgcagtacttgaccctgtattttgggagtcgaacggagactctgccatcgtcctcaaagagtaaaaaatccagttacggaagggaactaacacttgctagatatggtgtgcagagtgcgtttgcaaagaaacttaagagaaaacaaatgataggacacagggtggtggaagatctcaaagagataatctggccctgtgttttaaaaggtacaaagaaactaaagctatgatccctaacatagaaggaatggaaactgaaagtggaaatcaggaaaaggtaatggaagaagaaagcactgaaaagaaaaaagaagttgaaaaaaagaaacggtcacgagttaaacaggtgcttgcagatattgctaagcaagtggacttctggtttggggatgcaaatcttcacaaggatagatttcttcgagaacagatagaaaaatctagagatggatatgttgatatatcactacttgtgtcttttaacaaaatgaaaaaattgactactgatgggaagttaattgccagagcattgagaagttcagctgttgtagagcttgatttggaaggcaccagaatccggaggaaaaaacctctgggggaaagaccaaaggatgaggatgaacgcacagtgtatgtggagttacttcccaaaaatgttaatcacagctggattgaaagagtatttgggaaatgtggcaatgttgtttatataagtataccacattataagtctactggagatccaaagggatttgcgtttgtggaatttgaaacaaaagaacaagcagcaaaagcaattgagtttcttaacaacccaccagaagaagcaccaagaaaacctggcatatttcctaaaacagtgaaaaataagcccattccagccttaagagttgtggaagagaagaaaaagaaaaagaagaagaaaggccgaatgaaaaaggaagacaatatccaagccaaagaagaaaacatggacacaagcaacaccagcatcagtaaaatgaaaagatccagacccacatctgagggctctgacattgagtccactgaaccccaaaagcagtgctcaaagaaaaagaaaaaacgggacagagttgaagcatctagcttacctgaagtcagaacagggaagaggaagagaagcagctctgaagatgcagaatccctagctccccgatcaaaagtaaagaaaattattcagaaagacatcattaaggaagcatcagaagcttccaaggaaaatagagatatagaaatctctactgaagaggaaaaggatactggagatctaaaagatagctctctcttgaaaacaaaaaggaaacataagaaaaaacataaagagagacataaaatgggagaagaagttataccattaagagtgctatcaaagagcgaatggatggatttgaaaaaagagtatttagcgctacaaaaagctagcatggcttctttaaaaaaaacaatatcccaaataaaatcagagtcagaaatggaaacagacagtggagtacctcaaaacactggaatgaaaaatgaaaaaacagccaacagggaagagtgtcgcacccaggagaaagttaatgcaacaggaccacagttcgtgagtggagtgattgtgaagatcattagcacagagcctctacctggcaggaaacaagtccgggatactttggcagcaatctcagaagttctttatgttgatttgctagaaggggatacagaatgccatgctagatttaaaactcctgaggatgctcaagcagtaataaatgcctatacagaaattaacaagaaacactgctggaaactcgagatcctttctggtgatcacgaacaaaggtattggcagaagattttggttgatagacaggcaaaacttaatcagcctcgggaaaagaaaagaggcactgaaaagttaatcaccaaagctgaaaagattagactggcaaagactcaacaagcgagtaaacatataagattttctgaatatgattgaaaaaaaaaacagttcacctcttaatacttcacaagatacttgagctgttcttgggagattcacttttattatggtagcactgcataattaatgtgtttttaattaaaagaaatatctttgttcctcaacttgtaaataagacttttttctagagacaaatatgatgtataccacaatttttcttaaacattttatttgttgaaattatcttagatgtcagtgtcaggtgatttagtaaataaatgtgttttgaacatta

SEQ ID NO: 15584 - DNA, 551 bp, Homo sapiens
  source 1..551: mol_type = unassigned DNA
attccccagaccttctgcagattctgtggttatactcactcctcatcccaaagaatgaaatttaccactctcctcttcttggcagctgtagcaggggccctggtctatgctgaagatgcctcctctgactcgacgggtgctgatcctgcccaggaagctgggacctctaagcctaatgaagagatctcaggtccagcagaaccagcttcacccccagagacaaccacaacagcccaggagacttcggcggcagcagttcaggggacagccaaggtcacctcaagcaggcaggaactaaaccccctgaaatccatagtggagaaaagtatcttactaacagaacaagcccttgcaaaagcaggaaaaggaatgcacggaggcgtgccaggtggaaaacaattcatcgaaaatggaagtgaatttgcacaaaaattactgaagaaattcagtctattaaaaccatgggcatgagaagctgaaaagaatgggatcattggacttaaagccttaaatacccttgtagcccagagctattaaaacgaaagcatcca

SEQ ID NO: 15585 - DNA, 728 bp, Homo sapiens
  source 1..728: mol_type = unassigned DNA
atttcaggttcttgggggtagccaaaatgaggttctttgtccctctgttcctggtgggcatcctgttccctgccatcctggccaagcaattcacaaaatgtgagctgtcccagctgctgaaagacatagatggttatggaggcatcgctttgcctgaattgatctgtaccatgtttcacaccagtggttatgacacacaagccatagttgaaaacaatgaaagcacggaatatggactcttccagatcagtaataagctttggtgcaagagcagccaggtccctcagtcaaggaacatctgtgacatctcctgtgacaagttcctggatgatgacattactgatgacataatgtgtgccaagaagatcctggatattaaaggaattgactactggttggcccataaagccctctgcactgagaagctggaacagtggctttgtgagaagttgtgagtgtctgctgtccttggcacccctgcccactccacactcctggaatacctcttccctaatgccacctcagtttgtttctttctgttcccccaaagcttatctgtctctgagccttgggccctgtagtgacatcaccgaattcttgaagactattttccagggatgcctgagtggtgcactgagctctagacccttactcagtgccttcgatggcactttcactacagcacagatttcacctctgtcttgaataaaggtcccactttgaagtca

SEQ ID NO: 15586 - DNA, 1972 bp, Homo sapiens
  source 1..1972: mol_type = unassigned DNA
cttccctccgccccgcgccgcggctggcagggtgtgcgtgagtttggtggcggccggctgtgcagagacgccatgtaccggctcatgtcagcagtgactgcccgggctgccgcccccgggggcttggcctcaagctgcggacgacgcggggtccatcagcgcgccgggctgccgcctctcggccacggctgggtcgggggcctcgggctggggctggggctggcgctcggggtgaagctggcaggtgggctgaggggcgcggccccggcgcagtcccccgcggcccccgaccctgaggcgtcgcctctggccgagccgccacaggagcagtccctcgccccgtggtctccgcagaccccggcgccgccctgctccaggtgcttcgccagagccatcgagagcagccgcgacctgctgcacaggatcaaggatgaggtgggcgcaccgggcatagtggttggagtttctgtagatggaaaagaagtctggtcagaaggtttaggttatgctgatgttgagaaccgtgtaccatgtaaaccagagacagttatgcgaattgctagcatcagcaaaagtctcaccatggttgctcttgccaaattgtgggaagcagggaaactggatcttgatattccagtacaacattatgttcccgaattcccagaaaaagaatatgaaggtgaaaaggtttctgtcacaacaagattactgatttcccatttaagtggaattcgtcattatgaaaaggacataaaaaaggtgaaagaagagaaagcttataaagccttgaagatgatgaaagagaatgttgcatttgagcaagaaaaagaaggcaaaagtaatgaaaagaatgattttactaaatttaaaacagagcaggagaatgaagccaaatgccggaattcaaaacctggcaagaaaaagaatgattttgaacaaggcgaattatatttgagagaaaagtttgaaaattcaattgaatccctaagattatttaaaaatgatcctttgttcttcaaacctggtagtcagtttttgtattcaacttttggctataccctactggcagccatagtagagagagcttcaggatgtaaatatttggactatatgcagaaaatattccatgacttggatatgctgacgactgtgcaggaagaaaacgagccagtgatttacaatagagcaagattttatgtttacaataaaaagaaacgtcttgtcaacacaccttacgtggataactcctataaatgggctggtggtggatttctgtctacagtgggtgaccttctgaaatttgggaatgcaatgctttatggttaccaagttgggctgtttaagaactcaaatgaaaatcttttacctggatacctcaaaccagaaacaatggttatgatgtggaccccagtccctaacacagagatgtcttgggataaagagggtaaatatgcaatggcgtggggtgttgtggaaaggaaacaaacgtatggttcgtgtagaaagcaacggcattatgcttcacatactggaggggcagtgggtgccagtagtgtcctgctggtccttcctgaagaactggatacagagactataaataacaaggttcccccaagaggaatcattgtttctatcatatgtaacatgcaatctgttggcctcaatagcaccgctttgaagattgcccttgaatttgataaagacagatcagactgataaccttaacaccataggtgcaaaatgagttgttctgaggtttttttgaaacattaaagttccaaaacatgacatttttaagaataaatttgaaatagagtataactgaatgcagagaattatgtacctctaattgcttaattttgtaatggtcttttattgtagaattggttctttatactcagggaagtaattatattgtttttactttttgaaaaaagtgttaactcttgaaataaaatattctgataaaata

SEQ ID NO: 15587 - DNA, 2023 bp, Homo sapiens
  source 1..2023: mol_type = unassigned DNA
gtgcgtgagtttggtggcggccggctgtgcagagacgccatgtaccggctcatgtcagcagtgactgcccgggctgccgcccccgggggcttggcctcaagctgcggacgacgcggggtccatcagcgcgccgggctgccgcctctcggccacggctgggtcgggggcctcgggctggggctggggctggcgctcggggtgaagctggcaggtgggctgaggggcgcggccccggcgcagtcccccgcggcccccgaccctgaggcgtcgcctctggccgagccgccacaggagcagtccctcgccccgtggtctccgcagaccccggcgccgccctgctccaggtgcttcgccagagccatcgagagcagccgcgacctgctgcacaggatcaaggatgaggtgggcgcaccgggcatagtggttggagtttctgtagatggaaaagaagtctggtcagaaggtttaggttatgctgatgttgagaaccgtgtaccatgtaaaccagagacagttatgcgaattgctagcatcagcaaaagtctcaccatggttgctcttgccaaattgtgggaagcagggaaactggatcttgatattccagtacaacattatgttcccgaattcccagaaaaagaatatgaaggtgaaaaggtttctgtcacaacaagattactgatttcccatttaagtggaattcgtcattatgaaaaggacataaaaaaggtgaaagaagagaaagcttataaagccttgaagatgatgaaagagaatgttgcatttgagcaagaaaaagaaggcaaaagtaatgaaaagaatgattttactaaatttaaaacagagcaggagaatgaagccaaatgccggaattcaaaacctggcaagaaaaagaatgattttgaacaaggcgaattatatttgagagaaaagtttgaaaattcaattgaatccctaagattatttaaaaatgatcctttgttcttcaaacctggtagtcagtttttgtattcaacttttggctataccctactggcagccatagtagagagagcttcaggatgtaaatatttggactatatgcagaaaatattccatgacttggatatgctgacgactgtgcaggaagaaaacgagccagtgatttacaatagagcaaggtaaatgaataccttctgctgtgtctagctatatcgcatcttaacactattttattaattaaaagtcaaattttctttgtttccattccaaaatcaacctgccacattttgggagcttttctacatgtctgttttctcatctgtaaagtgaaggaagtaaaacatgtttataaagtacactaagaccctttgatgaaagatagcaataatattaataattcaaacatgaataactaaaccaaaattgcacccaccatgagcatctgtaatttgctctttaaccattccttttttaggttttaactaatactttgtttacgtgttattagtttttaattgttttcatactgttttgaaataattttatacttatagaaaagttgcaagagtagtacaaaggattcacatatcctctttactcagattcccttaatgttagtttaccgcatttgcattacctttctgtctacatatgtgtttgtttctgaaccatttggaaataagttgtagacgtgatacccctttacctataaatatttacatgtgtattttctaaaaacaaggacattcagggccgggtgcagtggctcacgcctgtaatcccaacactttggaaggccgaggtgggtggatcacctgaggtcaggagttcaagaccagcctggccaatgtggtgaaatcaaccctctctctactaaaaatgcaaaaattagccaggtgtggtggcgggtgcctataatcccagccacgcgggaggctgaggcaggagaatcgcttgaacccaggaggtggagttgcagtaagccaagatcgtgcccctgcacttcaggctgggcgaaagagtgagactccatgtcaaaaaagga

SEQ ID NO: 15588 - DNA, 6279 bp, Homo sapiens
  source 1..6279: mol_type = unassigned DNA
gttcctagaaaatggagctgtcttggcatgtagtctttattgccctgctaagtttttcatgctgggggtcagactgggagtctgatagaaatttcatttccaccgctggtcctctaaccaatgacttgctgcacaacctgagtggtctcctgggagaccagagttctaactttgtagcaggggacaaagacatgtatgtttgtcaccagccactgcccactttcctgccagaatacttcagcagtctccatgccagtcagatcacccattataaggtatttctgtcatgggcacagctcctcccagcaggaagcacccagaatccagacgagaaaacagtgcagtgctaccggcgactcctcaaggccctcaagactgcacggcttcagcccatggtcatcctgcaccaccagaccctccctgccagcaccctccggagaaccgaagcctttgctgacctcttcgccgactatgccacattcgccttccactccttcggggacctagttgggatctggttcaccttcagtgacttggaggaagtgatcaaggagcttccccaccaggaatcaagagcgtcacaactccagaccctcagtgatgcccacagaaaagcctatgagatttaccacgaaagctatgcttttcagggcggaaaactctctgttgtcctgcgagctgaagatatcccggagctcctgctagaaccacccatatctgcgcttgcccaggacacggtcgatttcctctctcttgatttgtcttatgaatgccaaaatgaggcaagtctgcggcagaagctgagtaaattgcagaccattgagccaaaagtgaaagttttcatcttcaacctaaaactcccagactgcccctccaccatgaagaacccagccagtctgctcttcagcctttttgaagccataaataaagaccaagtgctcaccattgggtttgatattaatgagtttctgagttgttcatcaagttccaagaaaagcatgtcttgttctctgactggcagcctggcccttcagcctgaccagcagcaggaccacgagaccacggactcctctcctgcctctgcctatcagagaatctgggaagcatttgccaatcagtccagggcggaaagggatgccttcctgcaggatactttccctgaaggcttcctctggggtgcctccacaggagcctttaacgtggaaggaggctgggccgagggtgggagaggggtgagcatctgggatccacgcaggcccctgaacaccactgagggccaagcgacgctggaggtggccagcgacagttaccacaaggtagcctctgacgtcgccctgctttgcggcctccgggctcaggtgtacaagttctccatctcctggtcccggatcttccccatggggcacgggagcagccccagcctcccaggcgttgcctactacaacaagctgattgacaggctacaggatgcgggcatcgagcccatggccacgctgttccactgggacctgcctcaggccctgcaggatcatggtggatggcagaatgagagcgtggtggatgccttcctggactatgcggccttctgcttctccacatttggggaccgtgtgaagctgtgggtgaccttccatgagccgtgggtgatgagctacgcaggctatggcaccggccagcaccctcccggcatctctgacccaggagtggcctcttttaaggtggctcacttggtcctcaaggctcatgccagaacttggcaccactacaacagccatcatcgcccacagcagcaggggcacgtgggcattgtgctgaactcagactgggcagaacccctgtctccagagaggcctgaggacctgagagcctctgagcgcttcttgcacttcatgctgggctggtttgcacaccccgtctttgtggatggagactacccagccaccctgaggacccagatccaacagatgaacagacagtgctcccatcctgtggctcaactccccgagttcacagaggcagagaagcagctcctgaaaggctctgctgattttctgggtctgtcgcattacacctcccgcctcatcagcaacgccccacaaaacacctgcatccctagctatgataccattggaggcttctcccaacacgtgaaccatgtgtggccccagacctcatcctcttggattcgtgtggtgccctgggggataaggaggctgttgcagtttgtatccctggaatacacaagaggaaaagttccaatataccttgccgggaatggcatgcccataggggaaagtgaaaatctctttgatgattccttaagagtagactacttcaatcaatatatcaatgaggtgctcaaggctatcaaggaagactctgtggatgttcgttcctacattgctcgttccctcattgatggcttcgaaggcccttctggttacagccagcggtttggcctgcaccacgtcaacttcagcgacagcagcaagtcaaggactcccaggaaatctgcctactttttcactagcatcatagaaaagaacggtttcctcaccaagggggcaaaaagactgctaccacctaatacagtaaacctcccctccaaagtcagagccttcacttttccatctgaggtgccctccaaggctaaagtcgtttgggaaaagttctccagccaacccaagttcgaaagagatttgttctaccacgggacgtttcgggatgactttctgtggggcgtgtcctcttccgcttatcagattgaaggcgcgtgggatgccgatggcaaaggccccagcatctgggataactttacccacacaccagggagcaatgtgaaagacaatgccactggagacatcgcctgtgacagctatcaccagctggatgccgatctgaatatgctccgagctttgaaggtgaaggcctaccgcttctctatctcctggtctcggattttcccaactgggagaaacagctctatcaacagtcatggggttgattattacaacaggctgatcaatggcttggtggcaagcaacatctttcccatggtgacattgttccattgggacctgccccaggccctccaggatatcggaggctgggagaatcctgccttgattgacttgtttgacagctacgcagacttttgtttccagacctttggtgatagagtcaagttttggatgacttttaatgagcccatgtacctggcatggctaggttatggctcaggggaatttcccccaggggtgaaggacccaggctgggcaccatataggatagcccacgccgtcatcaaagcccatgccagagtctatcacacgtacgatgagaaatacaggcaggagcagaagggggtcatctcgctgagcctcagtacacactgggcagagcccaagtcaccaggggtccccagagatgtggaagccgctgaccgaatgctgcagttctccctgggctggtttgctcaccccatttttagaaacggagactatcctgacaccatgaagtggaaagtggggaacaggagtgaactgcagcacttagccacctcccgcctgccaagcttcactgaggaagagaagaggttcatcagggcgacggccgacgtcttctgcctcaacacgtactactccagaatcgtgcagcacaaaacacccaggctaaacccaccctcctacgaagacgaccaggagatggctgaggaggaggacccttcgtggccttccacggcaatgaacagagctgcgccctgggggacgcgaaggctgctgaactggatcaaggaagagtatggtgacatccccatttacatcaccgaaaacggagtggggctgaccaatccgaacacggaggatactgataggatattttaccacaaaacctacatcaatgaggctttgaaagcctacaggctcgatggtatagaccttcgagggtatgtcgcctggtctctgatggacaactttgagtggctaaatggctacacggtcaagtttggactgtaccatgttgatttcaacaacacgaacaggcctcgcacagcaagagcctccgccaggtactacacagaggtcattaccaacaacggcatgccactggccagggaggatgagtttctgtacggacggtttcctgagggcttcatctggagtgcagcttctgctgcatatcagattgaaggtgcgtggagagcagatggcaaaggactcagcatttgggacacgttttctcacacaccactgagggttgagaacgatgccattggagacgtggcctgtgacagttatcacaagattgctgaggatctggtcaccctgcagaacctgggcgtgtcccactaccgtttttccatctcctggtctcgcatcctccctgatggaaccaccaggtacatcaatgaagcgggcctgaactactacgtgaggctcatcgatacactgctggccgccagcatccagccccaggtgaccatttaccactgggacctaccacagacgctccaagatgtaggaggctgggagaatgagaccatcgtgcagcggtttaaggagtatgcagatgtgctcttccagaggctgggagacaaggtgaagttttggatcacgctgaatgagccctttgtcattgcttaccagggctatggctacggaacagcagctccaggagtctccaataggcctggcactgccccctacattgttggccacaatctaataaaggctcatgctgaggcctggcatctgtacaacgatgtgtaccgcgccagtcaaggtggcgtgatttccatcaccatcagcagtgactgggctgaacccagagatccctctaaccaggaggatgtggaggcagccaggagatatgttcagttcatgggaggctggtttgcacatcctattttcaagaatggagattacaatgaggtgatgaagacgcggatccgtgacaggagcttggctgcaggcctcaacaagtctcggctgccagaatttacagagagtgagaagaggaggatcaacggcacctatgacttttttgggttcaatcactacaccactgtcctcgcctacaacctcaactatgccactgccatctcttcttttgatgcagacagaggagttgcttccatcgcagatcgctcgtggccagactctggctccttctggctgaagatgacgccttttggcttcaggaggatcctgaactggttaaaggaggaatacaatgaccctccaatttatgtcacagagaatggagtgtcccagcgggaagaaacagacctcaatgacactgcaaggatctactaccttcggacttacatcaatgaggccctcaaagctgtgcaggacaaggtggaccttcgaggatacacagtttggagtgcgatggacaattttgagtgggccacaggcttttcagagagatttggtctgcattttgtgaactacagtgacccttctctgccaaggatccccaaagcatcagcgaagttctacgcctctgtggtccgatgcaatggcttccctgaccccgctacagggcctcacgcttgtctccaccagccagatgctggacccaccatcagccccgtgagacaggaggaggtgcagttcctggggctaatgctcggcaccacagaagcacagacagctttgtacgttctcttttctcttgtgcttcttggagtctgtggcttggcatttctgtcatacaagtactgcaagcgctctaagcaagggaaaacacaacgaagccaacaggaattgagcccggtgtcttcattctgatgagttaccacctcaagttctatgaagcaggcctagtttcttcatctatgtttaccggccaccaaacaccttagggtcttagactctgctgatactggacttctccataaagtcctgctgcaccgttagagatgactttaatcttgaatgatttcgacttgctgagtaaaatggaaatatctccatcttgctccagtatcagagttcatttgggcatttgagaagcaagtagctcttgcggaaacgtgtagatactggtctagtgggtctgtgaaccacttaattgaacttaacagggctgttttaagtttcagagttgttaagggttgttaagggagcaaaaaccgtaaaaatccttcctataagaagaaatcaactccattgcatagactgcaatatcatctcctgcccttctgcaagctctccctagcttcacatcttgtgttttccagaaaataaaaacagcagactgtcctttctccta

SEQ ID NO: 15589 - DNA, 3012 bp, Homo sapiens
  source 1..3012: mol_type = unassigned DNA
aaggtggctcacttggtcctcaaggctcatgccagaacttggcaccactacaacagccatcatcgcccacagcagcaggggcacgtgggcattgtgctgaactcagactgggcagaacccctgtctccagagaggcctgaggacctgagagcctctgagcgcttcttgcacttcatgctgggctggtttgcacaccccgtctttgtggatggagactacccagccaccctgaggacccagatccaacagatgaacagacagtgctcccatcctgtggctcaactccccgagttcacagaggcagagaagcagctcctgaaaggctctgctgattttctgggtctgtcgcattacacctcccgcctcatcagcaacgccccacaaaacacctgcatccctagctatgataccattggaggcttctcccaacacgtgaaccatgtgtggccccagacctcatcctcttggattcgtgtggtgccctgggggataaggaggctgttgcagtttgtatccctggaatacacaagaggaaaagttccaatataccttgccgggaatggcatgcccataggggaaagtgaaaatctctttgatgattccttaagagtagactacttcaatcaatatatcaatgaggtgctcaaggctatcaaggaagactctgtggatgttcgttcctacattgctcgttccctcattgatggcttcgaaggcccttctggttacagccagcggtttggcctgcaccacgtcaacttcagcgacagcagcaagtcaaggactcccaggaaatctgcctactttttcactagcatcatagaaaagaacggtttcctcaccaagggggcaaaaagactgctaccacctaatacagtaaacctcccctccaaagtcagagccttcacttttccatctgaggtgccctccaaggctaaagtcgtttgggaaaagttctccagccaacccaagttcgaaagagatttgttctaccacgggacgtttcgggatgactttctgtggggcgtgtcctcttccgcttatcagattgaaggcgcgtgggatgccgatggcaaaggccccagcatctgggataactttacccacacaccagggagcaatgtgaaagacaatgccactggagacatcgcctgtgacagctatcaccagctggatgccgatctgaatatgctccgagctttgaaggtgaaggcctaccgcttctctatctcctggtctcggattttcccaactgggagaaacagctctatcaacagtcatggggttgattattacaacaggctgatcaatggcttggtggcaagcaacatctttcccatggtgacattgttccattgggacctgccccaggccctccaggatatcggaggctgggagaatcctgccttgattgacttgtttgacagctacgcagacttttgtttccagacctttggtgatagagtcaagttttggatgacttttaatgagcccatgtacctggcatggctaggttatggctcaggggaatttcccccaggggtgaaggacccaggctgggcaccatataggatagcccacgccgtcatcaaagcccatgccagagtctatcacacgtacgatgagaaatacaggcaggagcagaagggggtcatctcgctgagcctcagtacacactgggcagagcccaagtcaccaggggtccccagagatgtggaagccgctgaccgaatgctgcagttctccctgggctggtttgctcaccccatttttagaaacggagactatcctgacaccatgaagtggaaagtggggaacaggagtgaactgcagcacttagccacctcccgcctgccaagcttcactgaggaagagaagaggttcatcagggcgacggccgacgtcttctgcctcaacacgtactactccagaatcgtgcagcacaaaacacccaggctaaacccaccctcctacgaagacgaccaggagatggctgaggaggaggacccttcgtggccttccacggcaatgaacagagctgcgccctgggggacgcgaaggctgctgaactggatcaaggaagagtatggtgacatccccatttacatcaccgaaaacggagtggggctgaccaatccgaacacggaggatactgataggatattttaccacaaaacctacatcaatgaggctttgaaagcctacaggctcgatggtatagaccttcgagggtatgtcgcctggtctctgatggacaactttgagtggctaaatggctacacggtcaagtttggactgtaccatgttgatttcaacaacacgaacaggcctcgcacagcaagagcctccgccaggtactacacagaggtcattaccaacaacggcatgccactggccagggaggatgagtttctgtacggacggtttcctgagggcttcatctggagtgcagcttctgctgcatatcagattgaaggtgcgtggagagcagatggcaaaggactcagcatttgggacacgttttctcacacaccactgagggttgagaacgatgccattggagacgtggcctgtgacagttatcacaagattgctgaggatctggtcaccctgcagaacctgggcgtgtcccactaccgtttttccatctcctggtctcgcatcctccctgatggaaccaccaggtacatcaatgaagcgggcctgaactactacgtgaggctcatcgatacactgctggccgccagcatccagccccaggtgaccatttaccactgggacctaccacagacgctccaagatgtaggaggctgggagaatgagaccatcgtgcagcggtttaaggagtatgcagatgtgctcttccagaggctgggagacaaggtgaagttttggatcacgctgaatgagccctttgtcattgcttaccagggctatggctacggaacagcagctccagttcatgggaggctggtttgcacatcctattttcaagaatggagattacaatga

SEQ ID NO: 15590 - DNA, 1303 bp, Homo sapiens
  source 1..1303: mol_type = unassigned DNA
cttgcagagccggcgccggaggagacgcacgcagctgactttgtcttctccgcacgactgttacagaggtctccagagccttctctctcctgtgcaaaatggcaactcttaaggaaaaactcattgcaccagttgcggaagaagaggcaacagttccaaacaataagatcactgtagtgggtgttggacaagttggtatggcgtgtgctatcagcattctgggaaagtctctggctgatgaacttgctcttgtggatgttttggaagataagcttaaaggagaaatgatggatctgcagcatgggagcttatttcttcagacacctaaaattgtggcagataaagattattctgtgactgccaattctaagattgtagtggtaactgcaggagtccgtcagcaagaaggggagagtcggctcaatctggtgcagagaaatgttaatgtcttcaaattcattattcctcagatcgtcaagtacagtcctgattgcatcataattgtggtttccaacccagtggacattcttacgtatgttacctggaaactaagtggattacccaaacaccgcgtgattggaagtggatgtaatctggattctgctagatttcgctaccttatggctgaaaaacttggcattcatcccagcagctgccatggatggattttgggggaacatggcgactcaagtgtggctgtgtggagtggtgtgaatgtggcaggtgtttctctccaggaattgaatccagaaatgggaactgacaatgatagtgaaaattggaaggaagtgcataagatggtggttgaaagtgcctatgaagtcatcaagctaaaaggatataccaactgggctattggattaagtgtggctgatcttattgaatccatgttgaaaaatctatccaggattcatcccgtgtcaacaatggtaaaggggatgtatggcattgagaatgaagtcttcctgagccttccatgtatcctcaatgcccggggattaaccagcgttatcaaccagaagctaaaggatgatgaggttgctcagctcaagaaaagtgcagataccctgtgggacatccagaaggacctaaaagacctgtgactagtgagctctaggctgtagaaatttaaaaactacaatgtgattaactcgagcctttagttttcatccatgtacatggatcacagtttgctttgatcttcttcaatatgtgaatttgggctcacagaatcaaagcctatgcttggtttaatgcttgcaatctgagctcttgaacaaataaaattaactattgtagtgtg

SEQ ID NO: 15591 - DNA, 744 bp, Homo sapiens
  source 1..744: mol_type = unassigned DNA
tggacgatctttacctcgaatatttgaatatattgccacgtgcaaaatggcaactcttaaggaaaaactcattgcaccagttgcggaagaagaggcaacagttccaaacaataagatcactgtagtgggtgttggacaagttggtatggcgtgtgctatcagcattctgggaaagtctctggctgatgaacttgctcttgtggatgttttggaagataagcttaaaggagaaatgatggatctgcagcatgggagcttatttcttcagacacctaaaattgtggcagataaagattattctgtgactgccaattctaagattgtagtggtaactgcaggagtccgtcagcaagaaggggagagtcggctcaatctggtgcagagaaatgttaatgtcttcaaattcattattcctcagatcgtcaagtacagtcctgattgcatcataattgtggtttccaacccagtggacattcttacgtatgttacctggaaactaagtggattacccaaacaccgcgtgattggaagtggatgtaatctggattctgctagatttcgctaccttatggctgaaaaacttggcattcatcccagcagctgccatggatggattttgggggaacatggcgactcaagtgtggctgtgtggagtggtgtgaatgtggcaggtgtttctctccaggaattgaatccagaaatgggaactgacaatgatagtgaaaattggaaggaagtgcataa

SEQ ID NO: 15592 - DNA, 1538 bp, Homo sapiens
  source 1..1538: mol_type = unassigned DNA
tccgcacgactgttacagaggtctccagagccttctctctcctggtaggtttcggctcaggaccctgaatcctggcccacaggcaagcctgatgggacgtgcggggtagtacttgtatggggagacgcgggaaggaggaagaagcacatctgtcctccgcggcctttagctctgagcatccggccgcgggccctgactttgccgctcagtttggggcgcagggggggccgtgccctggcggaggagcagaaggcagagggtagcagctgcggctcagcggagagacttgttgcatttgcagctaaaaccaggccctacttgtccttgtgcaaaatggcaactcttaaggaaaaactcattgcaccagttgcggaagaagaggcaacagttccaaacaataagatcactgtagtgggtgttggacaagttggtatggcgtgtgctatcagcattctgggaaagtctctggctgatgaacttgctcttgtggatgttttggaagataagcttaaaggagaaatgatggatctgcagcatgggagcttatttcttcagacacctaaaattgtggcagataaagattattctgtgactgccaattctaagattgtagtggtaactgcaggagtccgtcagcaagaaggggagagtcggctcaatctggtgcagagaaatgttaatgtcttcaaattcattattcctcagatcgtcaagtacagtcctgattgcatcataattgtggtttccaacccagtggacattcttacgtatgttacctggaaactaagtggattacccaaacaccgcgtgattggaagtggatgtaatctggattctgctagatttcgctaccttatggctgaaaaacttggcattcatcccagcagctgccatggatggattttgggggaacatggcgactcaagtgtggctgtgtggagtggtgtgaatgtggcaggtgtttctctccaggaattgaatccagaaatgggaactgacaatgatagtgaaaattggaaggaagtgcataagatggtggttgaaagtgcctatgaagtcatcaagctaaaaggatataccaactgggctattggattaagtgtggctgatcttattgaatccatgttgaaaaatctatccaggattcatcccgtgtcaacaatggtaaaggggatgtatggcattgagaatgaagtcttcctgagccttccatgtatcctcaatgcccggggattaaccagcgttatcaaccagaagctaaaggatgatgaggttgctcagctcaagaaaagtgcagataccctgtgggacatccagaaggacctaaaagacctgtgactagtgagctctaggctgtagaaatttaaaaactacaatgtgattaactcgagcctttagttttcatccatgtacatggatcacagtttgctttgatcttcttcaatatgtgaatttgggctcacagaatcaaagcctatgcttggtttaatgcttgcaatctgagctcttgaacaaataaaattaactattgtagtgtg

SEQ ID NO: 15593 - DNA, 732 bp, Homo sapiens
  source 1..732: mol_type = unassigned DNA
gcagagccggcgccggaggagacgcacgcagctgactttgtcttctccgcacgactgttacagaggtctccagagccttctctctcctggagccatgcgccagttctttcctgcagggcctcttttctggatgcttaggggcttcgtttactttaccagccttgggtgctccgagtaaggaagtcctagacttgtccccacagaccttactcggggagatctctagcttctgcatgccctcgtgatctgctgttctttgctgccggtgccctgaggaaaagatggtttgtgcgcaccgcgagcagtacaagctgcatgcaaaatggcaactcttaaggaaaaactcattgcaccagttgcggaagaagaggcaacagttccaaacaataagatcactgtagtgggtgttggacaagttggtatggcgtgtgctatcagcattctgggaaagtctctggctgatgaacttgctcttgtggatgttttggaagataagcttaaaggagaaatgatggatctgcagcatgggagcttatttcttcagacacctaaaattgtggcagataaagattattctgtgactgccaattctaagattgtagtggtaactgcaggagtccgtcagcaagaaggggagagtcggctcaatctggtgcagagaaatgttaatgtcttcaaattcattattcctcagatcgtcaagtacagtcctgattgcatcataattgtggt

SEQ ID NO: 15594 - DNA, 487 bp, Homo sapiens
  source 1..487: mol_type = unassigned DNA
agaagccagagcagacagcaatttcgggacattgcagagctgtagtagatctgtactggtctgcagacagacaataatttgcactaagaccaggaagacgttctgtgaggaagacataggtggaaatacggaaagcagaaaagacaacttcggggtggccgggagataacagaagtgcaaaatggcaactcttaaggaaaaactcattgcaccagttgcggaagaagaggcaacagttccaaacaataagatcactgtagtgggtgttggacaagttggtatggcgtgtgctatcagcattctgggaaagtctctggctgatgaacttgctcttgtggatgttttggaagataagcttaaaggagaaatgatggatctgcagcatgggagcttatttcttcagacacctaaaattgtggcagataaagattattctgtgactgccaattctaagattgtagtggtaactgcaggagtccgtcagcaa

SEQ ID NO: 15595 - DNA, 1256 bp, Homo sapiens
  source 1..1256: mol_type = unassigned DNA
ggcaaccgtcgacgggcttagcgcctcaactgtcgttggtgtatttttctggtgtcacttctgtgccttccttcaaaggtggtgctttgtccctgtgggtcatctgtactgattgcgccaagcaaagcatttgttctccaaatgtcaactgtcaaggagcagctaattgagaagctaattgaggatgatgaaaactcccagtgtaaaattactattgttggaactggtgccgtaggcatggcttgtgctattagtatcttactgaaggatttggctgatgaacttgcccttgttgatgttgcattggacaaactgaagggagaaatgatggatcttcagcatggcagtcttttctttagtacttcaaagattacttctggaaaagattacagtgtatctgcaaactccagaatagttattgtcacagcaggtgcaaggcagcaggagggagaaactcgccttgccctggtccaacgtaatgtggctataatgaaatcaatcattcctgccatagtccattatagtcctgattgtaaaattcttgttgtttcaaatccagtggatattttgacatatatagtctggaagataagtggcttacctgtaactcgtgtaattggaagtggttgtaatctagactctgcccgtttccgttacctaattggagaaaagttgggtgtccaccccacaagctgccatggttggattattggagaacatggtgattctagtgtgcccttatggagtggggtgaatgttgctggtgttgctctgaagactctggaccctaaattaggaacggattcagataaggaacactggaaaaatatccataaacaagttattcaaagtgcctatgaaattatcaagctgaaggggtatacctcttgggctattggactgtctgtgatggatttggtaggatccattttgaaaaatcttaggagagtgcacccagtttccaccatggttaagggattatatggaataaaagaagaactctttctcagtatcccttgtgtcttggggcggaatggtgtctcagatgttgtgaaaattaacttgaattctgaggaggaggcccttttcaagaagagtgcagaaacactttggaatattcaaaaggatctaatattttaaattaaagccttctaatgttccactgtttggagaacagaagatagcaggctgtgtattttaaattttgaaagtattttcatttgatctttaaaaaataaaaacaaattggagacctg

SEQ ID NO: 15596 - DNA, 2041 bp, Homo sapiens
  source 1..2041: mol_type = unassigned DNA
gtgcgtgtctcgagtcgcacggagggcaaccgtcgacgggcttagcgcctcaactgtcgttggtgtatttttctggtgtcacttctgtgccttccttcaaaggttctccaaatgtcaactgtcaaggagcagctaattgagaagctaattgaggatgatgaaaactcccagtgtaaaattactattgttggaactggtgccgtaggcatggcttgtgctattagtatcttactgaaggatttggctgatgaacttgcccttgttgatgttgcattggacaaactgaagggagaaatgatggatcttcagcatggcagtcttttctttagtacttcaaagattacttctggaaaagattacagtgtatctgcaaactccagaatagttattgtcacagcaggtgcaaggcagcaggagggagaaactcgccttgccctggtccaacgtaatgtggctataatgaaatcaatcattcctgccatagtccattatagtcctgattgtaaaattcttgttgtttcaaatccagtggatattttgacatatatagtctggaagataagtggcttacctgtaactcgtgtaattggaagtggttgtaatctagactctgcccgtttccgttacctaattggagaaaagttgggtgtccaccccacaagctgccatggttggattattggagaacatggtgattctagtgtgcccttatggagtggggtgaatgttgctggtgttgctctgaagactctggaccctaaattaggaacggattcagataaggaacactggaaaaatatccataaacaagttattcaaagtgcctatgaaattatcaagctgaaggggtatacctcttgggctattggactgtctgtgatggatttggtaggatccattttgaaaaatcttaggagagtgcacccagtttccaccatggttaagggattatatggaataaaagaagaactctttctcagtatcccttgtgtcttggggcggaatggtgtctcagatgttgtgaaaattaacttgaattctgaggaggaggcccttttcaagaagagtgcagaaacactttggaatattcaaaaggatctaatattttaaattaaagccttctaatgttccactgtttggagaacagaagatagcaggctgtgtattttaaattttgaaagtattttcatttgatctttaaaaaataaaaacaaattggagacctgtgacataactctagtctctcaagattagaacgagcaaatggtaaagagattttcctctttaagaatcatttatagctctattctaatgatacccaatctgtacaggtgtaagttatacttctgaggtatgtcacatatgttagagtgccttcagatgtagtagaatatgtataatcactataatacagagctttgattcttttcacaaaccaagccctttttctagtattacaattttatcttgtactttcatccgttagagtaccagcatattcacttcattacattagcgtcatatgtttatgtataatcattataaatgtggccgggcactgcagcctgggtgaaagagtgaggctctgtctcaaaaaaaatcattataaatgcttatttttaagaccatatatatcaaaaagaaataaaaagctgagtgctgtggctcatggctgtaatcccagtgctttgggagggtgaggcaagaggatcacatgagtccaggagtttgagaccagccttggcaacatagcaacaccccatctctacaaaaataaagaaattagatgtggtggcctgcatctgtagtccagctacttgggagactgagaccagtagataacttgagcccaggagttcaaggctatgattgtgtcactgcactccagcctgggccacagaggaagactcagactcaaaagaagaagaagaacacagaagaaaagcagaaacaagaagaagatacagatgtaactttacgatgtaaaaaatctaaataagattgtattcaactctgcaagtattatactagtcatataaac

SEQ ID NO: 15597 - DNA, 2063 bp, Homo sapiens
  source 1..2063: mol_type = unassigned DNA
ggtcaccctgccacccagtgctcacaccctctggccagtgcctggctatggcccgactgctcaggtctgcaacctgggagctgttcccctggaggggctactgctcccagaaggcaaagggagagctctgcagggacttcgtagaggctctgaaggccgtggtgggcggctcccacgtgtccactgccgcggtggtccgagagcagcacgggcgcgatgagtcggtgcacaggtgcgaacctcctgatgctgtggtgtggccccagaacgtggagcaggtcagccggctggcagccctgtgctatcgccaaggtgtgcccatcatcccattcggcaccggcaccgggcttgagggtggcgtctgtgctgtgcagggcggcgtctgcgttaacctgacgcatatggaccgaatcctggagctgaaccaggaggacttctctgtggtggtggagccaggtgtcacccgcaaagccctcaacgcccacctgcgggacagcggcctctggtttcccgtggacccaggcgcggacgcctctctctgtggcatggcggccaccggggcgtcggggaccaacgcggtccgctacggcaccatgcgggacaacgtgctcaacctggaggtggtgctgcccgacgggcggctgctgcacacggcgggccgaggccggcatttccgcttcggcttctggccagaaatccctcatcacacagcctggtactcaccttgtgtgtccctgggacgtaggaagagtgcagccggctacaacctcacggggctcttcgtgggctccgaggggacgctgggcctcatcacagccaccaccctgcgcctgcaccctgcccctgaggccacagtggccgccacgtgtgcgttccccagtgtccaggctgctgtggacagcactgtacacatcctccaggctgcagtgcccgtagcccgcattgagttcctggatgaagtcatgatggatgcctgcaacaggtacagcaagctgaattgcttagtggcgcccacactcttcctggagttccatggctcccagcaggcactggaggagcagctgcagcgcacagaggagatagtccagcagaacggagcctctgacttctcctgggccaaggaggccgaggagcgcagccggctttggacagcacggcacaatgcctggtacgcagccctggccacgcggccaggctgcaagggctactccacggatgtgtgtgtgcccatctcccggctgccggagatcgtggtgcagaccaaggaggatctgaatgcctcaggactcacaggaagcattgtcgggcatgtgggtgacggcaacttccactgcatcctgctggtcaaccctgatgacgccgaggaactgggcagggtcaaggcttttgcagaacagctgggcaggcgggcactggctctccacggaacgtgcacgggggagcatggcatcggaatgggcaagcggcagctgctgcaggaggaggtgggcgccgtgggcgtggagaccatgcggcagctcaaggccgtgctagacccccaaggcctcatgaatccaggcaaagtgctgtgaagggggtctgagcacttagcccacaagttccctgactacggagccggttctggaacttttcttcatgccacggcccctgcaaggaaatagatgctgaggcagtcttcctgccagcgagcccactgtatctgggcccaaggccagagggcccagagagaagcctgagcaccgtgttacctccctggccctctggctggccccaggagcctttggttcagtaaacgacccagggtggttcccagcaaagctgcttcctctctgctcctacgcatcctgtcctggcgggaagagagcgtctgggtccattcaagactctgatgacacccctccccgaggcctcccactgccggggtcccaggacccttcccccttcacctggtgacaggaacactcctttcctggtatggaacgtgagctcccgtgacatgatgataggtcttctccttggggcctcccccaataaatctgtaataaacctgaaacccacctaca

SEQ ID NO: 15598 - DNA, 1997 bp, Homo sapiens
  source 1..1997: mol_type = unassigned DNA
ggtcaccctgccacccagtgctcacaccctctggccagtgcctggctatggcccgactgctcaggtctgcaacctgggagctgttcccctggaggggctactgctcccagaaggcaaagggagagctctgcagggacttcgtagaggctctgaaggccgtggtgggcggctcccacgtgtccactgccgcggtggtccgagagcagcacgggcgcgatgagtcggtgcacaggtgcgaacctcctgatgctgtggtgtggccccagaacgtggagcaggtcagccggctggcagccctgtgctatcgccaaggtgtgcccatcatcccattcggcaccggcaccgggcttgagggtggcgtctgtgctgtgcagggcggcgtctgcgttaacctgacgcatatggaccgaatcctggagctgaaccaggaggacttctctgtggtggtggagccaggtgtcacccgcaaagccctcaacgcccacctgcgggacagcggcctctggtttcccgtggacccaggcgcggacgcctctctctgtggcatggcggccaccggggcgtcggggaccaacgcggtccgctacggcaccatgcgggacaacgtgctcaacctggaggtggtgctgcccgacgggcggctgctgcacacggcgggccgaggccggcatttccggaagagtgcagccggctacaacctcacggggctcttcgtgggctccgaggggacgctgggcctcatcacagccaccaccctgcgcctgcaccctgcccctgaggccacagtggccgccacgtgtgcgttccccagtgtccaggctgctgtggacagcactgtacacatcctccaggctgcagtgcccgtagcccgcattgagttcctggatgaagtcatgatggatgcctgcaacaggtacagcaagctgaattgcttagtggcgcccacactcttcctggagttccatggctcccagcaggcactggaggagcagctgcagcgcacagaggagatagtccagcagaacggagcctctgacttctcctgggccaaggaggccgaggagcgcagccggctttggacagcacggcacaatgcctggtacgcagccctggccacgcggccaggctgcaagggctactccacggatgtgtgtgtgcccatctcccggctgccggagatcgtggtgcagaccaaggaggatctgaatgcctcaggactcacaggaagcattgtcgggcatgtgggtgacggcaacttccactgcatcctgctggtcaaccctgatgacgccgaggaactgggcagggtcaaggcttttgcagaacagctgggcaggcgggcactggctctccacggaacgtgcacgggggagcatggcatcggaatgggcaagcggcagctgctgcaggaggaggtgggcgccgtgggcgtggagaccatgcggcagctcaaggccgtgctagacccccaaggcctcatgaatccaggcaaagtgctgtgaagggggtctgagcacttagcccacaagttccctgactacggagccggttctggaacttttcttcatgccacggcccctgcaaggaaatagatgctgaggcagtcttcctgccagcgagcccactgtatctgggcccaaggccagagggcccagagagaagcctgagcaccgtgttacctccctggccctctggctggccccaggagcctttggttcagtaaacgacccagggtggttcccagcaaagctgcttcctctctgctcctacgcatcctgtcctggcgggaagagagcgtctgggtccattcaagactctgatgacacccctccccgaggcctcccactgccggggtcccaggacccttcccccttcacctggtgacaggaacactcctttcctggtatggaacgtgagctcccgtgacatgatgataggtcttctccttggggcctcccccaataaatctgtaataaacctgaaacccacctacagct

SEQ ID NO: 15599 - DNA, 2978 bp, Homo sapiens
  source 1..2978: mol_type = unassigned DNA
cagggcatgcagtttttgccttccggaactagatcaggatcatgcatttaagctagaaaatggaaagaggagttgcttcacccacagtcagtgctattgcatcaaccaatccctgccattctgcagtttcctggtgtatctgcccggagtcacacagtctttcctgctaagcctcagcgtctcctccaagccacatcaaaatctttccttctgggcctttcccagaagtgaattcttgctggaaggtataaaagaccagctcctccaagcagagcaactccctggctgccgtgaaaagacaaggcactgggcagtgatgagggtccttctccatctcccagccctcctggcttccctcatcttgcttcaggctgcagcatctaccacaagagcgcagactaccagaacctctgccatctccgatactgtgagtcaggccaaggtccaagtcaacaaggccttcctggactcccgaaccaggctgaagaccgccatgagctctgagactcccaccagccgacagctctcagaatacctcaagcatgccaaaggccggacgcgcacagccatccgcaatggacaggtgtgggaggagtctttaaagagactgaggcagaaggcatccttgaccaatgtcacagatcccagcctggacttgacttcactgtctctggaggtgggctgtggtgctcctgctcccgtggtgagatgcgacccgtgcagcccttaccgcaccattacgggagactgcaataacaggaggaagcctgcgctgggcgccgccaacagggctctggcgcgctggctgcccgcggagtacgaggacgggctctccctgcccttcggctggacgccggggaagacgcgcaacggcttccctctcccgctggcccgggaggtatctaacaagattgttggctatctgaatgaggagggtgttctggaccaaaacaggtccctgctcttcatgcagtggggtcagattgtggatcatgacctggactttgcccctgacaccgagctggggagtagcgagtactccaaagcccagtgtgatgagtactgtatccagggagacaactgcttccccatcatgttcccacccaatgaccccaaggcggggactcaagggaaatgcatgcctttcttccgagctgggttcgtctgccccactccaccctacaagtccctggcccgagagcagatcaacgctctgacctccttcctggatgccagctttgtgtacagctccgagccaagcctggccagccgcctccgcaacctcagcagccccctgggcctcatggctgtcaaccaggaggtctcagaccatggactaccctacctgccctatgacagcaagaagccaagcccctgtgagttcatcaacaccactgcccgtgtgccctgcttcctggcaggagattctcgagcctcagagcatattctgctggccacatcccacaccctctttctccgcgagcataaccggctggccagagaactaaagagactcaaccctcagtgggatggagagaagctctaccaggaagcccggaaaatcctgggagccttcgtgcagattatcacctttagggactacctacccattttgctaggtgaccacatgcagaagtggatacccccatatcaaggctacagtgaatctgtggatcccagaatttccaatgtcttcaccttcgccttccgctttggccacttggaggtcccctctagtatgttccgcctggatgagaattatcagccatgggggccagaaccagaactccccctccacaccctcttcttcaacacttggaggatggtcaaagatggtggaattgatcctctggtgcggggcctgctggccaagaaatccaagctgatgaaacagaataaaatgatgactggagagctgcgcaacaagcttttccagccaactcacaggatccatggctttgacctggctgccatcaacacacagcgttgccgggaccatgggcaacctgggtacaattcctggagagccttctgtgacctctcacagccgcagacactagaggagttgaacacagtgctgaagagcaagatgctggccaagaagttactgggtctctacgggacccctgacaacatcgacatctggataggggccattgctgagccgctggtggaaaggggtcgggtggggcctctcctggcctgcctcttgggcaagcagttccagcagatccgtgatggagacaggttctggtgggaaaaccctggggtcttcacgaacgagcagaaggactctctacagaaaatgtccttctcacgccttgtctgtgacaacacccgcatcaccaaggtcccacgggacccattctgggccaacagctacccctatgacttcgtggattgctcagccatcgacaagctggacctgtcaccctgggcctcagtgaagaattaggggcccgcgctgcacaggaaagttccctttggtccacagggccatttcaagcaagttcaatgacctggtcccttagagctccatatcccagtcccagcccttctttgcagctgggcctctctatacccctggatgaacagcttgctcaggccccagggtggctgcctcggccctcccagctcttacactcagctccagtggcttctcctttctgtcaagacttagccccgctgagatgcccttctgctccagcttgctggatgttacctgtcctcttccctccacaagtcttggcccttaacctttatctttcttcctgtcctctcacctagattgtaagctccctgggccaggacttcagcctgcctccgagggtcccctgtggcacctagcatggtgcacagcacattagaagtgctcaaaaacatctgatgactgactaaagatgctaggcgtgacaccgttccctccaaaagcagacctcggaatcactgccaaataagtaactagacgtttacaggcc

SEQ ID NO: 15600 - DNA, 1897 bp, Homo sapiens
  source 1..1897: mol_type = unassigned DNA
tgctttcctgtccagttcccacccaatgaccccaaggcggggactcaagggaaatgcatgcctttcttccgagctgggttcgtctgccccactccaccctacaagtccctggcccgagagcagatcaacgctctgacctccttcctggatgccagctttgtgtacagctccgagccaagcctggccagccgcctccgcaacctcagcagccccctgggcctcatggctgtcaaccaggaggtctcagaccatggactaccctacctgccctatgacagcaagaagccaagcccctgtgagttcatcaacaccactgcccgtgtgccctgcttcctggcaggagattctcgagcctcagagcatattctgctggccacatcccacaccctctttctccgcgagcataaccggctggccagagaactaaagagactcaaccctcagtgggatggagagaagctctaccaggaagcccggaaaatcctgggagccttcgtgcagattatcacctttagggactacctacccattttgctaggtgaccacatgcagaagtggatacccccatatcaaggctacagtgaatctgtggatcccagaatttccaatgtcttcaccttcgccttccgctttggccacttggaggtcccctctagtatgttccgcctggatgagaattatcagccatgggggccagaaccagaactccccctccacaccctcttcttcaacacttggaggatggtcaaagatggtggaattgatcctctggtgcggggcctgctggccaagaaatccaagctgatgaaacagaataaaatgatgactggagagctgcgcaacaagcttttccagccaactcacaggatccatggctttgacctggctgccatcaacacacagcgttgccgggaccatgggcaacctgggtacaattcctggagagccttctgtgacctctcacagccgcagacactagaggagttgaacacagtgctgaagagcaagatgctggccaagaagttactgggtctctacgggacccctgacaacatcgacatctggataggggccattgctgagccgctggtggaaaggggtcgggtggggcctctcctggcctgcctcttgggcaagcagttccagcagatccgtgatggagacaggttctggtgggaaaaccctggggtcttcacgaacgagcagaaggactctctacagaaaatgtccttctcacgccttgtctgtgacaacacccgcatcaccaaggtcccacgggacccattctgggccaacagctacccctatgacttcgtggattgctcagccatcgacaagctggacctgtcaccctgggcctcagtgaagaattaggggcccgcgctgcacaggaaagttccctttggtccacagggccatttcaagcaagttcaatgacctggtcccttagagctccatatcccagtcccagcccttctttgcagctgggcctctctatacccctggatgaacagcttgctcaggccccagggtggctgcctcggccctcccagctcttacactcagctccagtggcttctcctttctgtcaagacttagccccgctgagatgcccttctgctccagcttgctggatgttacctgtcctcttccctccacaagtcttggcccttaacctttatctttcttcctgtcctctcacctagattgtaagctccctgggccaggacttcagcctgcctccgagggtcccctgtggcacctagcatggtgcacagcacattagaagtgctcaaaaacatctgatgactgactaaagatgctaggcgtgacaccgttccctccaaaagcagacctcggaatcactgccaaataagtaactagacgtttacaggcc

SEQ ID NO: 15601 - DNA, 2729 bp, Homo sapiens
  source 1..2729: mol_type = unassigned DNA
cagggcatgcagtttttgccttccggaactagatcaggatcatgcatttaagctagaaaatggaaagaggagttgcttcacccacagtcagtgctattgcatcaaccaatccctgccattctgcagtttcctggtgtatctgcccggagtcacacagtctttcctgctaagcctcagcgtctcctccaagccacatcaaaatctttccttctgggcctttcccagaagtgaattcttgctggaaggtataaaagaccagctcctccaagcagagcaactccctggctgccgtgaaaagacaaggcactgggcagtgatgagggtccttctccatctcccagccctcctggcttccctcatcttgcttcaggctgcagcatctaccacaagagatcccagcctggacttgacttcactgtctctggaggtgggctgtggtgctcctgctcccgtggtgagatgcgacccgtgcagcccttaccgcaccattacgggagactgcaataacaggaggaagcctgcgctgggcgccgccaacagggctctggcgcgctggctgcccgcggagtacgaggacgggctctccctgcccttcggctggacgccggggaagacgcgcaacggcttccctctcccgctggcccgggaggtatctaacaagattgttggctatctgaatgaggagggtgttctggaccaaaacaggtccctgctcttcatgcagtggggtcagattgtggatcatgacctggactttgcccctgacaccgagctggggagtagcgagtactccaaagcccagtgtgatgagtactgtatccagggagacaactgcttccccatcatgttcccacccaatgaccccaaggcggggactcaagggaaatgcatgcctttcttccgagctgggttcgtctgccccactccaccctacaagtccctggcccgagagcagatcaacgctctgacctccttcctggatgccagctttgtgtacagctccgagccaagcctggccagccgcctccgcaacctcagcagccccctgggcctcatggctgtcaaccaggaggtctcagaccatggactaccctacctgccctatgacagcaagaagccaagcccctgtgagttcatcaacaccactgcccgtgtgccctgcttcctggcaggagattctcgagcctcagagcatattctgctggccacatcccacaccctctttctccgcgagcataaccggctggccagagaactaaagagactcaaccctcagtgggatggagagaagctctaccaggaagcccggaaaatcctgggagccttcgtgcagattatcacctttagggactacctacccattttgctaggtgaccacatgcagaagtggatacccccatatcaaggctacagtgaatctgtggatcccagaatttccaatgtcttcaccttcgccttccgctttggccacttggaggtcccctctagtatgttccgcctggatgagaattatcagccatgggggccagaaccagaactccccctccacaccctcttcttcaacacttggaggatggtcaaagatggtggaattgatcctctggtgcggggcctgctggccaagaaatccaagctgatgaaacagaataaaatgatgactggagagctgcgcaacaagcttttccagccaactcacaggatccatggctttgacctggctgccatcaacacacagcgttgccgggaccatgggcaacctgggtacaattcctggagagccttctgtgacctctcacagccgcagacactagaggagttgaacacagtgctgaagagcaagatgctggccaagaagttactgggtctctacgggacccctgacaacatcgacatctggataggggccattgctgagccgctggtggaaaggggtcgggtggggcctctcctggcctgcctcttgggcaagcagttccagcagatccgtgatggagacaggttctggtgggaaaaccctggggtcttcacgaacgagcagaaggactctctacagaaaatgtccttctcacgccttgtctgtgacaacacccgcatcaccaaggtcccacgggacccattctgggccaacagctacccctatgacttcgtggattgctcagccatcgacaagctggacctgtcaccctgggcctcagtgaagaattaggggcccgcgctgcacaggaaagttccctttggtccacagggccatttcaagcaagttcaatgacctggtcccttagagctccatatcccagtcccagcccttctttgcagctgggcctctctatacccctggatgaacagcttgctcaggccccagggtggctgcctcggccctcccagctcttacactcagctccagtggcttctcctttctgtcaagacttagccccgctgagatgcccttctgctccagcttgctggatgttacctgtcctcttccctccacaagtcttggcccttaacctttatctttcttcctgtcctctcacctagattgtaagctccctgggccaggacttcagcctgcctccgagggtcccctgtggcacctagcatggtgcacagcacattagaagtgctcaaaaacatctgatgactgactaaagatgctaggcgtgacaccgttccctccaaaagcagacctcggaatcactgccaaataagtaactagacgtttacaggcc

SEQ ID NO: 15602 - DNA, 2350 bp, Homo sapiens
  source 1..2350: mol_type = unassigned DNA
gctaagcctcagcgtctcctccaagccacatcaaaatctttccttctgggcctttcccagaagtgaattcttgctggaaggtataaaagaccagctcctccaagcagagcaactccctggctgccgtgaaaagacaaggcactgggcagtgatgagggtccttctccatctcccagccctcctggcttccctcatcttgcttcaggctgcagcatctaccacaagaggctgaagaccgccatgagctctgagactcccaccagccgacagctctcagaatacctcaagcatgccaaaggccggacgcgcacagccatccgcaatggacaggtgtgggaggagtctttaaagagactgaggcagaaggcatccttgaccaatgtcacagatcccagcctggacttgacttcactgtctctggaggtgggctgtggtgctcctgctcccgtggtgagatgcgacccgtgcagcccttaccgcaccattacgggagactgcaataacaggaggaagcctgcgctgggcgccgccaacagggctctggcgcgctggctgcccgcggagtacgaggacgggctctccctgcccttcggctggacgccggggaagacgcgcaacggcttccctctcccgctggcccgggaggtatctaacaagattgttggctatctgaatgaggagggtgttctggaccaaaacaggtccctgctcttcatgcagtggggtcagattgtggatcatgacctggactttgcccctgacaccgagctggggagtagcgagtactccaaagcccagtgtgatgagtactgtatccagggagacaactgcttccccatcatgttcccacccaatgaccccaaggcggggactcaagggaaatgcatgcctttcttccgagctgggttcgtctgccccactccaccctacaagtccctggcccgagagcagatcaacgctctgacctccttcctggatgccagctttgtgtacagctccgagccaagcctggccagccgcctccgcaacctcagcagccccctgggcctcatggctgtcaaccaggaggtctcagaccatggactaccctacctgccctatgacagcaagaagccaagcccctgtgagttcatcaacaccactgcccgtgtgccctgcttcctggcaggagattctcgagcctcagagcatattctgctggccacatcccacaccctctttctccgcgagcataaccggctggccagagaactaaagagactcaaccctcagtgggatggagagaagctctaccaggaagcccggaaaatcctgggagccttcgtgcagattatcacctttagggactacctacccattttgctaggtgaccacatgcagaagtggatacccccatatcaaggctacagtgaatctgtggatcccagaatttccaatgtcttcaccttcgccttccgctttggccacttggaggtcccctctagtatgttccgcctggatgagaattatcagccatgggggccagaaccagaactccccctccacaccctcttcttcaacacttggaggatggtcaaagatggtggaattgatcctctggtgcggggcctgctggccaagaaatccaagctgatgaaacagaataaaatgatgactggagagctgcgcaacaagcttttccagccaactcacaggatccatggctttgacctggctgccatcaacacacagcgttgccgggaccatgggcaacctgggtacaattcctggagagccttctgtgacctctcacagccgcagacactagaggagttgaacacagtgctgaagagcaagatgctggccaagaagttactgggtctctacgggacccctgacaacatcgacatctggataggggccattgctgagccgctggtggaaaggggtcgggtggggcctctcctggcctgcctcttgggcaagcagttccagcagatccgtgatggagacaggttctggtgggaaaaccctggggtcttcacgaacgagcagaaggactctctacagaaaatgtccttctcacgccttgtctgtgacaacacccgcatcaccaaggtcccacgggacccattctgggccaacagctacccctatgacttcgtggattgctcagccatcgacaagctggacctgtcaccctgggcctcagtgaagaattaggggcccgcgctgcacaggaaagttccctttggtccacagggccatttcaagcaagttcaatgacctggtcccttagagctccatatcccagtcccagcccttctttgcagctgggcctctctatacccctggatgaacagcttgctca

SEQ ID NO: 15603 - DNA, 2979 bp, Homo sapiens
  source 1..2979: mol_type = unassigned DNA
gactcctaggggcttgcagactagtgggagagaaagaacatcgcagcagccaggcagaaccaggacaggtgaggtgcaggctggctttcctctcgcagcgcggtgtggagtcctgtcctgcctcagggcttttcggagcctggatcctcaaggaacaagtagacctggccgcggggagtggggagggaaggggtgtctattgggcaacagggcggggcaaagccctgaataaaggggcgcagggcaggcgcaagtggcagagccttcgtttgccaagtcgcctccagaccgcagacatgaaacttgtcttcctcgtcctgctgttcctcggggccctcggactgtgtctggctggccgtaggaggagtgttcagtggtgcgccgtatcccaacccgaggccacaaaatgcttccaatggcaaaggaatatgagaaaagtgcgtggccctcctgtcagctgcataaagagagactcccccatccagtgtatccaggccattgcggaaaacagggccgatgctgtgacccttgatggtggtttcatatacgaggcaggcctggccccctacaaactgcgacctgtagcggcggaagtctacgggaccgaaagacagccacgaactcactattatgccgtggctgtggtgaagaagggcggcagctttcagctgaacgaactgcaaggtctgaagtcctgccacacaggccttcgcaggaccgctggatggaatgtccctatagggacacttcgtccattcttgaattggacgggtccacctgagcccattgaggcagctgtggccaggttcttctcagccagctgtgttcccggtgcagataaaggacagttccccaacctgtgtcgcctgtgtgcggggacaggggaaaacaaatgtgccttctcctcccaggaaccgtacttcagctactctggtgccttcaagtgtctgagagacggggctggagacgtggcttttatcagagagagcacagtgtttgaggacctgtcagacgaggctgaaagggacgagtatgagttactctgcccagacaacactcggaagccagtggacaagttcaaagactgccatctggcccgggtcccttctcatgccgttgtggcacgaagtgtgaatggcaaggaggatgccatctggaatcttctccgccaggcacaggaaaagtttggaaaggacaagtcaccgaaattccagctctttggctcccctagtgggcagaaagatctgctgttcaaggactctgccattgggttttcgagggtgcccccgaggatagattctgggctgtaccttggctccggctacttcactgccatccagaacttgaggaaaagtgaggaggaagtggctgcccggcgtgcgcgggtcgtgtggtgtgcggtgggcgagcaggagctgcgcaagtgtaaccagtggagtggcttgagcgaaggcagcgtgacctgctcctcggcctccaccacagaggactgcatcgccctggtgctgaaaggagaagctgatgccatgagtttggatggaggatatgtgtacactgcaggcaaatgtggtttggtgcctgtcctggcagagaactacaaatcccaacaaagcagtgaccctgatcctaactgtgtggatagacctgtggaaggatatcttgctgtggcggtggttaggagatcagacactagccttacctggaactctgtgaaaggcaagaagtcctgccacaccgccgtggacaggactgcaggctggaatatccccatgggcctgctcttcaaccagacgggctcctgcaaatttgatgaatatttcagtcaaagctgtgcccctgggtctgacccgagatctaatctctgtgctctgtgtattggcgacgagcagggtgagaataagtgcgtgcccaacagcaacgagagatactacggctacactggggctttccggtgcctggctgagaatgctggagacgttgcatttgtgaaagatgtcactgtcttgcagaacactgatggaaataacaatgaggcatgggctaaggatttgaagctggcagactttgcgctgctgtgcctcgatggcaaacggaagcctgtgactgaggctagaagctgccatcttgccatggccccgaatcatgccgtggtgtctcggatggataaggtggaacgcctgaaacaggtgttgctccaccaacaggctaaatttgggagaaatggatctgactgcccggacaagttttgcttattccagtctgaaaccaaaaaccttctgttcaatgacaacactgagtgtctggccagactccatggcaaaacaacatatgaaaaatatttgggaccacagtatgtcgcaggcattactaatctgaaaaagtgctcaacctcccccctcctggaagcctgtgaattcctcaggaagtaaaaccgaagaagatggcccagctccccaagaaagcctcagccattcactgcccccagctcttctccccaggtgtgttggggccttggcctcccctgctgaaggtggggattgcccatccatctgcttacaattccctgctgtcgtcttagcaagaagtaaaatgagaaattttgttgatattctctccttataaagtgtcactcatcttttctagaattttatactgaaatcacatgcctgacaaaatacctgtacagttggaccttcccttccaagtttttcaggtccagcccctcctctttcttgcagtcttgggtatgatgcccaagggtctggaatttaaggccaggccaagcaccggttttcctaaggggatcttgttggttattcacatagctgtctcagtgcacgtgcatgtatgtgcctgggagtgtgtgcgtgtccccaaggcagggcaggaagagcaagcataggaattataactgaaatgtaggttcagttgctcatcacttgcagagtctaattaacaagagctaggtttggtataaag

SEQ ID NO: 15604 - DNA, 2494 bp, Homo sapiens
  source 1..2494: mol_type = unassigned DNA
gtccaggattctggctcagagttgcaccactgggttttatattcacttggatctttagttgttttggcgcctactgaggtctgaagtttgaatcctgcagtcaattgggatggtggcttgtaccccaaagtgccattgcaacccttgtccttcctgaggaaagggtggcagttgccctgtggaattcctgccctgctccccgtgggtgtccaggctgacagaagttgggactgtgtctggctggccgtaggaggagtgttcagtggtgcgccgtatcccaacccgaggccacaaaatgcttccaatggcaaaggaatatgagaaaagtgcgtggccctcctgtcagctgcataaagagagactcccccatccagtgtatccaggccattgcggaaaacagggccgatgctgtgacccttgatggtggtttcatatacgaggcaggcctggccccctacaaactgcgacctgtagcggcggaagtctacgggaccgaaagacagccacgaactcactattatgccgtggctgtggtgaagaagggcggcagctttcagctgaacgaactgcaaggtctgaagtcctgccacacaggccttcgcaggaccgctggatggaatgtccctatagggacacttcgtccattcttgaattggacgggtccacctgagcccattgaggcagctgtggccaggttcttctcagccagctgtgttcccggtgcagataaaggacagttccccaacctgtgtcgcctgtgtgcggggacaggggaaaacaaatgtgccttctcctcccaggaaccgtacttcagctactctggtgccttcaagtgtctgagagacggggctggagacgtggcttttatcagagagagcacagtgtttgaggacctgtcagacgaggctgaaagggacgagtatgagttactctgcccagacaacactcggaagccagtggacaagttcaaagactgccatctggcccgggtcccttctcatgccgttgtggcacgaagtgtgaatggcaaggaggatgccatctggaatcttctccgccaggcacaggaaaagtttggaaaggacaagtcaccgaaattccagctctttggctcccctagtgggcagaaagatctgctgttcaaggactctgccattgggttttcgagggtgcccccgaggatagattctgggctgtaccttggctccggctacttcactgccatccagaacttgaggaaaagtgaggaggaagtggctgcccggcgtgcgcgggtcgtgtggtgtgcggtgggcgagcaggagctgcgcaagtgtaaccagtggagtggcttgagcgaaggcagcgtgacctgctcctcggcctccaccacagaggactgcatcgccctggtgctgaaaggagaagctgatgccatgagtttggatggaggatatgtgtacactgcaggcaaatgtggtttggtgcctgtcctggcagagaactacaaatcccaacaaagcagtgaccctgatcctaactgtgtggatagacctgtggaaggatatcttgctgtggcggtggttaggagatcagacactagccttacctggaactctgtgaaaggcaagaagtcctgccacaccgccgtggacaggactgcaggctggaatatccccatgggcctgctcttcaaccagacgggctcctgcaaatttgatgaatatttcagtcaaagctgtgcccctgggtctgacccgagatctaatctctgtgctctgtgtattggcgacgagcagggtgagaataagtgcgtgcccaacagcaacgagagatactacggctacactggggctttccggtgcctggctgagaatgctggagacgttgcatttgtgaaagatgtcactgtcttgcagaacactgatggaaataacaatgaggcatgggctaaggatttgaagctggcagactttgcgctgctgtgcctcgatggcaaacggaagcctgtgactgaggctagaagctgccatcttgccatggccccgaatcatgccgtggtgtctcggatggataaggtggaacgcctgaaacaggtgttgctccaccaacaggctaaatttgggagaaatggatctgactgcccggacaagttttgcttattccagtctgaaaccaaaaaccttctgttcaatgacaacactgagtgtctggccagactccatggcaaaacaacatatgaaaaatatttgggaccacagtatgtcgcaggcattactaatctgaaaaagtgctcaacctcccccctcctggaagcctgtgaattcctcaggaagtaaaaccgaagaagatggcccagctccccaagaaagcctcagccattcactgcccccagctcttctccccaggtgtgttggggccttggcctcccctgctgaaggtggggattgcccatccatctgcttacaattccctgctgtcgtcttagcaagaagtaaaatgagaaattttgttg

SEQ ID NO: 15605 - DNA, 1100 bp, Homo sapiens
  source 1..1100: mol_type = unassigned DNA
agagccttcgtttgccaagtcgcctccagaccgcagacatgaaacttgtcttcctcgtcctgctgttcctcggggccctcggactgtgtctggctggccgtaggaggagtgttcagtggtgcgccgtatcccaacccgaggccacaaaatgcttccaatggcaaaggaatatgagaaaagtgcgtggccctcctgtcagctgcataaagagagactcccccatccagtgtatccaggccattgcggaaaacagggccgatgctgtgacccttgatggtggtttcatatacgaggcaggcctggccccctacaaactgcgacctgtagcggcggaagtctacgggaccgaaagacagccagctgtgttcccggtgcagataaaggacagttccccaacctgtgtcgcctgtgtgcggggacaggggaaaacaaatgtgccttctcctcccaggaaccgtacttcagctactctggtgccttcaagtgtctgagagacggggctggagacgtggcttttatcagagagagcacagtgtttgaggacctgtcagacgaggctgaaagggacgagtatgagttactctgcccagacaacactcggaagccagtggacaagttcaaagactgccatctggcccgggtcccttctcatgccgttgtggcacgaagtgtgaatggcaaggaggatgccatctggaatcttctccgccaggcacaggaaaagtttggaaaggacaagtcaccgaaattccagctctttggctcccctagtgggcagaaagatctgctgttcaaggactctgccattgggttttcgagggtgcccccgaggatagattctgggctgtaccttggctccggctacttcactgccatccagaacttgaggaaaagtgaggaggaagtggctgcccggcgtgcgcgggtcgtgtggtgtgcggtgggcgagcaggagctgcgcaagtgtaaccagtggagtggcttgagcgaaggcagcgtgacctgctcctcggcctccaccacagaggactgcatcgccctggtgctgaaaggagaagctgatgccatgagtttggatggaggatatgtgtacactgcag

SEQ ID NO: 15606 - DNA, 2119 bp, Homo sapiens
  source 1..2119: mol_type = unassigned DNA
gtccctcccgggctggggttcccaccactctttcgggctccacatcccgggtcggagagaccgagaccttcgggccggtgcggtcattgcagctaggccggcgggaggcgggtgcgccaggagcgcggctcgcagtttggggtgggggcggtggcttttcagtcgcccgaggttcgggtgcaataaaggagcagctaatgtaatttacaaacagctcgggccgaacgcagcgcagcgcccggactgacaggcgcattaggcaggctaattccagccggctcctcctacccccggcccgctaattaatgagcttcccaacttacagccgcctgcattggacagacagagagtgaaagagagggcgagggagagggagagaaggagagagaaggggggagcagagaagagagaagagagagggagggagggagagcgagaacaggaggagagaacagaggcaaagaagagaggaaaaagggagaaaggagagagaaagagaaagaagtgccgctgcagataattgattacaccgcgatcaaggctaacttgttagcaatagtcaattgccccgtctctccgcctccctcgcagtccgggatcggcgccctcgcctcggctcttccaactgcggccgccaggacccggggccaggagccactgccgagccacctgacacctttaaatagcaccggggttggcgaaactggagccccgcgcagcgcgccccggctccggccccggattgctggaagccccagcagcagcggcgcccgcgtcagcgccctcttcccggggccccgcgctgttctcccctcctcagccgccgcgctaatcggccccgcgcccggcccgcgccctgcccagtgcggcctcctttccacccgccgctgcctgcccgcgccgtccggcgcccgagctgcccgcgggctgggtccccgcggcccgagccgccccggccgggaccccgaacaaggccgagatgacttccaaggaggacggcaaggcggcgccgggggaggagcggcggcgcagcccgctggaccacctgcctccgcctgccaactccaacaagccactgacgccgttcagcatcgaggacatcctcaacaagccgtctgtgcggagaagttactcgctgtgcggggcggcgcacctgctggccgccgcggacaagcacgcgcagggcggcttgcccctggcgggccgcgcgctgctctcgcagacctcgccgctgtgcgcgctggaggagctcgccagcaagacgtttaaggggctggaggtcagcgttctgcaggcagccgaaggccgcgacggtatgaccatctttgggcagcggcagacccctaagaagcggcgaaagtcgcgcacggccttcaccaaccaccagatctatgaattggaaaagcgctttctataccagaagtacctgtcccccgccgatcgcgaccaaatcgcgcagcagctgggcctcaccaacgcgcaagtcatcacctggttccagaatcggcgcgctaagctcaagcgggacctggaggagatgaaggccgacgtagagtccgccaagaaactgggccccagcgggcagatggacatcgtggcgctggccgaactcgagcagaactcggaggccacagccggcggtggcggcggctgcggcagggccaagtcgaggcccggctctccggtcctccccccaggcgccccgaaggccccgggcgctggcgccctgcagctctcgcctgcctctccgctcacggaccagccggccagcagccaggactgctcggaggacgaggaagacgaagagatcgacgtggacgattgagcggcgccccgggtcttccgccgccctgggctcctagcgctcgaaagcccaacgcctcccggaccggaccgccgaggggagctgggacctcctctgccaactcccgcctcctcccctgtccccggccccggactcggctcctggcagccgcctcttccctctcgaagcaataaacccaggctggccggccgggccggccgccaccagcggcctccgccgccccggaagccctcgccgtgcaattctgtatggcttctatataaatatttaaacctatatagcgggttcttccca

SEQ ID NO: 15607 - DNA, 1186 bp, Homo sapiens
  source 1..1186: mol_type = unassigned DNA
gatccaccgcggcccggggtggagaggtgggggcgcaggaggaggggcacacgggactcgggcccagagccgggggcgggtccgaggctgggggcccggattgggagccgagcactggggcccaggcgtttgcggagcctagcgcaacggacagccggaccgccccagcccggccgaccatgaactcgggacgcgagccccgaacaccccggacactcttaagcatcgcagacatcctagccccgcgcatggtcccccgagcaccctctgcgccgcagcttccagagtcgggtccgggtccaacgtcgccgctgtgcgcgctggaggagctgactagtaaaactttccgcggacttgacgcgcgcgctctgcagccctctgaagggcgggcaggtccggacgcgctgggccctggtcccttcggccgcaaacggcgcaagtcacgcactgcgttcaccgcgcaacaggtgctggagctggagcggcgcttcgtcttccagaagtacctggcgccgtccgagcgagacgggctagctacgcgactcggcctggccaacgcgcaggtggtcacttggttccagaaccggcgagccaagctcaagcgcgatgtggaggagatgcgcgccgacgtcgcctcgctacgcgcgttgtccccggaagtcctgtgcagcttagcactgcccgaaggcgctccagatcccggcctctgcctcggccctgccggccctgactcccggccccacctgtcagacgaggagatacaggtggacgattgaagacaaagccgccgccaatcctgggctctggggccctggactcctcacctcgcgctctgcctctggccagagttccagggtggaggaaggaggtccacttgggcctcttccggcccacagtccagacgctcacctttcccggtttttttgtaagtttgttttgttgtctgagacagggcctcgctctgtcgcccaggctggagtgccgtggagcgatcaccgctcactgcagtcgcgacctcctgggctcaagcgatcctcctgcctcaacctcccgactagctggcattacaggcgtgcagcaccaccccaggctaatttaaaaaacttttttttttagagaggaggtcccgctatgttgtccaggctactttcccaatatttgagaataaagtcgagactctgccgca

SEQ ID NO: 15608 - DNA, 3201 bp, Homo sapiens
  source 1..3201: mol_type = unassigned DNA
gaaataaaaacttttaaaaagcacctctcttctgccttattcttcctgcctcacactcatgctgtgtcctgccttcttcaaaaatcctctgagtttcattgtgaagaagggcctgtcctctatggccatgggccctcaatgtcttgccaaaggagaagggtagaggatccctatatgtgtgaaaccaggcctcccacaccactctttttggtgatgggaaggtttcctggaggggagctctcagctgtctttgtatgctgcagcatacagtgcgggtgcgggcctcttaggaggtttcctaattcagcggtggtgagaaggctagagttggacagtggctgctgcaggattgaacaagtgtgattttttaaagaaaaatccaaagaattgcattatagttttataacttgggggatggggacaaaaaggagggagaagtctaaaaaacaaatggagtggggccacaggaattgtcagaaatggaggcttaggctgtccatacaggattcagcaagtacttggggactgcgactagaagaagccagggtggggaataagtagctgaggaggagagggagctgatgtggaggagagcaagggcaacttcaaggaacaaaagggaagctgcaaggcaccagctccattaattcagcaaacattccttgtctgtatgccatgccagggtccttgttctatggttctctcagtggggtagctagaaacttgcccaacagacaggaacagacagaagccaaagcaaagaattcctgaaggtagccggcctgctgccaaacctgggacaaactgtatggaggcgcagcgtgtgtagccagaacccgagttaaaacctaggtcccaccctggccggtctgactccacggcttctaggggttggttgtgcgaagctgttgagggctgaaggcgctaaccatcaaagatggaggtcgggtggcagaagatggggtgggaggcagagagtgagtacagcgaaggcggcctcaactggataagaaaactccagacttgcgggaaaggcctgagctcgcattggacgctctggggtgccacagtcggacactgtttccgggagacctccgcctctccgcgcggatgaagaggctgcagacgccgaagaagagctcgagtgcgtggggcactgatggggatcggggtgggcacacagcagacggcctgggtacgcttctttcctgacatggtctccaaggttagcaaagcttccaaacgtttccaggcctccagcctggaatgcctctccccccgctccccgacctcttccaggaacaccccagctcagggctccccactccccttcctgcgaattgaagctctgtgggctttgcggtccgggcgggcgagtacctggcggccggggctgttctccaggagtttctgcgcgaaaagtttcctaggagtgacgggatggcgtgggctcaggggagagtagaaacgctcccgggggctttgcagggaccgagcagctgcgggagctggggagcagtctgactgggactccctggaaggccctgccattggggctgggcggcagctcggcgtcgaaaaagccgggtctgaagattaatgtgccgaggccggagaccctgaggaccaagtcacgggacttgcccttggtgactcacgccttgaggccgagcagcgcggaaggcgctcaggccggatctggggtggggcccagccgagccttggtcttgtctgtcagcagcggcagctgcactgcgtctcccaaggtggctgaagctggccagctgcgggctccgcgccgctcgtcccgggtctatgggtccattccccacgcccacccggaccccggggtcactcgggtctccgtctgtgccagggagggagaatcacgcccagggtcctctctggcttcgcgcgactgagaacgcgcccggacgcggcgcggcgctcctgagtcaaaggagaggtggcggcaggaccaccccagggcgccgtctgcacccccggacgcactcggccgtgctgcgcttccgggacaaggcgtcggttctcgcctgagggccaaaccttgcccctgcccaccttcctcacccccgccatttccaggactcacatccaaaggcgacagcaccaggatttgctcccgcctttggcacagaggaggacgggtccctctctcagcctggccagtctttcccagggcttgatgggaaaaaggacttccctagaagtgagtcttggggagttggggggagaaaagtgtcgaggagggcgtcggagtttcccaccgctggctgcttcccggcccgcacgcccgggagggtggcggtgggcgcgcagagatctttgcaaaacagcgtccagggcggaaaacaactcacaggcctgccgcccccaaaggcgggcaggtccggacgcgctgggccctggtcccttcggccgcaaacggcgcaagtcacgcactgcgttcaccgcgcaacaggtgctggagctggagcggcgcttcgtcttccagaagtacctggcgccgtccgagcgagacgggctagctacgcgactcggcctggccaacgcgcaggtggtcacttggttccagaaccggcgagccaagctcaagcgcgatgtggaggagatgcgcgccgacgtcgcctcgctacgcgcgttgtccccggaagtcctgtgcagcttagcactgcccgaaggcgctccagatcccggcctctgcctcggccctgccggccctgactcccggccccacctgtcagacgaggagatacaggtggacgattgaagacaaagccgccgccaatcctgggctctggggccctggactcctcacctcgcgctctgcctctggccagagttccagggtggaggaaggaggtccacttgggcctcttccggcccacagtccagacgctcacctttcccggtttttttgtaagtttgttttgttgtctgagacagggcctcgctctgtcgcccaggctggagtgccgtggagcgatcaccgctcactgcagtcgcgacctcctgggctcaagcgatcctcctgcctcaacctcccgactagctggcattacaggcgtgcagcaccaccccaggctaatttaaaaaacttttttttttagagaggaggtcccgctatgttgtccaggctactttcccaatatttgagaataaagtcgagactctgccgca

SEQ ID NO: 15609 - DNA, 1692 bp, Homo sapiens
  source 1..1692: mol_type = unassigned DNA
gccgcacctacaccagccaacccagatcccgaggtccgacagcgcccggcccagatccccacgcctgccaggagcaagccgagagccagccggccggcgcactccgactccgagcagtctctgtccttcgacccgagccccgcgccctttccgggacccctgccccgcgggcagcgctgccaacctgccggccatggagaccccgtcccagcggcgcgccacccgcagcggggcgcaggccagctccactccgctgtcgcccacccgcatcacccggctgcaggagaaggaggacctgcaggagctcaatgatcgcttggcggtctacatcgaccgtgtgcgctcgctggaaacggagaacgcagggctgcgccttcgcatcaccgagtctgaagaggtggtcagccgcgaggtgtccggcatcaaggccgcctacgaggccgagctcggggatgcccgcaagacccttgactcagtagccaaggagcgcgcccgcctgcagctggagctgagcaaagtgcgtgaggagtttaaggagctgaaagcgcgcaataccaagaaggagggtgacctgatagctgctcaggctcggctgaaggacctggaggctctgctgaactccaaggaggccgcactgagcactgctctcagtgagaagcgcacgctggagggcgagctgcatgatctgcggggccaggtggccaagcttgaggcagccctaggtgaggccaagaagcaacttcaggatgagatgctgcggcgggtggatgctgagaacaggctgcagaccatgaaggaggaactggacttccagaagaacatctacagtgaggagctgcgtgagaccaagcgccgtcatgagacccgactggtggagattgacaatgggaagcagcgtgagtttgagagccggctggcggatgcgctgcaggaactgcgggcccagcatgaggaccaggtggagcagtataagaaggagctggagaagacttattctgccaagctggacaatgccaggcagtctgctgagaggaacagcaacctggtgggggctgcccacgaggagctgcagcagtcgcgcatccgcatcgacagcctctctgcccagctcagccagctccagaagcagctggcagccaaggaggcgaagcttcgagacctggaggactcactggcccgtgagcgggacaccagccggcggctgctggcggaaaaggagcgggagatggccgagatgcgggcaaggatgcagcagcagctggacgagtaccaggagcttctggacatcaagctggccctggacatggagatccacgcctaccgcaagctcttggagggcgaggaggagaggctacgcctgtcccccagccctacctcgcagcgcagccgtggccgtgcttcctctcactcatcccagacacagggtgggggcagcgtcaccaaaaagcgcaaactggagtccactgagagccgcagcagcttctcacagcacgcacgcactagcgggcgcgtggccgtggaggaggtggacgaggatgaggatggagatgacctgctccatcaccaccacgtgagtggtagccgccgctgaggccgagcctgcactggggccacccagccaggcctgggggcagcctctccccagcctccccgtgccaaaaatcttttcattaaagaatgttttggaacttt

SEQ ID NO: 15610 - DNA, 3135 bp, Homo sapiens
  source 1..3135: mol_type = unassigned DNA
aggaggacctattagagcctttgccccggcgtcggtgactcagtgttcgcgggagcgccgcacctacaccagccaacccagatcccgaggtccgacagcgcccggcccagatccccacgcctgccaggagcaagccgagagccagccggccggcgcactccgactccgagcagtctctgtccttcgacccgagccccgcgccctttccgggacccctgccccgcgggcagcgctgccaacctgccggccatggagaccccgtcccagcggcgcgccacccgcagcggggcgcaggccagctccactccgctgtcgcccacccgcatcacccggctgcaggagaaggaggacctgcaggagctcaatgatcgcttggcggtctacatcgaccgtgtgcgctcgctggaaacggagaacgcagggctgcgccttcgcatcaccgagtctgaagaggtggtcagccgcgaggtgtccggcatcaaggccgcctacgaggccgagctcggggatgcccgcaagacccttgactcagtagccaaggagcgcgcccgcctgcagctggagctgagcaaagtgcgtgaggagtttaaggagctgaaagcgcgcaataccaagaaggagggtgacctgatagctgctcaggctcggctgaaggacctggaggctctgctgaactccaaggaggccgcactgagcactgctctcagtgagaagcgcacgctggagggcgagctgcatgatctgcggggccaggtggccaagcttgaggcagccctaggtgaggccaagaagcaacttcaggatgagatgctgcggcgggtggatgctgagaacaggctgcagaccatgaaggaggaactggacttccagaagaacatctacagtgaggagctgcgtgagaccaagcgccgtcatgagacccgactggtggagattgacaatgggaagcagcgtgagtttgagagccggctggcggatgcgctgcaggaactgcgggcccagcatgaggaccaggtggagcagtataagaaggagctggagaagacttattctgccaagctggacaatgccaggcagtctgctgagaggaacagcaacctggtgggggctgcccacgaggagctgcagcagtcgcgcatccgcatcgacagcctctctgcccagctcagccagctccagaagcagctggcagccaaggaggcgaagcttcgagacctggaggactcactggcccgtgagcgggacaccagccggcggctgctggcggaaaaggagcgggagatggccgagatgcgggcaaggatgcagcagcagctggacgagtaccaggagcttctggacatcaagctggccctggacatggagatccacgcctaccgcaagctcttggagggcgaggaggagaggctacgcctgtcccccagccctacctcgcagcgcagccgtggccgtgcttcctctcactcatcccagacacagggtgggggcagcgtcaccaaaaagcgcaaactggagtccactgagagccgcagcagcttctcacagcacgcacgcactagcgggcgcgtggccgtggaggaggtggatgaggagggcaagtttgtccggctgcgcaacaagtccaatgaggaccagtccatgggcaattggcagatcaagcgccagaatggagatgatcccttgctgacttaccggttcccaccaaagttcaccctgaaggctgggcaggtggtgacgatctgggctgcaggagctggggccacccacagcccccctaccgacctggtgtggaaggcacagaacacctggggctgcgggaacagcctgcgtacggctctcatcaactccactggggaaggctcccactgcagcagctcgggggaccccgctgagtacaacctgcgctcgcgcaccgtgctgtgcgggacctgcgggcagcctgccgacaaggcatctgccagcggctcaggagcccaggtgggcggacccatctcctctggctcttctgcctccagtgtcacggtcactcgcagctaccgcagtgtggggggcagtgggggtggcagcttcggggacaatctggtcacccgctcctacctcctgggcaactccagcccccgaacccagagcccccagaactgcagcatcatgtaatctgggacctgccaggcaggggtgggggtggaggcttcctgcgtcctcctcacctcatgcccaccccctgccctgcacgtcatgggagggggcttgaagccaaagaaaaataaccctttggtttttttcttctgtatttttttttctaagagaagttattttctacagtggttttatactgaaggaaaaacacaagcaaaaaaaaaaaaaagcatctatctcatctatctcaatcctaatttctcctcccttccttttccctgcttccaggaaactccacatctgccttaaaaccaaagagggcttcctctagaagccaagggaaaggggtgcttttatagaggctagcttctgcttttctgccctggctgctgcccccaccccggggaccctgtgacatggtgcctgagaggcaggcatagaggcttctccgccagcctcctctggacggcaggctcactgccaggccagcctccgagagggagagagagagagagaggacagcttgagccgggcccctgggcttggcctgctgtgattccactacacctggctgaggttcctctgcctgccccgcccccagtccccacccctgcccccagccccggggtgagtccattctcccaggtaccagctgcgcttgcttttctgtattttatttagacaagagatgggaatgaggtgggaggtggaagaagggagaagaaaggtgagtttgagctgccttccctagctttagaccctgggtgggctctgtgcagtcactggaggttgaagccaagtggggtgctgggaggagggagagggaggtcactggaaaggggagagcctgctggcacccaccgtggaggaggaaggcaagagggggtggaggggtgtggcagtggttttggcaaacgctaaagagcccttgcctccccatttcccatctgcaccccttctctcctccccaaatcaatacactagttgtttctacccctg

SEQ ID NO: 15611 - DNA, 2069 bp, Homo sapiens
  source 1..2069: mol_type = unassigned DNA
aggaggacctattagagcctttgccccggcgtcggtgactcagtgttcgcgggagcgccgcacctacaccagccaacccagatcccgaggtccgacagcgcccggcccagatccccacgcctgccaggagcaagccgagagccagccggccggcgcactccgactccgagcagtctctgtccttcgacccgagccccgcgccctttccgggacccctgccccgcgggcagcgctgccaacctgccggccatggagaccccgtcccagcggcgcgccacccgcagcggggcgcaggccagctccactccgctgtcgcccacccgcatcacccggctgcaggagaaggaggacctgcaggagctcaatgatcgcttggcggtctacatcgaccgtgtgcgctcgctggaaacggagaacgcagggctgcgccttcgcatcaccgagtctgaagaggtggtcagccgcgaggtgtccggcatcaaggccgcctacgaggccgagctcggggatgcccgcaagacccttgactcagtagccaaggagcgcgcccgcctgcagctggagctgagcaaagtgcgtgaggagtttaaggagctgaaagcgcgcaataccaagaaggagggtgacctgatagctgctcaggctcggctgaaggacctggaggctctgctgaactccaaggaggccgcactgagcactgctctcagtgagaagcgcacgctggagggcgagctgcatgatctgcggggccaggtggccaagcttgaggcagccctaggtgaggccaagaagcaacttcaggatgagatgctgcggcgggtggatgctgagaacaggctgcagaccatgaaggaggaactggacttccagaagaacatctacagtgaggagctgcgtgagaccaagcgccgtcatgagacccgactggtggagattgacaatgggaagcagcgtgagtttgagagccggctggcggatgcgctgcaggaactgcgggcccagcatgaggaccaggtggagcagtataagaaggagctggagaagacttattctgccaagctggacaatgccaggcagtctgctgagaggaacagcaacctggtgggggctgcccacgaggagctgcagcagtcgcgcatccgcatcgacagcctctctgcccagctcagccagctccagaagcagctggcagccaaggaggcgaagcttcgagacctggaggactcactggcccgtgagcgggacaccagccggcggctgctggcggaaaaggagcgggagatggccgagatgcgggcaaggatgcagcagcagctggacgagtaccaggagcttctggacatcaagctggccctggacatggagatccacgcctaccgcaagctcttggagggcgaggaggagaggctacgcctgtcccccagccctacctcgcagcgcagccgtggccgtgcttcctctcactcatcccagacacagggtgggggcagcgtcaccaaaaagcgcaaactggagtccactgagagccgcagcagcttctcacagcacgcacgcactagcgggcgcgtggccgtggaggaggtggatgaggagggcaagtttgtccggctgcgcaacaagtccaatgaggaccagtccatgggcaattggcagatcaagcgccagaatggagatgatcccttgctgacttaccggttcccaccaaagttcaccctgaaggctgggcaggtggtgacgatctgggctgcaggagctggggccacccacagcccccctaccgacctggtgtggaaggcacagaacacctggggctgcgggaacagcctgcgtacggctctcatcaactccactggggaagaagtggccatgcgcaagctggtgcgctcagtgactgtggttgaggacgacgaggatgaggatggagatgacctgctccatcaccaccacgtgagtggtagccgccgctgaggccgagcctgcactggggccacccagccaggcctgggggcagcctctccccagcctccccgtgccaaaaatcttttcattaaagaatgttttggaacttt

SEQ ID NO: 15612 - DNA, 1679 bp, Homo sapiens
  source 1..1679: mol_type = unassigned DNA
gtgtgctgcctggcaatggggaactctgagggctgatttgccagtgatgggaagagttagaaacaggatgcccagcccttctcgcctcaagaggccactgggatgcagccactcctgtgcttggggaacctggaggatgcaagggaaaggactggcactctgctggcacagcacccggcctggggcaggacacgggcgaagccagggtctcccctcaataccaagaaggagggtgacctgatagctgctcaggctcggctgaaggacctggaggctctgctgaactccaaggaggccgcactgagcactgctctcagtgagaagcgcacgctggagggcgagctgcatgatctgcggggccaggtggccaagcttgaggcagccctaggtgaggccaagaagcaacttcaggatgagatgctgcggcgggtggatgctgagaacaggctgcagaccatgaaggaggaactggacttccagaagaacatctacagtgaggagctgcgtgagaccaagcgccgtcatgagacccgactggtggagattgacaatgggaagcagcgtgagtttgagagccggctggcggatgcgctgcaggaactgcgggcccagcatgaggaccaggtggagcagtataagaaggagctggagaagacttattctgccaagctggacaatgccaggcagtctgctgagaggaacagcaacctggtgggggctgcccacgaggagctgcagcagtcgcgcatccgcatcgacagcctctctgcccagctcagccagctccagaagcagctggcagccaaggaggcgaagcttcgagacctggaggactcactggcccgtgagcgggacaccagccggcggctgctggcggaaaaggagcgggagatggccgagatgcgggcaaggatgcagcagcagctggacgagtaccaggagcttctggacatcaagctggccctggacatggagatccacgcctaccgcaagctcttggagggcgaggaggagaggctacgcctgtcccccagccctacctcgcagcgcagccgtggccgtgcttcctctcactcatcccagacacagggtgggggcagcgtcaccaaaaagcgcaaactggagtccactgagagccgcagcagcttctcacagcacgcacgcactagcgggcgcgtggccgtggaggaggtggatgaggagggcaagtttgtccggctgcgcaacaagtccaatgaggaccagtccatgggcaattggcagatcaagcgccagaatggagatgatcccttgctgacttaccggttcccaccaaagttcaccctgaaggctgggcaggtggtgacgatctgggctgcaggagctggggccacccacagcccccctaccgacctggtgtggaaggcacagaacacctggggctgcgggaacagcctgcgtacggctctcatcaactccactggggaagaagtggccatgcgcaagctggtgcgctcagtgactgtggttgaggacgacgaggatgaggatggagatgacctgctccatcaccaccacgtgagtggtagccgccgctgaggccgagcctgcactggggccacccagccaggcctgggggcagcctctccccagcctccccgtgccaaaaatcttttcattaaagaatgttttggaacttt

SEQ ID NO: 15613 - DNA, 2253 bp, Homo sapiens
  source 1..2253: mol_type = unassigned DNA
gagcgccgcacctacaccagccaacccagatcccgaggtccgacagcgcccggcccagatccccacgcctgccaggagcaagccgagagccagccggccggcgcactccgactccgagcagtctctgtccttcgacccgagccccgcgccctttccgggacccctgccccgcgggcagcgctgccaacctgccggccatggagaccccgtcccagcggcgcgccacccgcagcggggcgcaggccagctccactccgctgtcgcccacccgcatcacccggctgcaggagaaggaggacctgcaggagctcaatgatcgcttggcggtctacatcgaccgtgtgcgctcgctggaaacggagaacgcagggctgcgccttcgcatcaccgagtctgaagaggtggtcagccgcgaggtgtccggcatcaaggccgcctacgaggccgagctcggggatgcccgcaagacccttgactcagtagccaaggagcgcgcccgcctgcagctggagctgagcaaagtgcgtgaggagtttaaggagctgaaagcgcgcaataccaagaaggagggtgacctgatagctgctcaggctcggctgaaggacctggaggctctgctgaactccaaggaggccgcactgagcactgctctcagtgagaagcgcacgctggagggcgagctgcatgatctgcggggccaggtggccaagcttgaggcagccctaggtgaggccaagaagcaacttcaggatgagatgctgcggcgggtggatgctgagaacaggctgcagaccatgaaggaggaactggacttccagaagaacatctacagtgaggagctgcgtgagaccaagcgccgtcatgagacccgactggtggagattgacaatgggaagcagcgtgagtttgagagccggctggcggatgcgctgcaggaactgcgggcccagcatgaggaccaggtggagcagtataagaaggagctggagaagacttattctgccaagctggacaatgccaggcagtctgctgagaggaacagcaacctggtgggggctgcccacgaggagctgcagcagtcgcgcatccgcatcgacagcctctctgcccagctcagccagctccagaagcagctggcagccaaggaggcgaagcttcgagacctggaggactcactggcccgtgagcgggacaccagccggcggctgctggcggaaaaggagcgggagatggccgagatgcgggcaaggatgcagcagcagctggacgagtaccaggagcttctggacatcaagctggccctggacatggagatccacgcctaccgcaagctcttggagggcgaggaggagaggctacgcctgtcccccagccctacctcgcagcgcagccgtggccgtgcttcctctcactcatcccagacacagggtgggggcagcgtcaccaaaaagcgcaaactggagtccactgagagccgcagcagcttctcacagcacgcacgcactagcgggcgcgtggccgtggaggaggtggatgaggagggcaagtttgtccggctgcgcaacaagtccaatgaggaccagtccatgggcaattggcagatcaagcgccagaatggagatgatcccttgctgacttaccggttcccaccaaagttcaccctgaaggctgggcaggtggtgacgatctgggctgcaggagctggggccacccacagcccccctaccgacctggtgtggaaggcacagaacacctggggctgcgggaacagcctgcgtacggctctcatcaactccactggggaagaagtggccatgcgcaagctggtgcgctcagtgactgtggttgaggacgacgaggatgaggatggagatgacctgctccatcaccaccacggctcccactgcagcagctcgggggaccccgctgagtacaacctgcgctcgcgcaccgtgctgtgcgggacctgcgggcagcctgccgacaaggcatctgccagcggctcaggagcccagagcccccagaactgcagcatcatgtaatctgggacctgccaggcaggggtgggggtggaggcttcctgcgtcctcctcacctcatgcccaccccctgccctgcacgtcatgggagggggcttgaagccaaagaaaaataaccctttggtttttttcttctgtatttttttttctaagagaagttattttctacagtggttttatactgaaggaaaaacacaagcaaaaaaaaaaaaaa

SEQ ID NO: 15614 - DNA, 3190 bp, Homo sapiens
  source 1..3190: mol_type = unassigned DNA
actcagtgttcgcgggagcgccgcacctacaccagccaacccagatcccgaggtccgacagcgcccggcccagatccccacgcctgccaggagcaagccgagagccagccggccggcgcactccgactccgagcagtctctgtccttcgacccgagccccgcgccctttccgggacccctgccccgcgggcagcgctgccaacctgccggccatggagaccccgtcccagcggcgcgccacccgcagcggggcgcaggccagctccactccgctgtcgcccacccgcatcacccggctgcaggagaaggaggacctgcaggagctcaatgatcgcttggcggtctacatcgaccgtgtgcgctcgctggaaacggagaacgcagggctgcgccttcgcatcaccgagtctgaagaggtggtcagccgcgaggtgtccggcatcaaggccgcctacgaggccgagctcggggatgcccgcaagacccttgactcagtagccaaggagcgcgcccgcctgcagctggagctgagcaaagtgcgtgaggagtttaaggagctgaaagcgcgcaataccaagaaggagggtgacctgatagctgctcaggctcggctgaaggacctggaggctctgctgaactccaaggaggccgcactgagcactgctctcagtgagaagcgcacgctggagggcgagctgcatgatctgcggggccaggtggccaagcttgaggcagccctaggtgaggccaagaagcaacttcaggatgagatgctgcggcgggtggatgctgagaacaggctgcagaccatgaaggaggaactggacttccagaagaacatctacagtgaggagctgcgtgagaccaagcgccgtcatgagacccgactggtggagattgacaatgggaagcagcgtgagtttgagagccggctggcggatgcgctgcaggaactgcgggcccagcatgaggaccaggtggagcagtataagaaggagctggagaagacttattctgccaagctggacaatgccaggcagtctgctgagaggaacagcaacctggtgggggctgcccacgaggagctgcagcagtcgcgcatccgcatcgacagcctctctgcccagctcagccagctccagaagcagctggcagccaaggaggcgaagcttcgagacctggaggactcactggcccgtgagcgggacaccagccggcggctgctggcggaaaaggagcgggagatggccgagatgcgggcaaggatgcagcagcagctggacgagtaccaggagcttctggacatcaagctggccctggacatggagatccacgcctaccgcaagctcttggagggcgaggaggagaggctacgcctgtcccccagccctacctcgcagcgcagccgtggccgtgcttcctctcactcatcccagacacagggtgggggcagcgtcaccaaaaagcgcaaactggagtccactgagagccgcagcagcttctcacagcacgcacgcactagcgggcgcgtggccgtggaggaggtggatgaggagggcaagtttgtccggctgcgcaacaagtccaatgaggaccagtccatgggcaattggcagatcaagcgccagaatggagatgatcccttgctgacttaccggttcccaccaaagttcaccctgaaggctgggcaggtggtgacgatctgggctgcaggagctggggccacccacagcccccctaccgacctggtgtggaaggcacagaacacctggggctgcgggaacagcctgcgtacggctctcatcaactccactggggaagaagtggccatgcgcaagctggtgcgctcagtgactgtggttgaggacgacgaggatgaggatggagatgacctgctccatcaccaccacggctcccactgcagcagctcgggggaccccgctgagtacaacctgcgctcgcgcaccgtgctgtgcgggacctgcgggcagcctgccgacaaggcatctgccagcggctcaggagcccaggtgggcggacccatctcctctggctcttctgcctccagtgtcacggtcactcgcagctaccgcagtgtggggggcagtgggggtggcagcttcggggacaatctggtcacccgctcctacctcctgggcaactccagcccccgaacccagagcccccagaactgcagcatcatgtaatctgggacctgccaggcaggggtgggggtggaggcttcctgcgtcctcctcacctcatgcccaccccctgccctgcacgtcatgggagggggcttgaagccaaagaaaaataaccctttggtttttttcttctgtatttttttttctaagagaagttattttctacagtggttttatactgaaggaaaaacacaagcaaaaaaaaaaaaaagcatctatctcatctatctcaatcctaatttctcctcccttccttttccctgcttccaggaaactccacatctgccttaaaaccaaagagggcttcctctagaagccaagggaaaggggtgcttttatagaggctagcttctgcttttctgccctggctgctgcccccaccccggggaccctgtgacatggtgcctgagaggcaggcatagaggcttctccgccagcctcctctggacggcaggctcactgccaggccagcctccgagagggagagagagagagagaggacagcttgagccgggcccctgggcttggcctgctgtgattccactacacctggctgaggttcctctgcctgccccgcccccagtccccacccctgcccccagccccggggtgagtccattctcccaggtaccagctgcgcttgcttttctgtattttatttagacaagagatgggaatgaggtgggaggtggaagaagggagaagaaaggtgagtttgagctgccttccctagctttagaccctgggtgggctctgtgcagtcactggaggttgaagccaagtggggtgctgggaggagggagagggaggtcactggaaaggggagagcctgctggcacccaccgtggaggaggaaggcaagagggggtggaggggtgtggcagtggttttggcaaacgctaaagagcccttgcctccccatttcccatctgcaccccttctctcctccccaaatcaatacactagttgtttctacccctggc

SEQ ID NO: 15615 - DNA, 2461 bp, Homo sapiens
  source 1..2461: mol_type = unassigned DNA
attccttgacccgaggaggatagggatgtggccttcggtctttcctcgcagctccggggcaagctaggagtgggatggaagtcgagagtcgatcccggagcccggccgcggggagaggttctcggcagagaagacaaagcccgcagcagcgatggggggagagctgggctctgcgtgttgtgggggccaggaaagggtgccaggctggggctggaaccccctggcaaaggatggggtcccctcatccctaaacagcaagccatctcccctcgcccgccccccgcccccccagtctcggagatctcagaggcaccgactgggagacttgatgtaattgtcttcacaattctgtgaagatggacttggtgtctctgcttcacatgaagggacctgaggttcagagaggctaagtaactttcctaggtcacagagctgtgttcgcgggagcgccgcacctacaccagccaacccagatcccgaggtccgacagcgcccggcccagatccccacgcctgccaggagcaagccgagagccagccggccggcgcactccgactccgagcagtctctgtccttcgacccgagccccgcgccctttccgggacccctgccccgcgggcagcgctgccaacctgccggccatggagaccccgtcccagcggcgcgccacccgcagcggggcgcaggccagctccactccgctgtcgcccacccgcatcacccggctgcaggagaaggaggacctgcaggagctcaatgatcgcttggcggtctacatcgaccgtgtgcgctcgctggaaacggagaacgcagggctgcgccttcgcatcaccgagtctgaagaggtggtcagccgcgaggtgtccggcatcaaggccgcctacgaggccgagctcggggatgcccgcaagacccttgactcagtagccaaggagcgcgcccgcctgcagctggagctgagcaaagtgcgtgaggagtttaaggagctgaaagcgcgcaataccaagaaggagggtgacctgatagctgctcaggctcggctgaaggacctggaggctctgctgaactccaaggaggccgcactgagcactgctctcagtgagaagcgcacgctggagggcgagctgcatgatctgcggggccaggtggccaagcttgaggcagccctaggtgaggccaagaagcaacttcaggatgagatgctgcggcgggtggatgctgagaacaggctgcagaccatgaaggaggaactggacttccagaagaacatctacagtgaggagctgcgtgagaccaagcgccgtcatgagacccgactggtggagattgacaatgggaagcagcgtgagtttgagagccggctggcggatgcgctgcaggaactgcgggcccagcatgaggaccaggtggagcagtataagaaggagctggagaagacttattctgccaagctggacaatgccaggcagtctgctgagaggaacagcaacctggtgggggctgcccacgaggagctgcagcagtcgcgcatccgcatcgacagcctctctgcccagctcagccagctccagaagcagctggcagccaaggaggcgaagcttcgagacctggaggactcactggcccgtgagcgggacaccagccggcggctgctggcggaaaaggagcgggagatggccgagatgcgggcaaggatgcagcagcagctggacgagtaccaggagcttctggacatcaagctggccctggacatggagatccacgcctaccgcaagctcttggagggcgaggaggagaggctacgcctgtcccccagccctacctcgcagcgcagccgtggccgtgcttcctctcactcatcccagacacagggtgggggcagcgtcaccaaaaagcgcaaactggagtccactgagagccgcagcagcttctcacagcacgcacgcactagcgggcgcgtggccgtggaggaggtggatgaggagggcaagtttgtccggctgcgcaacaagtccaatgaggaccagtccatgggcaattggcagatcaagcgccagaatggagatgatcccttgctgacttaccggttcccaccaaagttcaccctgaaggctgggcaggtggtgacgatctgggctgcaggagctggggccacccacagcccccctaccgacctggtgtggaaggcacagaacacctggggctgcgggaacagcctgcgtacggctctcatcaactccactggggaagaagtggccatgcgcaagctggtgcgctcagtgactgtggttgaggacgacgaggatgaggatggagatgacctgctccatcaccaccacgtgagtggtagccgccgctgaggccgagcctgcactggggccacccagccaggcctgggggcagcctctccccagcctccccgtgccaaaaatcttttcattaaagaatgttttggaacttt

SEQ ID NO: 15616 - DNA, 1577 bp, Homo sapiens
  source 1..1577: mol_type = unassigned DNA
atgcagccactcctgtgcttggggaacctggaggatgcaagggaaaggactggcactctgctggcacagcacccggcctggggcaggacacgggcgaagccagggtctcccctcaataccaagaaggagggtgacctgatagctgctcaggctcggctgaaggacctggaggctctgctgaactccaaggaggccgcactgagcactgctctcagtgagaagcgcacgctggagggcgagctgcatgatctgcggggccaggtggccaagcttgaggcagccctaggtgaggccaagaagcaacttcaggatgagatgctgcggcgggtggatgctgagaacaggctgcagaccatgaaggaggaactggacttccagaagaacatctacagtgaggagctgcgtgagaccaagcgccgtcatgagacccgactggtggagattgacaatgggaagcagcgtgagtttgagagccggctggcggatgcgctgcaggaactgcgggcccagcatgaggaccaggtggagcagtataagaaggagctggagaagacttattctgccaagctggacaatgccaggcagtctgctgagaggaacagcaacctggtgggggctgcccacgaggagctgcagcagtcgcgcatccgcatcgacagcctctctgcccagctcagccagctccagaagcagctggcagccaaggaggcgaagcttcgagacctggaggactcactggcccgtgagcgggacaccagccggcggctgctggcggaaaaggagcgggagatggccgagatgcgggcaaggatgcagcagcagctggacgagtaccaggagcttctggacatcaagctggccctggacatggagatccacgcctaccgcaagctcttggagggcgaggaggagaggctacgcctgtcccccagccctacctcgcagcgcagccgtggccgtgcttcctctcactcatcccagacacagggtgggggcagcgtcaccaaaaagcgcaaactggagtccactgagagccgcagcagcttctcacagcacgcacgcactagcgggcgcgtggccgtggaggaggtggatgaggagggcaagtttgtccggctgcgcaacaagtccaatgaggaccagtccatgggcaattggcagatcaagcgccagaatggagatgatcccttgctgacttaccggttcccaccaaagttcaccctgaaggctgggcaggtggtgacgatctgggctgcaggagctggggccacccacagcccccctaccgacctggtgtggaaggcacagaacacctggggctgcgggaacagcctgcgtacggctctcatcaactccactggggaagaagtggccatgcgcaagctggtgcgctcagtgactgtggttgaggacgacgaggatgaggatggagatgacctgctccatcaccaccacgtgagtggtagccgccgctgaggccgagcctgcactggggccacccagccaggcctgggggcagcctctccccagcctccccgtgccaaaaatcttttcattaaagaatgttttggaacttt

SEQ ID NO: 15617 - DNA, 1683 bp, Homo sapiens
  source 1..1683: mol_type = unassigned DNA
aagccgagagccagccggccggcgcactccgactccgagcagtctctgtccttcgacccgagccccgcgccctttccgggacccctgccccgcgggcagcgctgccaacctgccggccatggagaccccgtcccagcggcgcgccacccgcagcggggcgcaggccagctccactccgctgtcgcccacccgcatcacccggctgcaggagaaggaggacctgcaggagctcaatgatcgcttggcggtctacatcgaccgtgtgcgctcgctggaaacggagaacgcagggctgcgccttcgcatcaccgagtctgaagaggtggtcagccgcgaggtgtccggcatcaaggccgcctacgaggccgagctcggggatgcccgcaagacccttgactcagtagccaaggagcgcgcccgcctgcagctggagctgagcaaagtgcgtgaggagtttaaggagctgaaagcgcgcaataccaagaaggagggtgacctgatagctgctcaggctcggctgaaggacctggaggctctgctgaactccaaggaggccgcactgagcactgctctcagtgagaagcgcacgctggagggcgagctgcatgatctgcggggccaggtggccaagcttgaggcagccctaggtgaggccaagaagcaacttcaggatgagatgctgcggcgggtggatgctgagaacaggctgcagaccatgaaggaggaactggacttccagaagaacatctacagtgaggagctgcgtgagaccaagcgccgtcatgagacccgactggtggagattgacaatgggaagcagcgtgagtttgagagccggctggcggatgcgctgcaggaactgcgggcccagcatgaggaccaggtggagcagtataagaaggagctggagaagacttattctgccaagctggacaatgccaggcagtctgctgagaggaacagcaacctggtgggggctgcccacgaggagctgcagcagtcgcgcatccgcatcgacagcctctctgcccagctcagccagctccagaagcagctggcagccaaggaggcgaagcttcgagacctggaggactcactggcccgtgagcgggacaccagccggcggctgctggcggaaaaggagcgggagatggccgagatgcgggcaaggatgcagcagcagctggacgagtaccaggagcttctggacatcaagctggccctggacatggagatccacgcctaccgcaagctcttggagggcgaggaggagaggctacgcctgtcccccagccctacctcgcagcgcagccgtggccgtgcttcctctcactcatcccagacacagggtgggggcagcgtcaccaaaaagcgcaaactggagtccactgagagccgcagcagcttctcacagcacgcacgcactagcgggaacagcctgcgtacggctctcatcaactccactggggaagaagtggccatgcgcaagctggtgcgctcagtgactgtggttgaggacgacgaggatgaggatggagatgacctgctccatcaccaccacgtgagtggtagccgccgctgaggccgagcctgcactggggccacccagccaggcctgggggcagcctctccccagcctccccgtgccaaaaatcttttcattaaagaatgttttggaacttt

SEQ ID NO: 15618 - DNA, 1943 bp, Homo sapiens
  source 1..1943: mol_type = unassigned DNA
gagaccctctgctcttctgctcccttcctgtgtgctgcctggcaatggggaactctgagggctgcaataccaagaaggagggtgacctgatagctgctcaggctcggctgaaggacctggaggctctgctgaactccaaggaggccgcactgagcactgctctcagtgagaagcgcacgctggagggcgagctgcatgatctgcggggccaggtggccaagcttgaggcagccctaggtgaggccaagaagcaacttcaggatgagatgctgcggcgggtggatgctgagaacaggctgcagaccatgaaggaggaactggacttccagaagaacatctacagtgaggagctgcgtgagaccaagcgccgtcatgagacccgactggtggagattgacaatgggaagcagcgtgagtttgagagccggctggcggatgcgctgcaggaactgcgggcccagcatgaggaccaggtggagcagtataagaaggagctggagaagacttattctgccaagctggacaatgccaggcagtctgctgagaggaacagcaacctggtgggggctgcccacgaggagctgcagcagtcgcgcatccgcatcgacagcctctctgcccagctcagccagctccagaagcagctggcagccaaggaggcgaagcttcgagacctggaggactcactggcccgtgagcgggacaccagccggcggctgctggcggaaaaggagcgggagatggccgagatgcgggcaaggatgcagcagcagctggacgagtaccaggagcttctggacatcaagctggccctggacatggagatccacgcctaccgcaagctcttggagggcgaggaggagaggctacgcctgtcccccagccctacctcgcagcgcagccgtggccgtgcttcctctcactcatcccagacacagggtgggggcagcgtcaccaaaaagcgcaaactggagtccactgagagccgcagcagcttctcacagcacgcacgcactagcgggcgcgtggccgtggaggaggtggatgaggagggcaagtttgtccggctgcgcaacaagtccaatgaggaccagtccatgggcaattggcagatcaagcgccagaatggagatgatcccttgctgacttaccggttcccaccaaagttcaccctgaaggctgggcaggtggtgacgatctgggctgcaggagctggggccacccacagcccccctaccgacctggtgtggaaggcacagaacacctggggctgcgggaacagcctgcgtacggctctcatcaactccactggggaagaagtggccatgcgcaagctggtgcgctcagtgactgtggttgaggacgacgaggatgaggatggagatgacctgctccatcaccaccacggctcccactgcagcagctcgggggaccccgctgagtacaacctgcgctcgcgcaccgtgctgtgcgggacctgcgggcagcctgccgacaaggcatctgccagcggctcaggagcccaggtgggcggacccatctcctctggctcttctgcctccagtgtcacggtcactcgcagctaccgcagtgtggggggcagtgggggtggcagcttcggggacaatctggtcacccgctcctacctcctgggcaactccagcccccgaacccagagcccccagaactgcagcatcatacaagagatgggaatgaggtgggaggtggaagaagggagaagaaaggtgagtttgagctgccttccctagctttagaccctgggtgggctctgtgcagtcactggaggttgaagccaagtggggtgctgggaggagggagagggaggtcactggaaaggggagagcctgctggcacccaccgtggaggaggaaggcaagagggggtggaggggtgtggcagtggttttggcaaacgctaaagag

SEQ ID NO: 15619 - DNA, 3745 bp, Homo sapiens
  source 1..3745: mol_type = unassigned DNA
gtcgcgcgcgtggatctgccgccgggttgctgtgcgactattctccgggagccgtccgtgtcaccgccggaacctggcgcaggttaattatagaaaatgccaagtaggaaatttgccgatggtgaagtggtaagaggtcgatggcctgggagttcactttattatgaagtagaaattctgagccacgacagcacctcccagctttacactgtgaagtataaagatggaacagagcttgaattgaaagagaatgatattaagcctttaacttcctttaggcaaaggaaaggtggctcaacttccagttccccttccagacgccgagggagtcgatcaaggtcacgctcccgatcccctggtcgaccacctaaaagtgcccgccgatctgcttctgcttcccaccaggccgacattaaggaagcaaggagggaagtggaagttaaattgactccgctgattctgaagccatttggaaatagcatcagcagatataatggggagcctgagcatattgagagaaatgacgcacctcataaaaatacacaggaaaaattcagtttgtcacaagaaagcagttacatagcaacacagtatagccttcgtccaagaagagaagaagtcaaattaaaagaaatagattctaaggaagaaaaatacgttgcaaaagaactggcagtgagaacctttgaagtgacccccatccgggcaaaggacttggagtttggaggagtacctggtgtgtttctcatcatgtttggcctgcctgtgttcctcttcctgttgctgttgatgtgtaaacagaaagatcccagtcttctgaatttccctcctcctttgccagctttgtatgagttatgggaaaccagagtatttggggtctacctcctgtggtttttgattcaagtcctgttctacctactgccaattggaaaggttgtagaaggaacgcctcttattgatggaagaagactcaagtatagattaaatggattctatgcttttatcctgacatctgcagtcatcggaacatctctcttccagggcgtagagtttcattacgtgtacagtcattttcttcagtttgcacttgcggccactgttttttgtgtggtcttgagtgtgtatctctacatgcgctctttgaaagcgccccggaatgacctgtcgcctgccagctctggaaatgctgtctatgatttcttcattggccgtgaattaaaccctcgaattggtacttttgatctcaaatacttttgtgaattgcgccccggattgattggatgggtggttattaacttggtgatgcttttggctgaaatgaaaatacaggaccgcgctgttccatccttggccatgattttagttaatagtttccagcttctctatgtggtggatgctctctggaatgaggaagcgttgttgacgaccatggacatcatccacgatggatttggattcatgctggcttttggagacttggtgtgggttccctttatttacagcttccaagccttttatttagtcagtcatccaaatgaagtgtcttggccaatggcttctctaattattgttctgaaactttgtggttatgtaatcttccgaggtgcaaattctcagaaaaatgcattccggaaaaatcccagtgatccaaagcttgcacatttaaaaaccattcatacttcaacgggaaaaaatcttctagtttctggatggtggggctttgttcgccaccccaattacttgggtgatctcatcatggccttggcgtggtccctcccatgtggttttaaccacattctgccttatttctacataatttatttcaccatgttgcttgtccaccgagaagctcgtgacgagtaccactgtaagaagaaatacggcgtggcttgggaaaagtactgtcagcgtgtgccctaccgtatatttccatacatctactaatgctcttctggcttttctacaaaatactcctgcaattccagctgccatttgcaaaaacaaggaaaaaaatccgaaactttcttttgttgcactgacagggtctgtacttttttttttctttttgagtcaggactatggagccgagtagttgatcttttaatatagccgtgtttacttgtattaacttacagttaacataggaaaaatacaagtaaggatgtgagaatttgcattttaatgggaaattttcaacccttaatctgaaaacagaagacagtcttaatataaatgtactgtgaagaatgctattgatgtttatggtttctgattacttttcaaattttgatgtttttttgccagttggcttttcttaaatgaaaacactgttccatttaaagtacatttatgttttattcagtaagagaatagaattttcatttgtttttctttaaatcctttactaattatataatttgaaagcaaaaagaagggcctatattaaatgctgaaagtgaaaagtgatgacattattagcagacactgcttaaaggagaccatttgtagcagttggcttaacctcaacttctaaaactacattgaaaatgtaaatacatagcttagttttttgtaatatatggtgacttcagatttttttgtacagtattttgaatgtgagatgattgtcaggactaactgtctttttaacaaaacattttcagtattttaaataaaattttgtaaagtaatgtgaattaaaaattttggaacaattagaattcattcactattgtatagaagatgctgttaaaacataggaagggtatttttcttgatccaaagtttgtgaatttggctttgctacctcaattgcaggtgtttgtttgcctttataaactgttgcaaatagaaaaaaaatagaataagtatatatttttggagtaacatcaatatttaaacatttttacacagatcggtgtttgaaaatttgccatttcaggctaatatttttatatatttttgactttttaaaagttcatcagtgtttttgctactgttaagcttatgcagtttatactgtattttttatgtatcctttatatttaccaaacctgactccctgtaaaggagtgctgtcttaaaaacaactgaaggggttaaagtcgtttcttttagtttaatagatgtgcataaggtagctttagcaattaaattctagtgaagttgatatagtctcatttttaattgtcctgtaatggaacagtagcaaattcactaaacttttgtgttcagagttaaattgttctcagtactttcaatgtaggggaatgtaataaacatagtgtgtatgtttgggttttaattacacattttatatatgagccatttagatatgcagtgttaattctatactgcatttgaagtgtatgtaacttagcttatgttaatgcagtcatgaagttggtttgctccagcatccggtagtctttaaacattcttttagtgaaattgtcattgttttatcagtgctaatgtgtgcaagcagtttttttattttgcttttctcctggcatcagaaagtggtggcgttttctgtactggattgcaccaaggaagcttttggggaggaaggaaggacattaaattctttccctggtaatgaaaagagccctttatcaatacagtgctgcaatttctggatatcagctacactttgtttttaagtttgtttttgacatgtttatttggcaaattttataatgaagttttaagttgaaaataaaatgtagcaacattttgatca

SEQ ID NO: 15620 - DNA, 3774 bp, Homo sapiens
  source 1..3774: mol_type = unassigned DNA
tgtgtttcggtgtgtaacgcataaaacttcttgttccacgctccgcggtgttggggattttctactgcatctcgacagcatctcgggtaacaaccgagcccctcctcgcagcgttaattatagaaaatgccaagtaggaaatttgccgatggtgaagtggtaagaggtcgatggcctgggagttcactttattatgaagtagaaattctgagccacgacagcacctcccagctttacactgtgaagtataaagatggaacagagcttgaattgaaagagaatgatattaagcctttaacttcctttaggcaaaggaaaggtggctcaacttccagttccccttccagacgccgagggagtcgatcaaggtcacgctcccgatcccctggtcgaccacctaaaagtgcccgccgatctgcttctgcttcccaccaggccgacattaaggaagcaaggagggaagtggaagttaaattgactccgctgattctgaagccatttggaaatagcatcagcagatataatggggagcctgagcatattgagagaaatgacgcacctcataaaaatacacaggaaaaattcagtttgtcacaagaaagcagttacatagcaacacagtatagccttcgtccaagaagagaagaagtcaaattaaaagaaatagattctaaggaagaaaaatacgttgcaaaagaactggcagtgagaacctttgaagtgacccccatccgggcaaaggacttggagtttggaggagtacctggtgtgtttctcatcatgtttggcctgcctgtgttcctcttcctgttgctgttgatgtgtaaacagaaagatcccagtcttctgaatttccctcctcctttgccagctttgtatgagttatgggaaaccagagtatttggggtctacctcctgtggtttttgattcaagtcctgttctacctactgccaattggaaaggttgtagaaggaacgcctcttattgatggaagaagactcaagtatagattaaatggattctatgcttttatcctgacatctgcagtcatcggaacatctctcttccagggcgtagagtttcattacgtgtacagtcattttcttcagtttgcacttgcggccactgttttttgtgtggtcttgagtgtgtatctctacatgcgctctttgaaagcgccccggaatgacctgtcgcctgccagctctggaaatgctgtctatgatttcttcattggccgtgaattaaaccctcgaattggtacttttgatctcaaatacttttgtgaattgcgccccggattgattggatgggtggttattaacttggtgatgcttttggctgaaatgaaaatacaggaccgcgctgttccatccttggccatgattttagttaatagtttccagcttctctatgtggtggatgctctctggaatgaggaagcgttgttgacgaccatggacatcatccacgatggatttggattcatgctggcttttggagacttggtgtgggttccctttatttacagcttccaagccttttatttagtcagtcatccaaatgaagtgtcttggccaatggcttctctaattattgttctgaaactttgtggttatgtaatcttccgaggtgcaaattctcagaaaaatgcattccggaaaaatcccagtgatccaaagcttgcacatttaaaaaccattcatacttcaacgggaaaaaatcttctagtttctggatggtggggctttgttcgccaccccaattacttgggtgatctcatcatggccttggcgtggtccctcccatgtggttttaaccacattctgccttatttctacataatttatttcaccatgttgcttgtccaccgagaagctcgtgacgagtaccactgtaagaagaaatacggcgtggcttgggaaaagtactgtcagcgtgtgccctaccgtatatttccatacatctactaatgctcttctggcttttctacaaaatactcctgcaattccagctgccatttgcaaaaacaaggaaaaaaatccgaaactttcttttgttgcactgacagggtctgtacttttttttttctttttgagtcaggactatggagccgagtagttgatcttttaatatagccgtgtttacttgtattaacttacagttaacataggaaaaatacaagtaaggatgtgagaatttgcattttaatgggaaattttcaacccttaatctgaaaacagaagacagtcttaatataaatgtactgtgaagaatgctattgatgtttatggtttctgattacttttcaaattttgatgtttttttgccagttggcttttcttaaatgaaaacactgttccatttaaagtacatttatgttttattcagtaagagaatagaattttcatttgtttttctttaaatcctttactaattatataatttgaaagcaaaaagaagggcctatattaaatgctgaaagtgaaaagtgatgacattattagcagacactgcttaaaggagaccatttgtagcagttggcttaacctcaacttctaaaactacattgaaaatgtaaatacatagcttagttttttgtaatatatggtgacttcagatttttttgtacagtattttgaatgtgagatgattgtcaggactaactgtctttttaacaaaacattttcagtattttaaataaaattttgtaaagtaatgtgaattaaaaattttggaacaattagaattcattcactattgtatagaagatgctgttaaaacataggaagggtatttttcttgatccaaagtttgtgaatttggctttgctacctcaattgcaggtgtttgtttgcctttataaactgttgcaaatagaaaaaaaatagaataagtatatatttttggagtaacatcaatatttaaacatttttacacagatcggtgtttgaaaatttgccatttcaggctaatatttttatatatttttgactttttaaaagttcatcagtgtttttgctactgttaagcttatgcagtttatactgtattttttatgtatcctttatatttaccaaacctgactccctgtaaaggagtgctgtcttaaaaacaactgaaggggttaaagtcgtttcttttagtttaatagatgtgcataaggtagctttagcaattaaattctagtgaagttgatatagtctcatttttaattgtcctgtaatggaacagtagcaaattcactaaacttttgtgttcagagttaaattgttctcagtactttcaatgtaggggaatgtaataaacatagtgtgtatgtttgggttttaattacacattttatatatgagccatttagatatgcagtgttaattctatactgcatttgaagtgtatgtaacttagcttatgttaatgcagtcatgaagttggtttgctccagcatccggtagtctttaaacattcttttagtgaaattgtcattgttttatcagtgctaatgtgtgcaagcagtttttttattttgcttttctcctggcatcagaaagtggtggcgttttctgtactggattgcaccaaggaagcttttggggaggaaggaaggacattaaattctttccctggtaatgaaaagagccctttatcaatacagtgctgcaatttctggatatcagctacactttgtttttaagtttgtttttgacatgtttatttggcaaattttataatgaagttttaagttgaaaataaaatgtagcaacattttgatc

SEQ ID NO: 15621 - DNA, 736 bp, Homo sapiens
  source 1..736: mol_type = unassigned DNA
gccgctgggggaggaagcccgaggccggcgcagcggccgggccggggaccctgggcgcggggcctggcgcggcggccttcccctcctctcctcgcctcctcgtctcctcccctcctcgccttttctggcccagtcgggtggtcggggcggcggcgggcgaggctggagctcgcccgagccgggcccgctgcggaaatggagctgggggttttaaactgcggacgtttccctccatgttggcggcgcggcgcggctgtggagcggcggcggcagggagggttcgtgggcgcctttgtcctgccccaccgcagcctggctcccggcccctccgagcgcccgtctgacagatgagcaggcggccccgcggtcctgcagtaggaggctgacagggcgcggcggcctggcgggacggggaagggtctgcggccgaggtgggcttagattcgcgctgcttgtcactggctttgagggtcgtggtcgtcgcggtttggtgattctccaggcacactgcatggctgctcgctcctatgcgttgaattccttcgcccggacagtctcaaaaatcgggttaattatagaaaatgccaagtaggaaatttgccgatggtgaagtggtaagaggtcgatggcctgggagttcactttattatgaagtagaaattctgagccacgacagcacctcccagctttacactgtgaagtataaagatggaacagagcttgaattgaaagagaa

SEQ ID NO: 15622 - DNA, 478 bp, Homo sapiens
  source 1..478: mol_type = unassigned DNA
attggccgtgaattaaaccctcgaattggtacttttgatctcaaatacttttgtgaattgcgccccggattgattggatgggtggttattaacttggtgatgcttttggctgaaatgaaaatacaggaccgcgctgttccatccttggccatgattttagttaatagtttccagcttctctatgtggtggatgctctctggaatgaggaagcgttgttgacgaccatggacatcatccacgatggatttggattcatgctggcttttggagacttggtgtgggttccctttatttacagcttccaagccttttatttagtcagtcatccaaatgaagtgtcttggccaatggcttctctaattattgttctgaaacgtgagtattaattttagtctcagtttaatttattaaatattatgtactgaggcttttatgccctgctgtctacatacttgaaacatgccattttgaatggcc

SEQ ID NO: 15623 - DNA, 874 bp, Homo sapiens
  source 1..874: mol_type = unassigned DNA
agcagaaaaaaaaaagcttaggatccgtaacagattcggagtcaacaatgacatgactcagcattttggggttcaattaaaaccaggcttgtaggttgcaggtcaagttgtgtttcggtgtgtaacgcataaaacttcttgttccacgctccgcggtgttggggattttctactgcatctcgacagcatctcgggtaacaaccgagcccctcctcgcagcgttaattatagaaaatgccaagtaggaaatttgccgatggtgaagtggtaagaggtcgatggcctgggagttcactttattatgaagtagaaattctgagccacgacagcacctcccagctttacactgtgaagtataaagatggaacagagcttgaattgaaagagaatgatattaagcctttaacttcctttaggcaaaggaaaggtggctcaacttccagttccccttccagacgccgagggagtcgatcaaggtcacgctcccgatcccctggtcgaccacctaaaagtgcccgccgatctgcttctgcttcccaccaggccgacattaaggaagcaaggagggaagtggaagttaaattgactccgctgattctgaagccatttggaaatagcatcagcagatataatggggagcctgagcatattgagagaaatgacgcacctcataaaaatacacaggaaaaattcagtttgtcacaagaaagcagttacatagcaacacagtatagccttcgtccaagaagagaagaagtcaaattaaaagaaatagattctaaggaagaaaaatacgttgcaaaagaactggcagtgagaacctttgaagtgacccccatccgggcaaaggacttggagtttggaggagtacctg

SEQ ID NO: 15624 - DNA, 536 bp, Homo sapiens
  source 1..536: mol_type = unassigned DNA
tctcgacatcattaaaaatgtacttttatttttatatagatttaaaaaccattcatacttcaacgggaaaaaatcttctagtttctggatggtggggctttgttcgccaccccaattacttgggtgatctcatcatggccttggcgtggtccctcccatgtggttttaaccacattctgccttatttctacataatttatttcaccatgttgcttgtccaccgagaagctcgtgacgagtaccactgtaagaagaaatacggcgtggcttgggaaaagtactgtcagcgtgtgccctaccgtatatttccatacatctactaatgctcttctggcttttctacaaaatactcctgcaattccagctgccatttgcaaaaacaaggaaaaaaatccgaaactttcttttgttgcactgacagggtctgtacttttttttttctttttgagtcaggactatggagccgagtagttgatcttttaatatagccgtgtttacttgtattaacttacagttaacataggaaaaatacaagt

SEQ ID NO: 15625 - DNA, 2878 bp, Homo sapiens
  source 1..2878: mol_type = unassigned DNA
ctgagaggaaacaaagtgctgcgagcaggagacggcggcggcgcgaaccctgctgggcctccagtcaccctcgtcttgcattttcccgcgtgcgtgtgtgagtgggtgtgtgtgttttcttacaaagggtatttcgcgatcgatcgattgattcgtagttcccccccgcgcgcctttgccctttgtgctgtaatcgagctcccgccatcccaggtgcttctccgttcctctaaacgccagcgtctggacgtgagcgcaggtcgccggtttgtgccttcggtccccgcttcgccccctgccgtcccctccttatcacggtcccgctcgcggcctcgccgccccgctgtctccgccgcccgccatggcgactgcgacccccgtgccgccgcggatgggcagccgcgctggcggccccaccacgccgctgagccccacgcgcctgtcgcggctccaggagaaggaggagctgcgcgagctcaatgaccggctggcggtgtacatcgacaaggtgcgcagcctggagacggagaacagcgcgctgcagctgcaggtgacggagcgcgaggaggtgcgcggccgtgagctcaccggcctcaaggcgctctacgagaccgagctggccgacgcgcgacgcgcgctcgacgacacggcccgcgagcgcgccaagctgcagatcgagctgggcaagtgcaaggcggaacacgaccagctgctcctcaactatgctaagaaggaatctgatcttaatggcgcccagatcaagcttcgagaatatgaagcagcactgaattcgaaagatgcagctcttgctactgcacttggtgacaaaaaaagtttagagggagatttggaggatctgaaggatcagattgcccagttggaagcctccttagctgcagccaaaaaacagttagcagatgaaactttacttaaagtagatttggagaatcgttgtcagagccttactgaggacttggagtttcgcaaaagcatgtatgaagaggagattaacgagaccagaaggaagcatgaaacgcgcttggtagaggtggattctgggcgtcaaattgagtatgagtacaagctggcgcaagcccttcatgagatgagagagcaacatgatgcccaagtgaggctgtataaggaggagctggagcagacttaccatgccaaacttgagaatgccagactgtcatcagagatgaatacttctactgtcaacagtgccagggaagaactgatggaaagccgcatgagaattgagagcctttcatcccagctttctaatctacagaaagagtctagagcatgtttggaaaggattcaagaattagaggacttgcttgctaaagaaaaagacaactctcgtcgcatgctgacagacaaagagagagagatggcggaaataagggatcaaatgcagcaacagctgaatgactatgaacagcttcttgatgtaaagttagccctggacatggaaatcagtgcttacaggaaactcttagaaggcgaagaagagaggttgaagctgtctccaagcccttcttcccgtgtgacagtatcccgagcatcctcaagtcgtagtgtacgtacaactagaggaaagcggaagagggttgatgtggaagaatcagaggcgagtagtagtgttagcatctctcattccgcctcagccactggaaatgtttgcatcgaagaaattgatgttgatgggaaatttatccgcttgaagaacacttctgaacaggatcaaccaatgggaggctgggagatgatcagaaaaattggagacacatcagtcagttataaatatacctcaagatatgtgctgaaggcaggccagactgttacaatttgggctgcaaacgctggtgtcacagccagccccccaactgacctcatctggaagaaccagaactcgtggggcactggcgaagatgtgaaggttatattgaaaaattctcagggagaggaggttgctcaaagaagtacagtctttaaaacaaccatacctgaagaagaggaggaggaggaagaagcagctggagtggttgttgaggaagaacttttccaccagcagggaaccccaagagcatccaatagaagctgtgcaattatgtaaaattttcaactgtcttcctcaaaataaagaagtatggtaatctttacctgtatacagtgcagagccttctcagaagcacagaatatttttatatttcctttatgtgaatttttaagctgcaaatctgatggccttaatttcctttttgacactgaaagttttgtaaaagaaatcatgtccatacactttgttgcaagatgtgaattattgacactgaacttaataactgtgtactgttcggaaggggttcctcaaattttttgactttttttgtatgtgtgttttttctttttttttaagttcttatgaggaggggagggtaaataaaccactgtgcgtcttggtgtaatttgaagattgccccatctagactagcaatctcttcattattctctgctatatataaaacggtgctgtgagggaggggaaaagcatttttcaatatattgaacttttgtactgaatttttttgtaataagcaatcaaggttataattttttttaaaatagaaattttgtaagaaggcaatattaacctaatcaccatgtaagcactctggatgatggattccacaaaacttggttttatggttacttcttctcttagattcttaattcatgaggagggtgggggagggaggtggagggagggaagggtttctctattaaaatgcattcgttgtgttttttaagatagtgtaacttgcttaaatttcttatgtgacattaacaaataaaaaagctcttttaatattga

SEQ ID NO: 15626 - DNA, 4671 bp, Homo sapiens
  source 1..4671: mol_type = unassigned DNA
gccgcggcgggcggcgggcgcggcgcggcgcggcgccatcttgcagccggcggcgcggattgaatgagcccgccgagcccgggccgccgtcgggagcagcgcaggccgcgagccgccgccaccatggccacgccgctgcccggccgcgcgggcgggcccgccacgccgctgtcgcccacgcgcctgtcgcggctgcaggagaaggaggagctgcgcgagctcaacgaccgcctggcgcactacatcgaccgcgtccgcgcgctggagctggagaacgaccggctcctgctcaagatctcagagaaggaggaggtgaccacgcgcgaggtgagtggcatcaaggcgctgtacgagtcggagctggccgatgcccggagagtcctggatgagacggctcgagagcgtgcccggctgcagatagagattgggaagctgagggcagagttggacgaggtcaacaagagcgccaagaagagggagggcgagcttacggtggcccagggccgtgtgaaggacctggagtccctgttccaccggagcgaggtggagctggcagctgccctcagcgacaagcgcggcctggagagtgacgtggctgagctgcgggcccagctggccaaggccgaggacggtcatgcagtggccaaaaagcagctggagaaggagacgctgatgcgtgtggacctggagaaccgctgccagagcctgcaggaggagctggacttccggaagagtgtgttcgaggaggaggtgcgggagacgcggcggcggcacgagcggcgcctggtggaggtggacagcagccggcagcaggagtacgacttcaagatggcacaggcgctggaggagctgcggagccagcacgacgagcaagtgcggctctacaagctggagctggagcagacctaccaggccaagctggacagcgccaagctgagctctgaccagaacgacaaggcggccagtgcggctcgcgaggagctgaaggaggcccgcatgcgcctggagtccctcagctaccagctctccggcctccagaagcaggccagtgccgctgaagatcgcattcgggagctggaggaggccatggccggggagcgggacaagttccggaagatgctggacgccaaggagcaggagatgacggagatgcgggacgtgatgcagcagcagctggccgagtaccaggagctgctggacgtgaagctggccctggacatggagatcaacgcctaccggaagctcctggagggcgaggaggagaggctgaagctgtcccccagcccatcctcgcgcgtcaccgtctcacgagccacctcgagcagcagcggcagcttgtccgccaccgggcgcctgggccgcagtaagcggaagcggctggaggtggaggagcccttgggcagcggcccaagcgtcctgggcacgggcacgggtggcagcggtggcttccacctggcccagcaggcctcggcctcgggtagcgtcagcatcgaggagatcgacctggagggcaagtttgtgcagctcaagaacaactcggacaaggatcagtctctggggaactggagaatcaagaggcaggtcttggagggggaggagatcgcctacaagttcacgcccaagtacatcctgcgcgccggccagatggtcacggtgtgggcagctggtgcgggggtggcccacagccccccctcgacgctggtgtggaagggccagagcagctggggcacgggcgagagcttccgcaccgtcctggttaacgcggatggcgaggaagtggccatgaggactgtgaagaagtcctcggtgatgcgtgagaatgagaatggggaggaagaggaggaggaagccgagtttggcgaggaggatcttttccaccaacagggggacccgaggaccacctcaagaggctgctacgtgatgtgaacccacactcctcatccacacacctttctttacccagagccactgaaaactatttttatatcattggctttctttagttcttgatacatttctagagaatttctaagcgaactgccagaacgtgtgggtgggtctcccccagccctccctcctggcgggtctcctccagcctcacttcgctgccacttcgccgctgccccggagacttttcaatcccaccccactcctcatctcaccatttggtcaaattggaagcccagggccaggacccggaggtttagaagatgcttgggcttggagggaggagggccggcgaggctagcgaggggacaggagacggccctgctgcggacggagcgcggaaactgcgtaggaattcagtggtggtgggtttttttaaggctttctacaaaaccaaattcagaatccaggcgtcgacctggtggggcccggggccaagcctgcattctggctgcccagcttcggacagcgggaactcctcaggcagccacgcagcgggtgtgggccagcatggggatggcgtggcccccagggcgggttttcactccgctgcctgggcttccagattcccgttctggcagcgcaccggccgggtttctcggaccgttgactttatttgggggagttttcccgcagttcagttcctgactgtgcaaggccaacagggcaggggaggggaagacctggggaaggaagaatgaggacagtcccgtcgtaagacctgtcacaacaataagcagggaggggagatgtggaggggacacatctggttgccttggaggcagaagctgtgagtttcagaacagctgtctgcagggaacgccaccatgttgaccctctggaggagagcgctgtggagcccctcccgtgttccagctccgtctgccctgtgcctatatatacacatgcgtctatccatactgtgcttttatctgtgattttctcgctgaaaccatgtttctcagacaggccaaggccacctgactcctatcacgacgcacccaagcccctcagtccagcttcccaatgcctggcaccccccttcggcaatagctcaccgtttacaccctccctcatagatacacagaagttatttttttaatggatatttatttttttacattggtcagtacacaggtcaggagctcacgccagggccttgaggacaggctgaccctcctccccggggtggcgtggggctggggcaccctccgacggcagagcctccttcagaaagtgcagctcaagtcttaaagacaccaaaactgagccatgggcacgcgccgtctccgggccatggcgttcactgcagggcgggggcggcaccgctcccctgtgactgcatcccgcctccctggggacctgcctgtggcaggaaggaatggggggccccagccccaggccgggaaggagccagcggccgacaaagcagaaacacccgctgctccacgtagcccctgctcgctgtccttgctctcagaagtcccggtcccatgtagatagaggggggcgcatcttaccaaagcatttcctcctggaggctacgccgctgtgctcccagtcaggcggctggtagggagctttgcctgccccggggataccctctgccagccgctggaagtgggaatgctggcgacagactgtgtcctctttcccaccttcatagcaggaatcacccggacccgactggctgggcttcgtgctagcgagggttctgggggtgggtcttggtgatcttgtcctatggggagtctgcagtggtctcagccacatcctatgtattttggctctggaggagcaaagctgtatcctggagttggtctgtgatttgccgacagccttgcaggctgggctcagggacaaagtcccccccaaaacccgcaggtcctcatgtccagacgctgcccagtcctgtcctgaaaacagcacgccccaggcccacagaaccccccaccctacatttgccttgggtggagctgggggtggtcctaggactgcgggtgcccttagctgaagggggtggggagaagcgtggactgggcagcctgtgggtaattggaggttcattgagaattgagtctttggaaacactaagaaaatcaaatttttaaaagttatttatggcctgggaaacaatttgcatttgtccccaaatacgcttagctgtgtgccgcttagaacgatgcgaaaccatccctctgtgtaagcccgtgccgtgtgactcgaagcctagcgccctccctgcgaagcatcagacgccacccagccctggggggaggcccacgcctgctggaccaacgcgggttctggggtgcacagcgccaggttaacgctgaagcctgccccgctgagcccaggagccgggaggcctgcgggctgacccagaatccgatcatgcacctgtcctcatgccagcggctttggctggggttggtctgaagcctgcacgcggcagttctttgttaaagatctgagggactcctcagtcctggggcgtcgccgcctgcagcctcttccaagccctgcgtccagcgagcgtcacagcacaacctgcaaaaacggagctgggctgcagctggggctggcatggactttcatttcagagattcggtttttaagaagatgcatgcctaatgtgttcttttttttttccaatgatttgtaatatacattttatgactggaaacttttttgtacaacactccaataaacattttgatttta

SEQ ID NO: 15627 - DNA, 4634 bp, Homo sapiens
  source 1..4634: mol_type = unassigned DNA
catcttgcagccggcggcgcggattgaatgagcccgccgagcccgggccgccgtcgggagcagcgcaggccgcgagccgccgccaccatggccacgccgctgcccggccgcgcgggcgggcccgccacgccgctgtcgcccacgcgcctgtcgcggctgcaggagaaggaggagctgcgcgagctcaacgaccgcctggcgcactacatcgaccgcgtccgcgcgctggagctggagaacgaccggctcctgctcaagatctcagagaaggaggaggtgaccacgcgcgaggtgagtggcatcaaggcgctgtacgagtcggagctggccgatgcccggagagtcctggatgagacggctcgagagcgtgcccggctgcagatagagattgggaagctgagggcagagttggacgaggtcaacaagagcgccaagaagagggagggcgagcttacggtggcccagggccgtgtgaaggacctggagtccctgttccaccggagcgaggtggagctggcagctgccctcagcgacaagcgcggcctggagagtgacgtggctgagctgcgggcccagctggccaaggccgaggacggtcatgcagtggccaaaaagcagctggagaaggagacgctgatgcgtgtggacctggagaaccgctgccagagcctgcaggaggagctggacttccggaagagtgtgttcgaggaggaggtgcgggagacgcggcggcggcacgagcggcgcctggtggaggtggacagcagccggcagcaggagtacgacttcaagatggcacaggcgctggaggagctgcggagccagcacgacgagcaagtgcggctctacaagctggagctggagcagacctaccaggccaagctggacagcgccaagctgagctctgaccagaacgacaaggcggccagtgcggctcgcgaggagctgaaggaggcccgcatgcgcctggagtccctcagctaccagctctccggcctccagaagcaggccagtgccgctgaagatcgcattcgggagctggaggaggccatggccggggagcgggacaagttccggaagatgctggacgccaaggagcaggagatgacggagatgcgggacgtgatgcagcagcagctggccgagtaccaggagctgctggacgtgaagctggccctggacatggagatcaacgcctaccggaagctcctggagggcgaggaggagaggctgaagctgtcccccagcccatcctcgcgcgtcaccgtctcacgagccacctcgagcagcagcggcagcttgtccgccaccgggcgcctgggccgcagtaagcggaagcggctggaggtggaggagcccttgggcagcggcccaagcgtcctgggcacgggcacgggtggcagcggtggcttccacctggcccagcaggcctcggcctcgggtagcgtcagcatcgaggagatcgacctggagggcaagtttgtgcagctcaagaacaactcggacaaggatcagtctctggggaactggagaatcaagaggcaggtcttggagggggaggagatcgcctacaagttcacgcccaagtacatcctgcgcgccggccagatggtcacggtgtgggcagctggtgcgggggtggcccacagccccccctcgacgctggtgtggaagggccagagcagctggggcacgggcgagagcttccgcaccgtcctggttaacgcggatggcgaggaagtggccatgaggactgtgaagaagtcctcggtgatgcgtgagaatgagaatggggaggaagaggaggaggaagccgagtttggcgaggaggatcttttccaccaacagggggacccgaggaccacctcaagaggctgctacgtgatgtgaacccacactcctcatccacacacctttctttacccagagccactgaaaactatttttatatcattggctttctttagttcttgatacatttctagagaatttctaagcgaactgccagaacgtgtgggtgggtctcccccagccctccctcctggcgggtctcctccagcctcacttcgctgccacttcgccgctgccccggagacttttcaatcccaccccactcctcatctcaccatttggtcaaattggaagcccagggccaggacccggaggtttagaagatgcttgggcttggagggaggagggccggcgaggctagcgaggggacaggagacggccctgctgcggacggagcgcggaaactgcgtaggaattcagtggtggtgggtttttttaaggctttctacaaaaccaaattcagaatccaggcgtcgacctggtggggcccggggccaagcctgcattctggctgcccagcttcggacagcgggaactcctcaggcagccacgcagcgggtgtgggccagcatggggatggcgtggcccccagggcgggttttcactccgctgcctgggcttccagattcccgttctggcagcgcaccggccgggtttctcggaccgttgactttatttgggggagttttcccgcagttcagttcctgactgtgcaaggccaacagggcaggggaggggaagacctggggaaggaagaatgaggacagtcccgtcgtaagacctgtcacaacaataagcagggaggggagatgtggaggggacacatctggttgccttggaggcagaagctgtgagtttcagaacagctgtctgcagggaacgccaccatgttgaccctctggaggagagcgctgtggagcccctcccgtgttccagctccgtctgccctgtgcctatatatacacatgcgtctatccatactgtgcttttatctgtgattttctcgctgaaaccatgtttctcagacaggccaaggccacctgactcctatcacgacgcacccaagcccctcagtccagcttcccaatgcctggcaccccccttcggcaatagctcaccgtttacaccctccctcatagatacacagaagttatttttttaatggatatttatttttttacattggtcagtacacaggtcaggagctcacgccagggccttgaggacaggctgaccctcctccccggggtggcgtggggctggggcaccctccgacggcagagcctccttcagaaagtgcagctcaagtcttaaagacaccaaaactgagccatgggcacgcgccgtctccgggccatggcgttcactgcagggcgggggcggcaccgctcccctgtgactgcatcccgcctccctggggacctgcctgtggcaggaaggaatggggggccccagccccaggccgggaaggagccagcggccgacaaagcagaaacacccgctgctccacgtagcccctgctcgctgtccttgctctcagaagtcccggtcccatgtagatagaggggggcgcatcttaccaaagcatttcctcctggaggctacgccgctgtgctcccagtcaggcggctggtagggagctttgcctgccccggggataccctctgccagccgctggaagtgggaatgctggcgacagactgtgtcctctttcccaccttcatagcaggaatcacccggacccgactggctgggcttcgtgctagcgagggttctgggggtgggtcttggtgatcttgtcctatggggagtctgcagtggtctcagccacatcctatgtattttggctctggaggagcaaagctgtatcctggagttggtctgtgatttgccgacagccttgcaggctgggctcagggacaaagtcccccccaaaacccgcaggtcctcatgtccagacgctgcccagtcctgtcctgaaaacagcacgccccaggcccacagaaccccccaccctacatttgccttgggtggagctgggggtggtcctaggactgcgggtgcccttagctgaagggggtggggagaagcgtggactgggcagcctgtgggtaattggaggttcattgagaattgagtctttggaaacactaagaaaatcaaatttttaaaagttatttatggcctgggaaacaatttgcatttgtccccaaatacgcttagctgtgtgccgcttagaacgatgcgaaaccatccctctgtgtaagcccgtgccgtgtgactcgaagcctagcgccctccctgcgaagcatcagacgccacccagccctggggggaggcccacgcctgctggaccaacgcgggttctggggtgcacagcgccaggttaacgctgaagcctgccccgctgagcccaggagccgggaggcctgcgggctgacccagaatccgatcatgcacctgtcctcatgccagcggctttggctggggttggtctgaagcctgcacgcggcagttctttgttaaagatctgagggactcctcagtcctggggcgtcgccgcctgcagcctcttccaagccctgcgtccagcgagcgtcacagcacaacctgcaaaaacggagctgggctgcagctggggctggcatggactttcatttcagagattcggtttttaagaagatgcatgcctaatgtgttcttttttttttccaatgatttgtaatatacattttatgactggaaacttttttgtacaacactccaataaacattttgatttt

SEQ ID NO: 15628 - DNA, 1310 bp, Homo sapiens
  source 1..1310: mol_type = unassigned DNA
agataatcatgctttttaataccttttcacctaatggacttcttctctacctgggttcatacggcacaaaagactttttatccatcgagctgtttcgtggcagagtgaaggttatgactgacctgggttcaggacccattacccttttgacagacagacgttataacaatggaacctggtacaaaattgccttccagcgaaaccggaagcaaggagtgctagcagttatcgatgcctataacaccagtaataaagaaaccaagcagggcgagactccgggagcatcttctgacctcaaccgcctagacaaggacccgatttatgtgggtggattaccaaggtcaagagttgtaaggagaggtgtcaccaccaaaagctttgtgggctgcatcaagaacctggaaatatccagatcaacctttgacttactcagaaattcctatggagtgagaaaaggctgtttactggagcccatccggagtgttagcttcctgaaaggcggctacattgaattgccacccaaatctttgtcaccagaatcagaatggctggtaacatttgccaccacgaacagcagtggcatcatcctggctgccctcggcggggatgtggagaagcggggtgatcgtgaggaagcacacgtgcccttcttttccgtcatgctgatcggaggcaacattgaggtacatgtcaatcctggggatgggacaggcctgagaaaagctctcctgcacgctcccacgggtacctgcagtgatggacaagcgcattccatctccttggtcaggaatcggagaattatcactgtccaattggatgagaacaatcctgtggaaatgaagttgggcacattagtagaaagcaggacgataaatgtgtccaatctgtacgtcgggggaattccagagggagaggggacgtcactgctcacaatgagaagatcgttccatggctgtatcaaaaacctgatcttcaatttggaacttttggatttcaacagtgcagttatgagcaagtcgacctggacacctgctggctgtcagaaaggcctaagctggctcccgatgcagaggacaaagctcttgccagagccccgggcttttccagtaggagcggcttcctttactatcagtcaggtccagtcagcaaaggagggcctaggacagagggagttaaaatggggccttgctgtaaaggtgcctgcgaaagctggagctggagctggagctggagctgtgctaaaaatcagagcggggacagggagggaaagggtgcctcaagcaactcagatgacacggcccaatccatag

SEQ ID NO: 15629 - DNA, 9657 bp, Homo sapiens
  source 1..9657: mol_type = unassigned DNA
cggggccagggcagcgcggactcgcgtcccgtggagcgttccaggcgggcgcgcggctttctccccagacccaccgagtggcggcggaggcgagatgcgcgggggcgtgctcctggtcttgctgctgtgtgtcgccgcgcagtgccggcagagaggcctgtttcctgccattctcaatcttgccagcaatgctcacatcagcaccaatgccacctgtggcgagaaggggccggagatgttctgcaaacttgtggagcatgtgccaggtcggcccgtccgaaacccacagtgccggatctgtgatggcaacagcgcaaaccccagagaacgccatccaatatcacatgccatagatggcaccaataactggtggcaaagtcccagcattcagaatgggagagaatatcactgggtcacaatcactctggacttaagacaggtctttcaagttgcatatgtcatcattaaagctgccaatgcccctcgacctggaaactggattttggagcgttctctggatggcaccacgttcagcccctggcagtattatgcagtcagcgactcagagtgtttgtctcgttacaatataactccaagacgagggccacccacctacagggctgatgatgaagtgatctgcacctcctattattccagattggtgccacttgagcatggagagattcatacatcactcatcaatggcagaccaagcgctgacgatctttcacccaagttgttggaattcacttctgcacgatatattcgccttcgcttgcaacgcattagaacgctcaatgcagatctcatgacccttagccaccgggaacctaaagaactggatcctattgttaccagacgctattattattcaataaaggacatttctgttggaggcatgtgtatctgctatggccatgctagtagctgcccatgggatgaaactacaaagaaactgcagtgtcaatgtgagcataatacttgcggggagagctgtaacaggtgctgtcctgggtaccatcagcagccctggaggccgggaaccgtgtcctccggcaatacatgtgaagcatgtaattgtcacaataaagccaaagactgttactatgatgaaagtgttgcaaagcagaagaaaagtttgaatactgctggacagttcagaggaggaggggtttgcataaattgcttgcagaacaccatgggaatcaactgtgaaacctgtattgatggatattatagaccacacaaagtgtctccttatgaggatgagccttgccgcccctgtaattgtgaccctgtggggtccctcagttctgtctgtattaaggatgacctccattctgacttacacaatgggaagcagccaggtcagtgcccatgtaaggaaggttatacaggagaaaaatgtgatcgctgccaacttggctataaggattacccgacctgtgtctcctgtgggtgcaacccagtgggcagtgccagtgatgagccctgcacagggccctgtgtttgtaaggaaaacgttgaggggaaggcctgtgatcgctgcaagccaggattctataacttgaaggaaaaaaacccccggggctgctccgagtgcttctgctttggcgtttctgatgtctgcagcagcctctcttggcctgttggtcaggtaaacagtatgtccgggtggctggtcaccgacttgatcagtcccaggaagatcccgtctcagcaagatgcactaggcgggcgccatcaggtcagcatcaacaacaccgcggtcatgcagagactggctcccaagtactactgggcagcccccgaggcctaccttggaaataagctgactgcgtttggcggattcctgaaatacacggtgtcctacgatattccggtagagacggtagacagtaacctcatgtcgcatgctgacgtcatcattaagggaaacggactcactttaagcacacaggctgagggtctgtcattgcagccttatgaagagtacctaaacgtggttagacttgtgcctgaaaacttccaagattttcacagcaaaaggcagattgatcgtgaccagctgatgactgtccttgccaatgtgacacatcttttgatcagagccaactacaattctgcaaaaatggctctttacaggttggagtccgtctctctggacatagccagctctaatgccatcgacctggtggtggccgctgatgtggagcactgtgaatgtccgcaaggctacacagggacctcctgtgagtcgtgcctctctggctattaccgcgtggatggaatactctttggaggaatttgtcaaccctgtgaatgccacggccatgcagctgagtgtaatgttcacggcgtttgcattgcgtgtgcgcacaacaccaccggcgtccactgtgagcagtgcttgcccggcttctacggggagccttcccgagggacacctggggactgccagccctgcgcctgccctctcaccatagcctccaacaatttcagccccacctgccacctcaatgatggagatgaagtggtctgtgactggtgtgccccgggctactcaggagcttggtgtgagagatgtgcagatggttactatggaaacccaacagtgcctggcgaatcttgtgttccctgtgactgcagcggcaacgtggacccctcggaggctggtcactgtgactcagtcaccggggagtgcctgaagtgcctggggaacacagatggcgcccactgtgaaaggtgtgctgacgggttctatggggacgctgtgacagccaagaactgccgcgcctgtgaatgccatgtgaaaggctcccattctgccgtgtgccatcttgagaccgggctctgtgactgcaaaccaaacgtgactggacagcagtgtgaccagtgcttgcatggctattatgggctggactcaggccatggctgccggccctgcaactgcagcgtggcaggctccgtgtcagatggctgcacggatgaaggccagtgtcactgtgtcccaggtgtggcagggaaaaggtgtgacaggtgtgcccatggcttctacgcctaccaggatggtagctgtacaccctgtgactgcccacacactcagaatacctgcgacccagaaactggagagtgtgtctgcccccctcacacacagggtgtgaagtgtgaagaatgtgaggatgggcactggggctacgatgcggaggtggggtgccaggcctgcaattgcagtctcgtggggtcgactcatcatcggtgcgatgtggtcaccggccattgccagtgcaagtcaaaatttggtggccgggcctgcgatcagtgttccttgggttacagagactttcccgactgtgttccctgtgactgtgacctgagggggacgtcgggggacgcctgcaacctggagcagggtctctgcggctgtgtggaggaaaccggggcctgcccttgcaaggaaaatgtctttggtcctcagtgcaacgaatgtcgagagggcaccttcgctctccgcgcagacaaccccctgggctgcagcccgtgcttctgctccgggctgtcccacctctgctcagagctggaggactacgtgaggaccccagtaacgctgggctccgatcagcctcttctgcgtgtggtttctcagagtaacttgaggggcacgaccgagggggtttactaccaggcccccgacttcctgctggatgccgccaccgtccggcagcacatccgtgcagagccgttttactggcggctgccgcagcagttccaaggagaccagctcatggcctatggtggcaaactgaagtacagcgtggccttctattctttggatggcgtcggcacctccaattttgagcctcaagttctcatcaaaggtggtcggatcagaaagcaagtcatttacatggatgcaccagccccagagaatggagtgagacaggaacaagaagtagcaatgagagagaatttttggaaatattttaactctgtttctgaaaaacctgtcacgcgagaggattttatgtctgtcctcagcgatattgagtacatcctcatcaaggcatcgtatggtcaaggattacagcagagcagaatctcagacatttcaatggaggttggcagaaaggctgaaaagctgcacccagaagaagaggttgcatctcttttagagaattgtgtctgtcctcctggcactgtgggattctcatgtcaggactgcgcccctgggtaccacagagggaagctcccagcagggagtgacaggggaccacgccctctggttgctccttgtgttccctgcagttgcaacaaccacagtgacacctgtgaccccaacaccgggaagtgtctgaactgtggcgataacacagcaggtgaccattgtgatgtgtgtacttctggctactacgggaaggtgactggctcagcaagtgactgtgctctgtgtgcctgtcctcacagccctcctgccagttttagtcccacttgtgtcttggaaggggaccacgatttccgttgtgacgcctgtctcctgggctatgaaggaaaacactgtgaaaggtgctcctcaagctattatgggaaccctcaaacaccaggtggcagttgccagaagtgtgactgcaacccgcacggctctgtccacggtgactgtgaccgcacatctgggcagtgcgtttgcaggctgggggcctcggggctccggtgcgatgagtgtgaaccgaggcacattctgatggaaacagattgtgtttcctgtgatgatgagtgtgtaggtgtgctgctgaatgacttggatgagattggtgatgccgttctttctctgaacctcactggcattatccctgtcccatatggaattttgtcaaacctggaaaatacaactaaatatctccaggaatctttattaaaagaaaatatgcaaaaggacctgggaaaaattaagcttgaaggtgttgcagaagaaacggacaacctgcaaaagaagctcactaggatgttagcgagtacccaaaaggtgaatagggcaactgagagaatcttcaaggagagtcaagacctggccatagccattgagaggctgcagatgagcatcacagaaattatggaaaagacaactttaaatcagactttggatgaagatttcctactacccaattctactcttcagaacatgcaacagaatggtacatctttgctagaaatcatgcagataagagacttcacacagttgcaccaaaatgccacccttgaactcaaggctgctgaagatttattgtcacaaattcaggaaaattaccagaagccgctggaagaattggaggtattgaaagaagcagcaagccacgtcctttcaaagcacaacaatgaactaaaggcggctgaggcgctcgtgagggaagctgaggcaaagatgcaggaaagcaaccacctgctgctcatggtcaatgctaatctgagagaattcagtgataaaaagctgcatgttcaagaagaacaaaatctgacctcagagctcattgtccaaggaagaggattgatagatgctgctgctgcacaaacagatgctgtacaagatgctctagagcacttagaggatcaccaggataagctacttttatggtctgccaaaatcaggcaccacatagatgacctggtcatgcacatgtcccaaaggaacgcagtcgacctggtctacagagctgaggaccatgccgctgagttccagagactagcagatgttctgtacagtggccttgaaaacatcagaaatgtgtccctgaatgccaccagtgcagcctatgtccattacaacatccagagcctgattgaagaatcggaggaactggccagagatgctcacaggactgtgactgagacgagcctgctctcagaatcccttgtttctaacgggaaagcggccgtgcagcgcagctccagatttctaaaagaaggcaacaacctcagcaggaagcttccaggtattgcattggaactgagtgaattgagaaataagacaaacagatttcaagagaatgctgttgaaattaccaggcaaaccaatgaatcactcttgatacttagagcaattcctaaaggtataagagacaagggagccaaaaccaaagagctggccacgtctgcaagccagagcgcggtgagcacgctgagggacgtggcggggctgagccaggagctgctgaacacatctgccagcctgtccagggtcaacaccacattacgagagacacaccagcttctgcaggactccaccatggccactctgttggctggaagaaaagtcaaagacgtggaaattcaagccaaccttttgtttgatcggttgaagcctttgaagatgttagaggagaatctgagcagaaacctatcagaaattaaactgttgatcagccaggcccgcaaacaagcagcttctattaaagtcgccgtgtctgcagacagagattgcatccgggcctaccagcctcagatttcctctaccaactacaataccttaacactaaatgttaagacacaggaacccgataatcttctcttctacctcggtagcagcaccgcttctgatttccttgcagtggagatgcggcgagggagagtggccttcctgtgggacctgggctccgggtccacacgcttggagtttccagactttcccattgatgacaacagatggcacagtatccatgtagccagatttggaaacattggttcactgagtgtaaaggaaatgagctcaaatcaaaagtcaccaacaaaaacaagtaaatcccctgggacagctaatgttctggatgtaaacaattcaacactcatgtttgttggaggtcttggaggacaaatcaagaaatctcctgctgtgaaggttactcattttaaaggctgcttgggggaggccttcctgaatggaaaatccataggcctatggaactatattgaaagggaaggcaagtgccgtgggtgcttcggaagctcccagaatgaagacccttccttccattttgacgggagtgggtactctgtcgtggagaagtcacttccggctaccgtgacccagataatcatgctttttaataccttttcacctaatggacttcttctctacctgggttcatacggcacaaaagactttttatccatcgagctgtttcgtggcagagtgaaggttatgactgacctgggttcaggacccattacccttttgacagacagacgttataacaatggaacctggtacaaaattgccttccagcgaaaccggaagcaaggagtgctagcagttatcgatgcctataacaccagtaataaagaaaccaagcagggcgagactccgggagcatcttctgacctcaaccgcctagacaaggacccgatttatgtgggtggattaccaaggtcaagagttgtaaggagaggtgtcaccaccaaaagctttgtgggctgcatcaagaacctggaaatatccagatcaacctttgacttactcagaaattcctatggagtgagaaaaggctgtttactggagcccatccggagtgttagcttcctgaaaggcggctacattgaattgccacccaaatctttgtcaccagaatcagaatggctggtaacatttgccaccacgaacagcagtggcatcatcctggctgccctcggcggggatgtggagaagcggggtgatcgtgaggaagcacacgtgcccttcttttccgtcatgctgatcggaggcaacattgaggtacatgtcaatcctggggatgggacaggcctgagaaaagctctcctgcacgctcccacgggtacctgcagtgatggacaagcgcattccatctccttggtcaggaatcggagaattatcactgtccaattggatgagaacaatcctgtggaaatgaagttgggcacattagtagaaagcaggacgataaatgtgtccaatctgtacgtcgggggaattccagagggagaggggacgtcactgctcacaatgagaagatcgttccatggctgtatcaaaaacctgatcttcaatttggaacttttggatttcaacagtgcagttggccatgagcaagtcgacctggacacctgctggctgtcagaaaggcctaagctggctcccgatgcagaggacagcaagctcttgccagagccccgggcttttccagaacagtgtgtggtggatgcagctctggagtacgttcccggcgctcaccagtttggtctcacacaaaacagccatttcatcttgccttttaatcagtcggctgtcagaaagaagctctcggttgagctaagcatccgcacgttcgcctccagcggcctgatttactacatggctcatcagaaccaagcagactacgctgtgctccagctgcacgggggccgcctccacttcatgtttgaccttggcaaaggcagaacaaaggtctctcaccctgcactgctcagtgatggcaagtggcacacggtcaagacagactatgttaaaagaaaaggcttcataactgtcgacggccgagagtctcccatggtgactgtggtgggagatggaaccatgctggatgtggagggtttgttctacctaggaggcctgccctcccagtaccaggccaggaaaattggaaatatcacccacagcatccctgcctgcattggggatgtgacggttaacagcaaacagctggacaaggacagcccggtgtctgccttcacggtgaacaggtgctacgcagtggcccaggaaggaacatactttgacggaagcggatatgcagctcttgtcaaagagggctacaaagtccagtcagatgtgaacatcacactggagtttcgaacctcctcgcagaatggcgtcctcctggggatcagcactgccaaagtggatgccattggactagagcttgtggacggcaaggtcttgttccatgtcaacaatggtgctggcaggataacagctgcatatgagcccaaaaccgccactgtgctctgtgatggaaaatggcacactcttcaagctaacaaaagcaaacaccgtatcactctgattgttgacgggaacgcagttggcgctgaaagtccacacacccagtctacctcagtggacaccaacaatcccatttatgttggtggctatcctgctggtgtgaagcaaaaatgcctgcgcagccagacctcgttccgcgggtgtttgaggaagctagctctgattaagagcccgcaggtgcagtcctttgacttcagcagagcgttcgaactgcacggagttttccttcattcctgtcctgggaccgagtcctgaacttcaagcagaatcctcagttggaatcattgctaatattttgaggagaagtgtatgtgtgaattaagaatctcttcagttcatatttcatttccaactcaggttaagtgtttctggggagagatgttgtgtttacgttacactaaaaccacatgtgcaacaaatacctccattaaatggtctaaaatgtaaattgaattccctggctctctttttaaacgtatttttaaaaaaatctttatacacattgaatgttctgttgattacttgatagtattttatgtttttcattttgagctttttaaaaaagtatcaatacagatgataacagatca

SEQ ID NO: 15630 - DNA, 9687 bp, Homo sapiens
  source 1..9687: mol_type = unassigned DNA
ttccccagcagctgctgctcgctcagctcacaagccaaggccaggggacagggcggcagcgactcctctggctcccgagaagtggatccggtcgcggccactacgatgccgggagccgccggggtcctcctccttctgctgctctccggaggcctcgggggcgtacaggcgcagcggccgcagcagcagcggcagtcacaggcacatcagcaaagaggtttattccctgctgtcctgaatcttgcttctaatgctcttatcacgaccaatgcaacatgtggagaaaaaggacctgaaatgtactgcaaattggtagaacatgtccctgggcagcctgtgaggaacccgcagtgtcgaatctgcaatcaaaacagcagcaatccaaaccagagacacccgattacaaatgctattgatggaaagaacacttggtggcagagtcccagtattaagaatggaatcgaataccattatgtgacaattaccctggatttacagcaggtgttccagatcgcgtatgtgattgtgaaggcagctaactccccccggcctggaaactggattttggaacgctctcttgatgatgttgaatacaagccctggcagtatcatgctgtgacagacacggagtgcctaacgctttacaatatttatccccgcactgggccaccgtcatatgccaaagatgatgaggtcatctgcacttcattttactccaagatacaccccttagaaaatggagagattcacatctctttaatcaatgggagaccaagtgccgatgatccttctccagaactgctagaatttacctccgctcgctatattcgcctgagatttcagaggatccgcacactgaatgctgacttgatgatgtttgctcacaaagacccaagagaaattgaccccattgtcaccagaagatattactactcggtcaaggatatttcagttggagggatgtgcatctgctatggtcatgccagggcttgtccacttgatccagcgacaaataaatctcgctgtgagtgtgagcataacacatgtggcgatagctgtgatcagtgctgtccaggattccatcagaaaccctggagagctggaacttttctaactaaaactgaatgtgaagcatgcaattgtcatggaaaagctgaagaatgctattatgatgaaaatgttgccagaagaaatctgagtttgaatatacgtggaaagtacattggagggggtgtctgcattaattgtacccaaaacactgctggtataaactgcgagacatgtactgatggcttcttcagacccaaaggggtatctccaaattatccaaggccatgccagccatgtcattgcgatccaattggttccttaaatgaagtctgtgtcaaggatgagaaacatgctcgacgaggtttggcacctggatcctgtcattgcaaaactggttttggaggtgtgagctgtgatcggtgtgccaggggctacactggctacccggactgcaaagcctgtaactgcagtgggttagggagcaaaaatgaggatccttgttttggcccctgtatctgcaaggaaaatgttgaaggaggagactgtagtcgttgcaaatccggcttcttcaatttgcaagaggataattggaaaggctgcgatgagtgtttctgttcaggggtttcaaacagatgtcagagttcctactggacctatggcaaaatacaagatatgagtggctggtatctgactgaccttcctggccgcattcgagtggctccccagcaggacgacttggactcacctcagcagatcagcatcagtaacgcggaggcccggcaagccctgccgcacagctactactggagcgcgccggctccctatctgggaaacaaactcccagcagtaggaggacagttgacatttaccatatcatatgaccttgaagaagaggaagaagatacagaacgtgttctccagcttatgattatcttagagggtaatgacttgagcatcagcacagcccaagatgaggtgtacctgcacccatctgaagaacatactaatgtattgttacttaaagaagaatcatttaccatacatggcacacattttccagtccgtagaaaggaatttatgacagtgcttgcgaatttgaagagagtcctcctacaaatcacatacagctttgggatggatgccatcttcaggttgagctctgttaaccttgaatccgctgtctcctatcctactgatggaagcattgcagcagctgtagaagtgtgtcagtgcccaccagggtatactggctcctcttgtgaatcttgttggcctaggcacaggcgagttaacggcactatttttggtggcatctgtgagccatgtcagtgctttggtcatgcggagtcctgtgatgacgtcactggagaatgcctgaactgtaaggatcacacaggtggcccatattgtgataaatgtcttcctggtttctatggcgagcctactaaaggaacctctgaagactgtcaaccctgtgcctgtccactcaatatcccatccaataactttagcccaacgtgccatttagaccggagtcttggattgatctgtgatggatgccctgtcgggtacacaggaccacgctgtgagaggtgtgcagaaggctattttggacaaccctctgtacctggaggatcatgtcagccatgccaatgcaatgacaaccttgacttctccatccctggcagctgtgacagcttgtctggctcctgtctgatatgtaaaccaggtacaacaggccggtactgtgagctctgtgctgatggatattttggagatgcagttgatgcgaagaactgtcagccctgtcgctgtaatgccggtggctctttctctgaggtttgccacagtcaaactggacagtgtgagtgcagagccaacgttcagggtcagagatgtgacaaatgcaaggctgggacctttggcctacaatcagcaaggggctgtgttccctgcaactgcaattcttttgggtctaagtcattcgactgtgaagagagtggacaatgttggtgccaacctggagtcacagggaagaaatgtgaccgctgtgcccacggctatttcaacttccaagaaggaggctgcacagcttgtgaatgttctcatctgggtaataattgtgacccaaagactgggcgatgcatttgccctcccaataccattggagagaaatgttctaaatgtgcacccaatacctggggccacagcattaccactggttgtaaggcttgtaactgcagcacagtgggatccttggatttccaatgcaatgtaaatacaggccaatgcaactgtcatccaaaattctctggtgcaaaatgtacagagtgcagtcgaggtcactggaactaccctcgctgcaatctctgtgactgcttcctccctgggacagatgccacaacctgtgattcagagactaaaaaatgctcctgtagtgatcaaactgggcagtgcacttgtaaggtgaatgtggaaggcatccactgtgacagatgccggcctggcaaattcggactcgatgccaagaatccacttggctgcagcagctgctattgcttcggcactactacccagtgctctgaagcaaaaggactgatccggacgtgggtgactctgaaggctgagcagaccattctacccctggtagatgaggctctgcagcacacgaccaccaagggcattgtttttcaacatccagagattgttgcccacatggacctgatgagagaagatctccatttggaacctttttattggaaacttccagaacaatttgaaggaaagaagttgatggcctatgggggcaaactcaagtatgcaatctatttcgaggctcgggaagaaacaggtttctctacatataatcctcaagtgatcattcgaggtgggacacctactcatgctagaattatcgtcaggcatatggctgctcctctgattggccaattgacaaggcatgaaattgaaatgacagagaaagaatggaaatattatggggatgatcctcgagtccatagaactgtgacccgagaagacttcttggatatactatatgatattcattacattcttatcaaagctacttatggaaatttcatgcgacaaagcaggatttctgaaatctcaatggaggtagctgaacaaggacgtggaacaacaatgactcctccagctgacttgattgaaaaatgtgattgtcccctgggctattctggcctgtcctgtgaggcatgcttgccgggattttatcgactgcgttctcaaccaggtggccgcacccctggaccaaccctgggcacctgtgttccatgtcaatgtaatggacacagcagcctgtgtgaccctgaaacatcgatatgccagaattgtcaacatcacactgctggtgacttctgtgaacgatgtgctcttggatactatggaattgtcaagggattgccaaatgactgtcagcaatgtgcctgccctctgatttcttccagtaacaatttcagcccctcttgtgtcgcagaaggacttgacgactaccgctgcacggcttgtccacggggatatgaaggccagtactgtgaaaggtgtgcccctggctatactggcagtccaggcaaccctggaggctcctgccaagaatgtgagtgtgatccctatggctcactgcctgtgccctgtgaccctgtcacaggattctgcacgtgccgacctggagccacgggaaggaagtgtgacggctgcaagcactggcatgcacgcgagggctgggagtgtgttttttgtggagatgagtgcactggccttcttctcggtgacttggctcgcctggagcagatggtcatgagcatcaacctcactggtccgctgcctgcgccatataaaatgctgtatggtcttgaaaatatgactcaggagctaaagcacttgctgtcacctcagcgggccccagagaggcttattcagctggcagagggcaatctgaatacactcgtgaccgaaatgaacgagctgctgaccagggctaccaaagtgacagcagatggcgagcagaccggacaggatgctgagaggaccaacacaagagcaaagtccctgggagaattcattaaggagcttgcccgggatgcagaagctgtaaatgaaaaagctataaaactaaatgaaactctaggaactcgagacgaggcctttgagagaaatttggaagggcttcagaaagagattgaccagatgattaaagaactgaggaggaaaaatctagagacacaaaaggaaattgctgaagatgagttggtagctgcagaagcccttctgaaaaaagtgaagaagctgtttggagagtcccggggggaaaatgaagaaatggagaaggatctccgggaaaaactggctgactacaaaaacaaagttgatgatgcttgggaccttttgagagaagccacagataaaatcagagaagctaatcgcctatttgcagtaaatcagaaaaacatgactgcattggagaaaaagaaggaggctgttgaaagcggcaaacgacaaattgagaacactttaaaagagggcaatgacatactcgatgaagccaaccgtcttgcagatgaaatcaactccatcatagactatgttgaagacatccaaactaaattgccacctatgtctgaggagcttaatgataaaatagatgacctctcccaagaaataaaggacaggaagcttgctgagaaggtgtcccaggctgagagccacgcagctcagttgaatgactcatctgctgtccttgatggaatccttgatgaggctaaaaacatctccttcaatgccactgcagccttcaaagcttacagcaatattaaggactatattgatgaagctgagaaagttgccaaagaagccaaagatcttgcacatgaagctacaaaactggcaacaggtcctcggggtttattaaaggaagatgccaaaggctgtcttcagaaaagcttcaggattcttaacgaagccaagaagttagcaaatgatgtaaaagaaaatgaagaccatctaaatggcttaaaaaccaggatagaaaatgctgatgctagaaatggggatctcttgagaactttgaatgacactttgggaaagttatcagctattccaaatgatacagctgctaaactgcaagctgttaaggacaaagccagacaagccaacgacacagctaaagatgtactggcacagattacagagctccaccagaacctcgatggcctgaagaagaattacaataaactagcagacagcgtcgccaaaacgaatgctgtggttaaagatccttccaagaacacagttgccgatgcagatgccactgtcaaaaatttagaacaggaagctgaccggctaatagataaactcaaacccatcaaggaacttgaggataacctaaagaaaaacatctctgagataaaggaattgataaaccaagctcggaaacaagccaattctatcaaagtatctgtgtcttcaggaggtgactgcattcgaacatacaaaccagaaatcaagaaaggaagttacaataatattgttgtcaacgtaaagacagctgttgctgataacctcctcttttatcttggaagtgccaaatttattgactttctggctatagaaatgcgtaaaggcaaagtcagcttcctctgggatgttggatctggagttggacgtgtagagtacccagatttgactattgatgactcatattggtaccgtatcgtagcatcaagaactgggagaaatggaactatttctgtgagagccctggatggacccaaagccagcattgtgcccagcacacaccattcgacgtctcctccagggtacacgattctagatgtggatgcaaatgcaatgctgtttgttggtggcctgactgggaaattaaagaaggctgatgctgtacgtgtgattacattcactggctgcatgggagaaacatactttgacaacaaacctataggtttgtggaatttccgagaaaaagaaggtgactgcaaaggatgcactgtcagtcctcaggtggaagatagtgaggggactattcaatttgatggagaaggttatgcattggtcagccgtcccattcgctggtaccccaacatctccactgtcatgttcaagttcagaacattttcttcgagtgctcttctgatgtatcttgccacacgagacctgagagatttcatgagtgtggagctcactgatgggcacataaaagtcagttacgatctgggctcaggaatggcttccgttgtcagcaatcaaaaccataatgatgggaaatggaaatcattcactctgtcaagaattcaaaaacaagccaatatatcaattgtagatatagatactaatcaggaggagaatatagcaacttcgtcttctggaaacaactttggtcttgacttgaaagcagatgacaaaatatattttggtggcctgccaacgctgagaaacttgagtatgaaagcaaggccagaagtaaatctgaagaaatattccggctgcctcaaagatattgaaatttcaagaactccgtacaatatactcagtagtcccgattatgttggtgttaccaaaggatgttccctggagaatgtttacacagttagctttcctaagcctggttttgtggagctctcccctgtgccaattgatgtaggaacagaaatcaacctgtcattcagcaccaagaatgagtccggcatcattcttttgggaagtggagggacaccagcaccacctaggagaaaacgaaggcagactggacaggcctattatgcaatactcctcaacaggggccgtctggaagtgcatctctccacaggggcacgaacaatgaggaaaattgtgatcagaccagagccgaatctgtttcatgatggaagagaacattccgttcatgtagagcgaactagaggcatctttacagttcaagtggatgaaaacagaagatacatgcaaaacctgacagttgaacagcctatcgaagttaaaaagcttttcgttgggggtgctccacctgaatttcaaccttccccactcagaaatattcctccttttgaaggctgcatatggaatcttgttattaactctgtccccatggactttgcaaggcctgtgtccttcaaaaatgctgacattggtcgctgtgcccatcagaaactccgtgaagatgaagatggagcagctccagctgaaatagttatccagcctgagccagttcccaccccagcctttcctacgcccaccccagttctgacacatggtccttgtgctgcagaatcagaaccagctcttttgatagggagcaagcagttcgggctttcaagaaacagtcacattgcaattgcatttgatgacaccaaagttaaaaaccgtctcacaattgagttggaagtaagaaccgaagctgaatccggcttgcttttttacatggctcgcatcaatcatgctgattttgcaacagttcagctgagaaatggattgccctacttcagctatgacttggggagtggggacacccacaccatgatccccaccaaaatcaatgatggccagtggcacaagattaagataatgagaagtaagcaagaaggaattctttatgtagatggggcttccaacagaaccatcagtcccaaaaaagccgacatcctggatgtcgtgggaatgctgtatgttggtgggttacccatcaactacactacccgaagaattggtccagtgacctatagcattgatggctgcgtcaggaatctccacatggcagaggcccctgccgatctggaacaacccacctccagcttccatgttgggacatgttttgcaaatgctcagaggggaacatattttgacggaaccggttttgccaaagcagttggtggattcaaagtgggattggaccttcttgtagaatttgaattccgcacaactacaacgactggagttcttctggggatcagtagtcaaaaaatggatggaatgggtattgaaatgattgatgaaaagttgatgtttcatgtggacaatggtgcgggcagattcactgctgtctatgatgctggggttccagggcatttgtgtgatggacaatggcataaagtcactgccaacaagatcaaacaccgcattgagctcacagtcgatgggaaccaggtggaagcccaaagcccaaacccagcatctacatcagctgacacaaatgaccctgtgtttgttggaggcttcccagatgacctcaagcagtttggcctaacaaccagtattccgttccgaggttgcatcagatccctgaagctcaccaaaggcacaggcaagccactggaggttaattttgccaaggccctggaactgaggggcgttcaacctgtatcatgcccagccaactaataaaaataagtgtaaccccaggaagagtctgtcaaaacaagtatatcaagtaaaacaaacaaatatattttacctatatatgttaattaaactaatttgtgcatgtacatagaattctttctgtattcagatggtgctaattcagactccagactgaattttaattcaagttctttctcaagtctataaataatattaaactgattatttcattct

SEQ ID NO: 15631 - DNA, 9690 bp, Homo sapiens
  source 1..9690: mol_type = unassigned DNA
ttccccagcagctgctgctcgctcagctcacaagccaaggccaggggacagggcggcagcgactcctctggctcccgagaagtggatccggtcgcggccactacgatgccgggagccgccggggtcctcctccttctgctgctctccggaggcctcgggggcgtacaggcgcagcggccgcagcagcagcggcagtcacaggcacatcagcaaagaggtttattccctgctgtcctgaatcttgcttctaatgctcttatcacgaccaatgcaacatgtggagaaaaaggacctgaaatgtactgcaaattggtagaacatgtccctgggcagcctgtgaggaacccgcagtgtcgaatctgcaatcaaaacagcagcaatccaaaccagagacacccgattacaaatgctattgatggaaagaacacttggtggcagagtcccagtattaagaatggaatcgaataccattatgtgacaattaccctggatttacagcaggtgttccagatcgcgtatgtgattgtgaaggcagctaactccccccggcctggaaactggattttggaacgctctcttgatgatgttgaatacaagccctggcagtatcatgctgtgacagacacggagtgcctaacgctttacaatatttatccccgcactgggccaccgtcatatgccaaagatgatgaggtcatctgcacttcattttactccaagatacaccccttagaaaatggagagattcacatctctttaatcaatgggagaccaagtgccgatgatccttctccagaactgctagaatttacctccgctcgctatattcgcctgagatttcagaggatccgcacactgaatgctgacttgatgatgtttgctcacaaagacccaagagaaattgaccccattgtcaccagaagatattactactcggtcaaggatatttcagttggagggatgtgcatctgctatggtcatgccagggcttgtccacttgatccagcgacaaataaatctcgctgtgagtgtgagcataacacatgtggcgatagctgtgatcagtgctgtccaggattccatcagaaaccctggagagctggaacttttctaactaaaactgaatgtgaagcatgcaattgtcatggaaaagctgaagaatgctattatgatgaaaatgttgccagaagaaatctgagtttgaatatacgtggaaagtacattggagggggtgtctgcattaattgtacccaaaacactgctggtataaactgcgagacatgtactgatggcttcttcagacccaaaggggtatctccaaattatccaaggccatgccagccatgtcattgcgatccaattggttccttaaatgaagtctgtgtcaaggatgagaaacatgctcgacgaggtttggcacctggatcctgtcattgcaaaactggttttggaggtgtgagctgtgatcggtgtgccaggggctacactggctacccggactgcaaagcctgtaactgcagtgggttagggagcaaaaatgaggatccttgttttggcccctgtatctgcaaggaaaatgttgaaggaggagactgtagtcgttgcaaatccggcttcttcaatttgcaagaggataattggaaaggctgcgatgagtgtttctgttcaggggtttcaaacagatgtcagagttcctactggacctatggcaaaatacaagatatgagtggctggtatctgactgaccttcctggccgcattcgagtggctccccagcaggacgacttggactcacctcagcagatcagcatcagtaacgcggaggcccggcaagccctgccgcacagctactactggagcgcgccggctccctatctgggaaacaaactcccagcagtaggaggacagttgacatttaccatatcatatgaccttgaagaagaggaagaagatacagaacgtgttctccagcttatgattatcttagagggtaatgacttgagcatcagcacagcccaagatgaggtgtacctgcacccatctgaagaacatactaatgtattgttacttaaagaagaatcatttaccatacatggcacacattttccagtccgtagaaaggaatttatgacagtgcttgcgaatttgaagagagtcctcctacaaatcacatacagctttgggatggatgccatcttcaggttgagctctgttaaccttgaatccgctgtctcctatcctactgatggaagcattgcagcagctgtagaagtgtgtcagtgcccaccagggtatactggctcctcttgtgaatcttgttggcctaggcacaggcgagttaacggcactatttttggtggcatctgtgagccatgtcagtgctttggtcatgcggagtcctgtgatgacgtcactggagaatgcctgaactgtaaggatcacacaggtggcccatattgtgataaatgtcttcctggtttctatggcgagcctactaaaggaacctctgaagactgtcaaccctgtgcctgtccactcaatatcccatccaataactttagcccaacgtgccatttagaccggagtcttggattgatctgtgatggatgccctgtcgggtacacaggaccacgctgtgagaggtgtgcagaaggctattttggacaaccctctgtacctggaggatcatgtcagccatgccaatgcaatgacaaccttgacttctccatccctggcagctgtgacagcttgtctggctcctgtctgatatgtaaaccaggtacaacaggccggtactgtgagctctgtgctgatggatattttggagatgcagttgatgcgaagaactgtcagccctgtcgctgtaatgccggtggctctttctctgaggtttgccacagtcaaactggacagtgtgagtgcagagccaacgttcagggtcagagatgtgacaaatgcaaggctgggacctttggcctacaatcagcaaggggctgtgttccctgcaactgcaattcttttgggtctaagtcattcgactgtgaagagagtggacaatgttggtgccaacctggagtcacagggaagaaatgtgaccgctgtgcccacggctatttcaacttccaagaaggaggctgcacagcttgtgaatgttctcatctgggtaataattgtgacccaaagactgggcgatgcatttgccctcccaataccattggagagaaatgttctaaatgtgcacccaatacctggggccacagcattaccactggttgtaaggcttgtaactgcagcacagtgggatccttggatttccaatgcaatgtaaatacaggccaatgcaactgtcatccaaaattctctggtgcaaaatgtacagagtgcagtcgaggtcactggaactaccctcgctgcaatctctgtgactgcttcctccctgggacagatgccacaacctgtgattcagagactaaaaaatgctcctgtagtgatcaaactgggcagtgcacttgtaaggtgaatgtggaaggcatccactgtgacagatgccggcctggcaaattcggactcgatgccaagaatccacttggctgcagcagctgctattgcttcggcactactacccagtgctctgaagcaaaaggactgatccggacgtgggtgactctgaaggctgagcagaccattctacccctggtagatgaggctctgcagcacacgaccaccaagggcattgtttttcaacatccagagattgttgcccacatggacctgatgagagaagatctccatttggaacctttttattggaaacttccagaacaatttgaaggaaagaagttgatggcctatgggggcaaactcaagtatgcaatctatttcgaggctcgggaagaaacaggtttctctacatataatcctcaagtgatcattcgaggtgggacacctactcatgctagaattatcgtcaggcatatggctgctcctctgattggccaattgacaaggcatgaaattgaaatgacagagaaagaatggaaatattatggggatgatcctcgagtccatagaactgtgacccgagaagacttcttggatatactatatgatattcattacattcttatcaaagctacttatggaaatttcatgcgacaaagcaggatttctgaaatctcaatggaggtagctgaacaaggacgtggaacaacaatgactcctccagctgacttgattgaaaaatgtgattgtcccctgggctattctggcctgtcctgtgaggcatgcttgccgggattttatcgactgcgttctcaaccaggtggccgcacccctggaccaaccctgggcacctgtgttccatgtcaatgtaatggacacagcagcctgtgtgaccctgaaacatcgatatgccagaattgtcaacatcacactgctggtgacttctgtgaacgatgtgctcttggatactatggaattgtcaagggattgccaaatgactgtcagcaatgtgcctgccctctgatttcttccagtaacaatttcagcccctcttgtgtcgcagaaggacttgacgactaccgctgcacggcttgtccacggggatatgaaggccagtactgtgaaaggtgtgcccctggctatactggcagtccaggcaaccctggaggctcctgccaagaatgtgagtgtgatccctatggctcactgcctgtgccctgtgaccctgtcacaggattctgcacgtgccgacctggagccacgggaaggaagtgtgacggctgcaagcactggcatgcacgcgagggctgggagtgtgttttttgtggagatgagtgcactggccttcttctcggtgacttggctcgcctggagcagatggtcatgagcatcaacctcactggtccgctgcctgcgccatataaaatgctgtatggtcttgaaaatatgactcaggagctaaagcacttgctgtcacctcagcgggccccagagaggcttattcagctggcagagggcaatctgaatacactcgtgaccgaaatgaacgagctgctgaccagggctaccaaagtgacagcagatggcgagcagaccggacaggatgctgagaggaccaacacaagagcaaagtccctgggagaattcattaaggagcttgcccgggatgcagaagctgtaaatgaaaaagctataaaactaaatgaaactctaggaactcgagacgaggcctttgagagaaatttggaagggcttcagaaagagattgaccagatgattaaagaactgaggaggaaaaatctagagacacaaaaggaaattgctgaagatgagttggtagctgcagaagcccttctgaaaaaagtgaagaagctgtttggagagtcccggggggaaaatgaagaaatggagaaggatctccgggaaaaactggctgactacaaaaacaaagttgatgatgcttgggaccttttgagagaagccacagataaaatcagagaagctaatcgcctatttgcagtaaatcagaaaaacatgactgcattggagaaaaagaaggaggctgttgaaagcggcaaacgacaaattgagaacactttaaaagagggcaatgacatactcgatgaagccaaccgtcttgcagatgaaatcaactccatcatagactatgttgaagacatccaaactaaattgccacctatgtctgaggagcttaatgataaaatagatgacctctcccaagaaataaaggacaggaagcttgctgagaaggtgtcccaggctgagagccacgcagctcagttgaatgactcatctgctgtccttgatggaatccttgatgaggctaaaaacatctccttcaatgccactgcagccttcaaagcttacagcaatattaaggactatattgatgaagctgagaaagttgccaaagaagccaaagatcttgcacatgaagctacaaaactggcaacaggtcctcggggtttattaaaggaagatgccaaaggctgtcttcagaaaagcttcaggattcttaacgaagccaagaagttagcaaatgatgtaaaagaaaatgaagaccatctaaatggcttaaaaaccaggatagaaaatgctgatgctagaaatggggatctcttgagaactttgaatgacactttgggaaagttatcagctattccaaatgatacagctgctaaactgcaagctgttaaggacaaagccagacaagccaacgacacagctaaagatgtactggcacagattacagagctccaccagaacctcgatggcctgaagaagaattacaataaactagcagacagcgtcgccaaaacgaatgctgtggttaaagatccttccaagaacaaaatagttgccgatgcagatgccactgtcaaaaatttagaacaggaagctgaccggctaatagataaactcaaacccatcaaggaacttgaggataacctaaagaaaaacatctctgagataaaggaattgataaaccaagctcggaaacaagccaattctatcaaagtatctgtgtcttcaggaggtgactgcattcgaacatacaaaccagaaatcaagaaaggaagttacaataatattgttgtcaacgtaaagacagctgttgctgataacctcctcttttatcttggaagtgccaaatttattgactttctggctatagaaatgcgtaaaggcaaagtcagcttcctctgggatgttggatctggagttggacgtgtagagtacccagatttgactattgatgactcatattggtaccgtatcgtagcatcaagaactgggagaaatggaactatttctgtgagagccctggatggacccaaagccagcattgtgcccagcacacaccattcgacgtctcctccagggtacacgattctagatgtggatgcaaatgcaatgctgtttgttggtggcctgactgggaaattaaagaaggctgatgctgtacgtgtgattacattcactggctgcatgggagaaacatactttgacaacaaacctataggtttgtggaatttccgagaaaaagaaggtgactgcaaaggatgcactgtcagtcctcaggtggaagatagtgaggggactattcaatttgatggagaaggttatgcattggtcagccgtcccattcgctggtaccccaacatctccactgtcatgttcaagttcagaacattttcttcgagtgctcttctgatgtatcttgccacacgagacctgagagatttcatgagtgtggagctcactgatgggcacataaaagtcagttacgatctgggctcaggaatggcttccgttgtcagcaatcaaaaccataatgatgggaaatggaaatcattcactctgtcaagaattcaaaaacaagccaatatatcaattgtagatatagatactaatcaggaggagaatatagcaacttcgtcttctggaaacaactttggtcttgacttgaaagcagatgacaaaatatattttggtggcctgccaacgctgagaaacttgagactattcaataggccagaagtaaatctgaagaaatattccggctgcctcaaagatattgaaatttcaagaactccgtacaatatactcagtagtcccgattatgttggtgttaccaaaggatgttccctggagaatgtttacacagttagctttcctaagcctggttttgtggagctctcccctgtgccaattgatgtaggaacagaaatcaacctgtcattcagcaccaagaatgagtccggcatcattcttttgggaagtggagggacaccagcaccacctaggagaaaacgaaggcagactggacaggcctattatgcaatactcctcaacaggggccgtctggaagtgcatctctccacaggggcacgaacaatgaggaaaattgtgatcagaccagagccgaatctgtttcatgatggaagagaacattccgttcatgtagagcgaactagaggcatctttacagttcaagtggatgaaaacagaagatacatgcaaaacctgacagttgaacagcctatcgaagttaaaaagcttttcgttgggggtgctccacctgaatttcaaccttccccactcagaaatattcctccttttgaaggctgcatatggaatcttgttattaactctgtccccatggactttgcaaggcctgtgtccttcaaaaatgctgacattggtcgctgtgcccatcagaaactccgtgaagatgaagatggagcagctccagctgaaatagttatccagcctgagccagttcccaccccagcctttcctacgcccaccccagttctgacacatggtccttgtgctgcagaatcagaaccagctcttttgatagggagcaagcagttcgggctttcaagaaacagtcacattgcaattgcatttgatgacaccaaagttaaaaaccgtctcacaattgagttggaagtaagaaccgaagctgaatccggcttgcttttttacatggctcgcatcaatcatgctgattttgcaacagttcagctgagaaatggattgccctacttcagctatgacttggggagtggggacacccacaccatgatccccaccaaaatcaatgatggccagtggcacaagattaagataatgagaagtaagcaagaaggaattctttatgtagatggggcttccaacagaaccatcagtcccaaaaaagccgacatcctggatgtcgtgggaatgctgtatgttggtgggttacccatcaactacactacccgaagaattggtccagtgacctatagcattgatggctgcgtcaggaatctccacatggcagaggcccctgccgatctggaacaacccacctccagcttccatgttgggacatgttttgcaaatgctcagaggggaacatattttgacggaaccggttttgccaaagcagttggtggattcaaagtgggattggaccttcttgtagaatttgaattccgcacaactacaacgactggagttcttctggggatcagtagtcaaaaaatggatggaatgggtattgaaatgattgatgaaaagttgatgtttcatgtggacaatggtgcgggcagattcactgctgtctatgatgctggggttccagggcatttgtgtgatggacaatggcataaagtcactgccaacaagatcaaacaccgcattgagctcacagtcgatgggaaccaggtggaagcccaaagcccaaacccagcatctacatcagctgacacaaatgaccctgtgtttgttggaggcttcccagatgacctcaagcagtttggcctaacaaccagtattccgttccgaggttgcatcagatccctgaagctcaccaaaggcacaggcaagccactggaggttaattttgccaaggccctggaactgaggggcgttcaacctgtatcatgcccagccaactaataaaaataagtgtaaccccaggaagagtctgtcaaaacaagtatatcaagtaaaacaaacaaatatattttacctatatatgttaattaaactaatttgtgcatgtacatagaattctttctgtattcagatggtgctaattcagactccagactgaattttaattcaagttctttctcaagtctataaataatattaaactgattatttcattct

SEQ ID NO: 15632 - DNA, 9640 bp, Homo sapiens
  source 1..9640: mol_type = unassigned DNA
cagcgactcctctggctcccgagaagtggatccggtcgcggccactacgatgccgggagccgccggggtcctcctccttctgctgctctccggaggcctcgggggcgtacaggcgcagcggccgcagcagcagcggcagtcacaggcacatcagcaaagaggtttattccctgctgtcctgaatcttgcttctaatgctcttatcacgaccaatgcaacatgtggagaaaaaggacctgaaatgtactgcaaattggtagaacatgtccctgggcagcctgtgaggaacccgcagtgtcgaatctgcaatcaaaacagcagcaatccaaaccagagacacccgattacaaatgctattgatggaaagaacacttggtggcagagtcccagtattaagaatggaatcgaataccattatgtgacaattaccctggatttacagcaggtgttccagatcgcgtatgtgattgtgaaggcagctaactccccccggcctggaaactggattttggaacgctctcttgatgatgttgaatacaagccctggcagtatcatgctgtgacagacacggagtgcctaacgctttacaatatttatccccgcactgggccaccgtcatatgccaaagatgatgaggtcatctgcacttcattttactccaagatacaccccttagaaaatggagagattcacatctctttaatcaatgggagaccaagtgccgatgatccttctccagaactgctagaatttacctccgctcgctatattcgcctgagatttcagaggatccgcacactgaatgctgacttgatgatgtttgctcacaaagacccaagagaaattgaccccattgtcaccagaagatattactactcggtcaaggatatttcagttggagggatgtgcatctgctatggtcatgccagggcttgtccacttgatccagcgacaaataaatctcgctgtgagtgtgagcataacacatgtggcgatagctgtgatcagtgctgtccaggattccatcagaaaccctggagagctggaacttttctaactaaaactgaatgtgaagcatgcaattgtcatggaaaagctgaagaatgctattatgatgaaaatgttgccagaagaaatctgagtttgaatatacgtggaaagtacattggagggggtgtctgcattaattgtacccaaaacactgctggtataaactgcgagacatgtactgatggcttcttcagacccaaaggggtatctccaaattatccaaggccatgccagccatgtcattgcgatccaattggttccttaaatgaagtctgtgtcaaggatgagaaacatgctcgacgaggtttggcacctggatcctgtcattgcaaaactggttttggaggtgtgagctgtgatcggtgtgccaggggctacactggctacccggactgcaaagcctgtaactgcagtgggttagggagcaaaaatgaggatccttgttttggcccctgtatctgcaaggaaaatgttgaaggaggagactgtagtcgttgcaaatccggcttcttcaatttgcaagaggataattggaaaggctgcgatgagtgtttctgttcaggggtttcaaacagatgtcagagttcctactggacctatggcaaaatacaagatatgagtggctggtatctgactgaccttcctggccgcattcgagtggctccccagcaggacgacttggactcacctcagcagatcagcatcagtaacgcggaggcccggcaagccctgccgcacagctactactggagcgcgccggctccctatctgggaaacaaactcccagcagtaggaggacagttgacatttaccatatcatatgaccttgaagaagaggaagaagatacagaacgtgttctccagcttatgattatcttagagggtaatgacttgagcatcagcacagcccaagatgaggtgtacctgcacccatctgaagaacatactaatgtattgttacttaaagaagaatcatttaccatacatggcacacattttccagtccgtagaaaggaatttatgacagtgcttgcgaatttgaagagagtcctcctacaaatcacatacagctttgggatggatgccatcttcaggttgagctctgttaaccttgaatccgctgtctcctatcctactgatggaagcattgcagcagctgtagaagtgtgtcagtgcccaccagggtatactggctcctcttgtgaatcttgttggcctaggcacaggcgagttaacggcactatttttggtggcatctgtgagccatgtcagtgctttggtcatgcggagtcctgtgatgacgtcactggagaatgcctgaactgtaaggatcacacaggtggcccatattgtgataaatgtcttcctggtttctatggcgagcctactaaaggaacctctgaagactgtcaaccctgtgcctgtccactcaatatcccatccaataactttagcccaacgtgccatttagaccggagtcttggattgatctgtgatggatgccctgtcgggtacacaggaccacgctgtgagaggtgtgcagaaggctattttggacaaccctctgtacctggaggatcatgtcagccatgccaatgcaatgacaaccttgacttctccatccctggcagctgtgacagcttgtctggctcctgtctgatatgtaaaccaggtacaacaggccggtactgtgagctctgtgctgatggatattttggagatgcagttgatgcgaagaactgtcagccctgtcgctgtaatgccggtggctctttctctgaggtttgccacagtcaaactggacagtgtgagtgcagagccaacgttcagggtcagagatgtgacaaatgcaaggctgggacctttggcctacaatcagcaaggggctgtgttccctgcaactgcaattcttttgggtctaagtcattcgactgtgaagagagtggacaatgttggtgccaacctggagtcacagggaagaaatgtgaccgctgtgcccacggctatttcaacttccaagaaggaggctgcacagcttgtgaatgttctcatctgggtaataattgtgacccaaagactgggcgatgcatttgccctcccaataccattggagagaaatgttctaaatgtgcacccaatacctggggccacagcattaccactggttgtaaggcttgtaactgcagcacagtgggatccttggatttccaatgcaatgtaaatacaggccaatgcaactgtcatccaaaattctctggtgcaaaatgtacagagtgcagtcgaggtcactggaactaccctcgctgcaatctctgtgactgcttcctccctgggacagatgccacaacctgtgattcagagactaaaaaatgctcctgtagtgatcaaactgggcagtgcacttgtaaggtgaatgtggaaggcatccactgtgacagatgccggcctggcaaattcggactcgatgccaagaatccacttggctgcagcagctgctattgcttcggcactactacccagtgctctgaagcaaaaggactgatccggacgtgggtgactctgaaggctgagcagaccattctacccctggtagatgaggctctgcagcacacgaccaccaagggcattgtttttcaacatccagagattgttgcccacatggacctgatgagagaagatctccatttggaacctttttattggaaacttccagaacaatttgaaggaaagaagttgatggcctatgggggcaaactcaagtatgcaatctatttcgaggctcgggaagaaacaggtttctctacatataatcctcaagtgatcattcgaggtgggacacctactcatgctagaattatcgtcaggcatatggctgctcctctgattggccaattgacaaggcatgaaattgaaatgacagagaaagaatggaaatattatggggatgatcctcgagtccatagaactgtgacccgagaagacttcttggatatactatatgatattcattacattcttatcaaagctacttatggaaatttcatgcgacaaagcaggatttctgaaatctcaatggaggtagctgaacaaggacgtggaacaacaatgactcctccagctgacttgattgaaaaatgtgattgtcccctgggctattctggcctgtcctgtgaggcatgcttgccgggattttatcgactgcgttctcaaccaggtggccgcacccctggaccaaccctgggcacctgtgttccatgtcaatgtaatggacacagcagcctgtgtgaccctgaaacatcgatatgccagaattgtcaacatcacactgctggtgacttctgtgaacgatgtgctcttggatactatggaattgtcaagggattgccaaatgactgtcagcaatgtgcctgccctctgatttcttccagtaacaatttcagcccctcttgtgtcgcagaaggacttgacgactaccgctgcacggcttgtccacggggatatgaaggccagtactgtgaaaggtgtgcccctggctatactggcagtccaggcaaccctggaggctcctgccaagaatgtgagtgtgatccctatggctcactgcctgtgccctgtgaccctgtcacaggattctgcacgtgccgacctggagccacgggaaggaagtgtgacggctgcaagcactggcatgcacgcgagggctgggagtgtgttttttgtggagatgagtgcactggccttcttctcggtgacttggctcgcctggagcagatggtcatgagcatcaacctcactggtccgctgcctgcgccatataaaatgctgtatggtcttgaaaatatgactcaggagctaaagcacttgctgtcacctcagcgggccccagagaggcttattcagctggcagagggcaatctgaatacactcgtgaccgaaatgaacgagctgctgaccagggctaccaaagtgacagcagatggcgagcagaccggacaggatgctgagaggaccaacacaagagcaaagtccctgggagaattcattaaggagcttgcccgggatgcagaagctgtaaatgaaaaagctataaaactaaatgaaactctaggaactcgagacgaggcctttgagagaaatttggaagggcttcagaaagagattgaccagatgattaaagaactgaggaggaaaaatctagagacacaaaaggaaattgctgaagatgagttggtagctgcagaagcccttctgaaaaaagtgaagaagctgtttggagagtcccggggggaaaatgaagaaatggagaaggatctccgggaaaaactggctgactacaaaaacaaagttgatgatgcttgggaccttttgagagaagccacagataaaatcagagaagctaatcgcctatttgcagtaaatcagaaaaacatgactgcattggagaaaaagaaggaggctgttgaaagcggcaaacgacaaattgagaacactttaaaagagggcaatgacatactcgatgaagccaaccgtcttgcagatgaaatcaactccatcatagactatgttgaagacatccaaactaaattgccacctatgtctgaggagcttaatgataaaatagatgacctctcccaagaaataaaggacaggaagcttgctgagaaggtgtcccaggctgagagccacgcagctcagttgaatgactcatctgctgtccttgatggaatccttgatgaggctaaaaacatctccttcaatgccactgcagccttcaaagcttacagcaatattaaggactatattgatgaagctgagaaagttgccaaagaagccaaagatcttgcacatgaagctacaaaactggcaacaggtcctcggggtttattaaaggaagatgccaaaggctgtcttcagaaaagcttcaggattcttaacgaagccaagaagttagcaaatgatgtaaaagaaaatgaagaccatctaaatggcttaaaaaccaggatagaaaatgctgatgctagaaatggggatctcttgagaactttgaatgacactttgggaaagttatcagctattccaaatgatacagctgctaaactgcaagctgttaaggacaaagccagacaagccaacgacacagctaaagatgtactggcacagattacagagctccaccagaacctcgatggcctgaagaagaattacaataaactagcagacagcgtcgccaaaacgaatgctgtggttaaagatccttccaagaacaaaatcattgccgatgcagatgccactgtcaaaaatttagaacaggaagctgaccggctaatagataaactcaaacccatcaaggaacttgaggataacctaaagaaaaacatctctgagataaaggaattgataaaccaagctcggaaacaagccaattctatcaaagtatctgtgtcttcaggaggtgactgcattcgaacatacaaaccagaaatcaagaaaggaagttacaataatattgttgtcaacgtaaagacagctgttgctgataacctcctcttttatcttggaagtgccaaatttattgactttctggctatagaaatgcgtaaaggcaaagtcagcttcctctgggatgttggatctggagttggacgtgtagagtacccagatttgactattgatgactcatattggtaccgtatcgtagcatcaagaactgggagaaatggaactatttctgtgagagccctggatggacccaaagccagcattgtgcccagcacacaccattcgacgtctcctccagggtacacgattctagatgtggatgcaaatgcaatgctgtttgttggtggcctgactgggaaattaaagaaggctgatgctgtacgtgtgattacattcactggctgcatgggagaaacatactttgacaacaaacctataggtttgtggaatttccgagaaaaagaaggtgactgcaaaggatgcactgtcagtcctcaggtggaagatagtgaggggactattcaatttgatggagaaggttatgcattggtcagccgtcccattcgctggtaccccaacatctccactgtcatgttcaagttcagaacattttcttcgagtgctcttctgatgtatcttgccacacgagacctgagagatttcatgagtgtggagctcactgatgggcacataaaagtcagttacgatctgggctcaggaatggcttccgttgtcagcaatcaaaaccataatgatgggaaatggaaatcattcactctgtcaagaattcaaaaacaagccaatatatcaattgtagatatagatactaatcaggaggagaatatagcaacttcgtcttctggaaacaactttggtcttgacttgaaagcagatgacaaaatatattttggtggcctgccaacgctgagaaacttgagtatgaaagcaaggccagaagtaaatctgaagaaatattccggctgcctcaaagatattgaaatttcaagaactccgtacaatatactcagtagtcccgattatgttggtgttaccaaaggatgttccctggagaatgtttacacagttagctttcctaagcctggttttgtggagctctcccctgtgccaattgatgtaggaacagaaatcaacctgtcattcagcaccaagaatgagtccggcatcattcttttgggaagtggagggacaccagcaccacctaggagaaaacgaaggcagactggacaggcctattatgcaatactcctcaacaggggccgtctggaagtgcatctctccacaggggcacgaacaatgaggaaaattgtgatcagaccagagccgaatctgtttcatgatggaagagaacattccgttcatgtagagcgaactagaggcatctttacagttcaagtggatgaaaacagaagatacatgcaaaacctgacagttgaacagcctatcgaagttaaaaagcttttcgttgggggtgctccacctgaatttcaaccttccccactcagaaatattcctccttttgaaggctgcatatggaatcttgttattaactctgtccccatggactttgcaaggcctgtgtccttcaaaaatgctgacattggtcgctgtgcccatcagaaactccgtgaagatgaagatggagcagctccagctgaaatagttatccagcctgagccagttcccaccccagcctttcctacgcccaccccagttctgacacatggtccttgtgctgcagaatcagaaccagctcttttgatagggagcaagcagttcgggctttcaagaaacagtcacattgcaattgcatttgatgacaccaaagttaaaaaccgtctcacaattgagttggaagtaagaaccgaagctgaatccggcttgcttttttacatggctcgcatcaatcatgctgattttgcaacagttcagctgagaaatggattgccctacttcagctatgacttggggagtggggacacccacaccatgatccccaccaaaatcaatgatggccagtggcacaagattaagataatgagaagtaagcaagaaggaattctttatgtagatggggcttccaacagaaccatcagtcccaaaaaagccgacatcctggatgtcgtgggaatgctgtatgttggtgggttacccatcaactacactacccgaagaattggtccagtgacctatagcattgatggctgcgtcaggaatctccacatggcagaggcccctgccgatctggaacaacccacctccagcttccatgttgggacatgttttgcaaatgctcagaggggaacatattttgacggaaccggttttgccaaagcagttggtggattcaaagtgggattggaccttcttgtagaatttgaattccgcacaactacaacgactggagttcttctggggatcagtagtcaaaaaatggatggaatgggtattgaaatgattgatgaaaagttgatgtttcatgtggacaatggtgcgggcagattcactgctgtctatgatgctggggttccagggcatttgtgtgatggacaatggcataaagtcactgccaacaagatcaaacaccgcattgagctcacagtcgatgggaaccaggtggaagcccaaagcccaaacccagcatctacatcagctgacacaaatgaccctgtgtttgttggaggcttcccagatgacctcaagcagtttggcctaacaaccagtattccgttccgaggttgcatcagatccctgaagctcaccaaaggcacaggcaagccactggaggttaattttgccaaggccctggaactgaggggcgttcaacctgtatcatgcccagccaactaataaaaataagtgtaaccccaggaagagtctgtcaaaacaagtatatcaagtaaaacaaacaaatatattttacctatatatgttaattaaactaatttgtgcatgtacatagaattctttctgtattcagatggtgctaattcagactccagactgaattttaattcaagttctttctcaagtctataaataatattaaactgattatttcattctaaataa

SEQ ID NO: 15633 - DNA, 3539 bp, Homo sapiens
  source 1..3539: mol_type = unassigned DNA
aagaagttagcaaatgatgtaaaagaaaatgaagaccatctaaatggcttaaaaaccaggatagaaaatgctgatgctagaaatggggatctcttgagaactttgaatgacactttgggaaagttatcagctattccaaatgatacagctgctaaactgcaagctgttaaggacaaagccagacaagccaacgacacagctaaagatgtactggcacagattacagagctccaccagaacctcgatggcctgaagaagaattacaataaactagcagacagcgtcgccaaaacgaatgctgtggttaaagatccttccaagaacacagttgccgatgcagatgccactgtcaaaaatttagaacaggaagctgaccggctaatagataaactcaaacccatcaaggaacttgaggataacctaaagaaaaacatctctgagataaaggaattgataaaccaagctcggaaacaagccaattctatcaaagtatctgtgtcttcaggaggtgactgcattcgaacatacaaaccagaaatcaagaaaggaagttacaataatattgttgtcaacgtaaagacagctgttgctgataacctcctcttttatcttggaagtgccaaatttattgactttctggctatagaaatgcgtaaaggcaaagtcagcttcctctgggatgttggatctggagttggacgtgtagagtacccagatttgactattgatgactcatattggtaccgtatcgtagcatcaagaactgggagaaatggaactatttctgtgagagccctggatggacccaaagccagcattgtgcccagcacacaccattcgacgtctcctccagggtacacgattctagatgtggatgcaaatgcaatgctgtttgttggtggcctgactgggaaattaaagaaggctgatgctgtacgtgtgattacattcactggctgcatgggagaaacatactttgacaacaaacctataggtttgtggaatttccgagaaaaagaaggtgactgcaaaggatgcactgtcagtcctcaggtggaagatagtgaggggactattcaatttgatggagaaggttatgcattggtcagccgtcccattcgctggtaccccaacatctccactgtcatgttcaagttcagaacattttcttcgagtgctcttctgatgtatcttgccacacgagacctgagagatttcatgagtgtggagctcactgatgggcacataaaagtcagttacgatctgggctcaggaatggcttccgttgtcagcaatcaaaaccataatgatgggaaatggaaatcattcactctgtcaagaattcaaaaacaagccaatatatcaattgtagatatagatactaatcaggaggagaatatagcaacttcgtcttctggaaacaactttggtcttgacttgaaagcagatgacaaaatatattttggtggcctgccaacgctgagaaacttgagtatgaaagcaaggccagaagtaaatctgaagaaatattccggctgcctcaaagatattgaaatttcaagaactccgtacaatatactcagtagtcccgattatgttggtgttaccaaaggatgttccctggagaatgtttacacagttagctttcctaagcctggttttgtggagctctcccctgtgccaattgatgtaggaacagaaatcaacctgtcattcagcaccaagaatgagtccggcatcattcttttgggaagtggagggacaccagcaccacctaggagaaaacgaaggcagactggacaggcctattatgcaatactcctcaacaggggccgtctggaagtgcatctctccacaggggcacgaacaatgaggaaaattgtgatcagaccagagccgaatctgtttcatgatggaagagaacattccgttcatgtagagcgaactagaggcatctttacagttcaagtggatgaaaacagaagatacatgcaaaacctgacagttgaacagcctatcgaagttaaaaagcttttcgttgggggtgctccacctgaatttcaaccttccccactcagaaatattcctccttttgaaggctgcatatggaatcttgttattaactctgtccccatggactttgcaaggcctgtgtccttcaaaaatgctgacattggtcgctgtgcccatcagaaactccgtgaagatgaagatggagcagctccagctgaaatagttatccagcctgagccagttcccaccccagcctttcctacgcccaccccagttctgacacatggtccttgtgctgcagaatcagaaccagctcttttgatagggagcaagcagttcgggctttcaagaaacagtcacattgcaattgcatttgatgacaccaaagttaaaaaccgtctcacaattgagttggaagtaagaaccgaagctgaatccggcttgcttttttacatggctcgcatcaatcatgctgattttgcaacagttcagctgagaaatggattgccctacttcagctatgacttggggagtggggacacccacaccatgatccccaccaaaatcaatgatggccagtggcacaagattaagataatgagaagtaagcaagaaggaattctttatgtagatggggcttccaacagaaccatcagtcccaaaaaagccgacatcctggatgtcgtgggaatgctgtatgttggtgggttacccatcaactacactacccgaagaattggtccagtgacctatagcattgatggctgcgtcaggaatctccacatggcagaggcccctgccgatctggaacaacccacctccagcttccatgttgggacatgttttgcaaatgctcagaggggaacatattttgacggaaccggttttgccaaagcagttggtggattcaaagtgggattggaccttcttgtagaatttgaattccgcacaactacaacgactggagttcttctggggatcagtagtcaaaaaatggatggaatgggtattgaaatgattgatgaaaagttgatgtttcatgtggacaatggtgcgggcagattcactgctgtctatgatgctggggttccagggcatttgtgtgatggacaatggcataaagtcactgccaacaagatcaaacaccgcattgagctcacagtcgatgggaaccaggtggaagcccaaagcccaaacccagcatctacatcagctgacacaaatgaccctgtgtttgttggaggcttcccagatgacctcaagcagtttggcctaacaaccagtattccgttccgaggttgcatcagatccctgaagctcaccaaaggcacagcaagccactggaggttaattttgccaaggccctggaactgaggggcgttcaacctgtatcatgcccagccaactaataaaaataagtgtaaccccaggaagagtctgtcaaaacaagtatatcaagtaaaacaaacaaatatattttacctatatatgttaattaaactaatttgtgcatgtacatagaattc

SEQ ID NO: 15634 - DNA, 5175 bp, Homo sapiens
  source 1..5175: mol_type = unassigned DNA
atgcctccagcagtgaggcggtcagcctgcagcatgggatggctgtggatctttggggcagccctggggcagtgtctgggctacagttcacagcagcaaagggtgccatttcttcagcctcccggtcaaagtcaactgcaagcgagttatgtggagtttagacccagccagggttgtagccctggatactatcgggatcataaaggcttgtataccggacggtgtgttccctgcaattgcaacggacattcaaatcaatgccaggatggctcaggcatatgtgttaactgtcagcacaacaccgcgggagagcactgtgaacgctgccaggagggctactatggcaacgccgtccacggatcctgcagggcctgcccatgtcctcacactaacagctttgccactggctgtgtggtgaatgggggagacgtgcggtgctcctgcaaagctgggtacacaggaacacagtgtgaaaggtgtgcaccgggatatttcgggaatccccagaaattcggaggtagctgccaaccatgcagttgtaacagcaatggccagctgggcagctgtcatcccctgactggagactgcataaaccaagaacccaaagatagcagccctgcagaagaatgtgatgattgcgacagctgtgtgatgaccctcctgaacgacctggccaccatgggcgagcagctccgcctggtcaagtctcagctgcagggcctgagtgccagcgcagggcttctggagcagatgaggcacatggagacccaggccaaggacctgaggaatcagttgctcaactaccgttctgccatttcaaatcatggatcaaaaatagaaggcctggaaagagaactgactgatttgaatcaagaatttgagactttgcaagaaaaggctcaagtaaattccagaaaagcacaaacattaaacaacaatgttaatcgggcaacacaaagcgcaaaagaactggatgtgaagattaaaaatgtcatccggaatgtgcacattcttttaaagcagatctctgggacagatggagagggaaacaacgtgccttcaggtgacttttccagagagtgggctgaagcccagcgcatgatgagggaactgcggaacaggaactttggaaagcacctcagagaagcagaagctgataaaagggagtcgcagctcttgctgaaccggataaggacctggcagaaaacccaccagggggagaacaatgggcttgctaacagtatccgggattctttaaatgaatacgaagccaaactcagtgaccttcgtgctcggctgcaggaggcagctgcccaagccaagcaggcaaatggcttgaaccaagaaaacgagagagctttgggagccattcagagacaagtgaaagaaataaattccctgcagagtgatttcaccaagtatctaaccactgcagactcatctttgttgcaaaccaacattgcgctgcagctgatggagaaaagccagaaggaatatgaaaaattagctgccagtttaaatgaagcaagacaagaactaagtgacaaagtaagagaactttccagatctgctggcaaaacatcccttgtggaggaggcagaaaagcacgcgcggtccttacaagagctggcaaagcagctggaagagatcaagagaaacgccagcggggatgagctggtgcgctgtgctgtggatgccgccaccgcctacgagaacatcctcaatgccatcaaagcggccgaggacgcagccaacagggctgccagtgcatctgaatctgccctccagacagtgataaaggaagatctgccaagaaaagctaaaaccctgagttccaacagtgataaactgttaaatgaagccaagatgacacaaaagaagctaaagcaagaagtcagtccagctctcaacaacctacagcaaaccctgaatattgtgacagttcagaaagaagtgatagacaccaatctcacaactctccgagatggtcttcatgggatacagagaggtgatattgatgctatgatcagtagtgcaaagagcatggtcagaaaggccaacgacatcacagatgaggttctggatgggctcaaccccatccagacagatgtggaaagaattaaggacacctatgggaggacacagaacgaagacttcaaaaaggctctgactgatgcagataactcggtgaataagttaaccaacaaactacctgatctttggcgcaagattgaaagtatcaaccaacagctgttgcccttgggaaacatctctgacaacatggacagaatacgagaactaattcagcaggccagagatgctgccagtaaggttgctgtccccatgaggttcaatggtaaatctggagtcgaagtccgactgccaaatgacctggaagatttgaaaggatatacatctctgtccttgtttctccaaaggcccaactcaagagaaaatgggggtactgagaatatgtttgtgatgtaccttggaaataaagatgcctcccgggactacatcggcatggcagttgtggatggccagctcacctgtgtctacaacctgggggaccgtgaggctgaactccaagtggaccagatcttgaccaagagtgagactaaggaggcagttatggatcgggtgaaatttcagagaatttatcagtttgcaaggcttaattacaccaaaggagccacatccagtaaaccagaaacacccggagtctatgacatggatggtagaaatagcaatacactccttaatttggatcctgaaaatgttgtattttatgttggaggttacccacctgattttaaacttcccagtcgactaagtttccctccatacaaaggttgtattgaattagatgacctcaatgaaaatgttctgagcttgtacaacttcaaaaaaacattcaatctcaacacaactgaagtggagccttgtagaaggaggaaggaagagtcagacaaaaattattttgaaggtacgggctatgctcgagttccaactcaaccacatgctcccatcccaacctttggacagacaattcagaccaccgtggatagaggcttgctgttctttgcagaaaacggggatcgcttcatatctctaaatatagaagatggcaagctcatggtgagatacaaactgaattcagagctaccaaaagagagaggagttggagacgccataaacaacggcagagaccattcgattcagatcaaaattggaaaactccaaaagcgtatgtggataaatgtggacgttcaaaacactataattgatggtgaagtatttgatttcagcacatattatctgggaggaattccaattgcaatcagggaaagatttaacatttctacgcctgctttccgaggctgcatgaaaaatttgaagaaaaccagtggtgtcgttagattgaatgatactgtgggagtaaccaaaaagtgctcggaagactggaagcttgtgcgatctgcctcattctccagaggaggacaattgagtttcactgatttgggcttaccacctactgaccacctccaggcctcatttggatttcagacctttcaacccagtggcatattattagatcatcagacatggacaaggaacctgcaggtcactctggaagatggttacattgaattgagcaccagcgatagcggcagcccaatttttaaatctccacagacgtatatggatggtttactgcattatgtatctgtaataagcgacaactctggactacggcttctcatcgatgaccagcttctgagaaatagcaaaaggctaaaacacatttcaagttcccggcagtctctgcgtctgggcgggagcaattttgagggttgtattagcaatgtttttgtccagaggttatcactgagtcctgaagtcctagatttgaccagtaactctctcaagagagatgtgtccctgggaggctgcagtttaaacaaaccaccttttctaatgttgcttaaaggttctaccaggtttaacaagaccaagacttttcgtatcaaccagctgttgcaggacacaccagtggcctccccaaggagcgtgaaggtgtggcaagatgcttgctcaccacttcccaagacccaggccaatcatggagccctccagtttggggacattcccaccagccacttgctattcaagcttcctcaggagctgctgaaacccaggtcacagtttgctgtggacatgcagacaacatcctccagaggactggtgtttcacacgggcactaagaactcctttatggctctttatctttcaaaaggacgtctggtctttgcactggggacagatgggaaaaaattgaggatcaaaagcaaggagaaatgcaatgatgggaaatggcacacggtggtgtttggccatgatggggaaaaggggcgcttggttgtggatggactgagggcccgggagggaagtttgcctggaaactccaccatcagcatcagagcgccagtttacctgggatcacctccatcagggaaaccaaagagcctccccacaaacagctttgtgggatgcctgaagaactttcagctggattcaaaacccttgtataccccttcttcaagcttcggggtgtcttcctgcttgggtggtcctttggagaaaggcatttatttctctgaagaaggaggtcatgtcgtcttggctcactctgtattgttggggccagaatttaagcttgttttcagcatccgcccaagaagtctcactgggatcctaatacacatcggaagtcagcccgggaagcacttatgtgtttacctggaggcaggaaaggtcacggcctctatggacagtggggcaggtgggacctcaacgtcggtcacaccaaagcagtctctgtgtgatggacagtggcactcggtggcagtcaccataaaacaacacatcctgcacctggaactggacacagacagtagctacacagctggacagatccccttcccacctgccagcactcaagagccactacaccttggaggtgctccagccaatttgacgacactgaggatccctgtgtggaaatcattctttggctgtctgaggaatattcatgtcaatcacatccctgtccctgtcactgaagccttggaagtccaggggcctgtcagtctgaatggttgtcctgaccagtaa

SEQ ID NO: 15635 - DNA, 10506 bp, Homo sapiens
  source 1..10506: mol_type = unassigned DNA
gcaggtccgggaggcgcaggcggagagcggcggtgcccccgagcccctctgcggacggctcaggcgggaggaccccgcgcggctggatggcggcggccgcgcggcctcggggtcgggcactggggccagtactgccgccgacgccgctgctcctgctggtactgcgggtgctgccagcctgcggggcgaccgctcgggatcccggggccgcggccgggctcagccttcacccgacttacttcaacctggccgaggcggcgaggatttgggccaccgccacctgcggggagaggggacccggcgaggggaggccccagcccgagctctactgcaagttggtcgggggccccaccgccccaggcagcggccacaccatccagggccagttctgtgactattgcaattctgaagaccccaggaaagcacatcctgtcaccaatgccatcgatggatctgaacgttggtggcaaagccctcccctgtcctcaggcacacagtacaacagagtcaacctcaccttggatctggggcagctcttccatgtggcctatattttaatcaaatttgcaaattctcctcgccctgatctttgggtcttggaaagatctgtagactttggaagcacctactcaccatggcaatattttgctcattctaaagtagactgtttaaaagaatttgggcgggaggcaaatatggctgtcacccgggatgatgatgtactttgtgttactgaatattcccgtattgtacctttggaaaatggtgaggttgtggtgtccttgataaacggtcgtccaggtgcaaaaaattttactttctctcacaccctgagggagtttaccaaggcaacaaacatccgcttgcgttttcttagaaccaatacgcttcttggacacctcatctccaaagcccagcgagatccaactgtcactcggcggtattattacagcataaaggacatcagcattggtgggcagtgtgtttgcaatggccatgctgaagtgtgcaatataaacaatcctgaaaaactgtttcggtgtgaatgccagcaccacacctgtggggagacgtgtgatcgctgctgcacagggtacaatcagaggcgctggcggcccgccgcttgggagcagagccacgagtgtgaagcatgcaactgccacggccatgccagcaactgttactatgatccagatgttgagcggcagcaggcaagcttgaatacccagggcatctatgctggtggaggggtctgcattaactgtcagcacaacacagctggagtaaactgtgaacagtgtgctaagggctattaccgcccttatggggttccagtggatgcccctgatggctgcatcccctgcagctgtgaccctgagcatgcggatggctgtgaacagggttcaggccgctgtcactgcaagccaaatttccacggagacaactgtgagaagtgtgcaattggatactacaatttcccattttgcttgagaattcccatttttcctgtttctacaccaagttcagaagatccagtagctggagatataaaagggtgtgactgtaatctggaaggtgttctccctgaaatatgtgatgcccacggacggtgcctgtgccgccctggggttgagggccctcgatgtgatacctgccgctctggtttctactcattccctatttgccaagcctgctggtgttcagcccttggatcctaccagatgccctgcagctcagtgactggacagtgtgaatgtcggccaggagttacaggacagcggtgtgacaggtgtctctcaggagcttatgatttcccccactgccaaggttccagcagtgcttgtgacccagctggtaccatcaactccaatttggggtattgccaatgcaagcttcatgttgaaggtcctacttgtagccgctgcaaactgttatattggaatctggacaaagaaaaccccagtggatgttcagaatgcaagtgccataaggcgggaacagtgagtggaactggagagtgtaggcagggagatggtgactgtcactgcaagtcccatgtgggtggcgattcctgcgacacctgtgaagatggatattttgctttggaaaagagcaattactttgggtgtcaagggtgtcagtgtgacattggtggggcattgtcctccatgtgcagtgggccctcgggagtgtgccagtgccgagagcatgtcgtgggaaaggtgtgccagcggcctgaaaacaactactatttcccagatttgcatcatatgaagtatgagattgaagacggcagcacacctaatgggagagaccttcgatttggatttgatccgctggcatttcctgagtttagctggagaggatatgcccaaatgacctcagtacagaatgatgtaagaataacattgaatgtagggaagtcaagtggctccttgtttcgtgttattctgagatacgttaaccctggaactgaagcagtatctggccatataactatttatccatcctggggtgctgctcaaagcaaagagatcatcttcctgccgagtaaggagccagcctttgtcactgtccctggaaatggttttgcagacccattttcaatcacaccaggaatatgggttgcttgtattaaggcagaaggagtccttctggattacctggtgctgctccccagggactactatgaagcctctgtactgcagctgccagtcacagaaccatgtgcctacgcaggacctccccaagaaaattgcttactctaccagcatttgccagtgaccagattcccctgtaccctggcttgtgaggccagacacttcctgcttgatggggagccaagacccgtggcagtgaggcagcccacacctgcacaccctgtcatggtggacctcagcgggagagaggtggaattgcatctgcggctgcgcatcccacaggttggccactacgtggttgtggtcgagtattccacggaggcagctcagctgtttgtggttgatgtgaatgtgaagagctccgggtctgttctggcaggccaggtgaacatttacagctgcaactacagtgttctctgccggagtgctgtgattgatcacatgagccgcatcgccatgtatgagctattggcagatgcagacattcagctcaagggacacatggcccgattccttctgcatcaagtttgtatcatacctattgaagaattctcagctgagtatgtgagaccacaagtccactgcattgccagttatgggcgatttgtcaatcaaagtgccacctgtgtctccttggcccatgaaactcctccaacagcattaattttggatgttctaagtggcaggcctttccctcacctgccccagcagtcgtcaccttctgttgatgttcttcctggggtcaccttgaaggcaccgcagaatcaagtgaccctgagaggacgtgtaccacacctgggccgatacgtctttgtcatccatttttaccaagcagcgcacccgacgtttcccgcgcaggtgtcggtggatggcgggtggccacgggcaggctccttccatgcctctttttgcccccatgtgcttggctgccgggatcaagtgattgccgaaggccagattgagtttgacatctcagagcctgaagtggccgcaactgtgaaggttccagaaggaaagtccttggttttggtccgtgttctagtggtgcctgcagaaaactatgactaccaaatacttcacaaaaaatccatggacaagtcactcgagtttatcaccaattgtggaaaaaacagcttttaccttgacccccagacagcctccagattctgtaagaattccgccaggtccctggtggccttttaccacaagggcgccctgccttgtgagtgccaccccactggggccaccggccctcactgcagccctgagggtgggcagtgcccatgccagcccaacgtcatcgggcggcagtgcacccgctgtgcaacaggccactacggattcccacgctgcaagccgtgcagctgtggtcggcgcctttgtgaagagatgacggggcagtgccgctgccctccccgcacggtcaggccccagtgtgaggtgtgtgagacacactcattcagcttccaccccatggccggctgcgaaggctgcaactgttccaggaggggcaccatcgaggctgccatgccggagtgtgaccgggacagcgggcagtgcagatgcaagcccagaatcacagggcggcagtgtgaccgatgtgcttccgggttttaccgctttcctgagtgtgttccctgcaattgcaacagagatgggactgagccaggagtgtgtgacccagggaccggggcttgcctctgcaaggaaaatgtagaaggcacagagtgtaatgtgtgtcgagaaggctcattccatttggacccagccaatctcaagggttgtaccagctgtttctgttttggagtaaataatcaatgtcacagctcacataagcgaaggactaagtttgtggatatgctgggctggcacctggagacagcagacagagtggacatccctgtctctttcaacccaggcagcaacagtatggtggcggatctccaggagctgcccgcaaccatccacagcgcgtcctgggtcgcacccacctcctacctgggggacaaggtttcttcatatggtggttacctcacttaccaagccaagtcctttggcttgcctggcgacatggttcttctggaaaagaagccggatgtacagctcactggtcagcacatgtccatcatctatgaggagacaaacaccccacggccagaccggctgcatcatggacgagtgcacgtggtcgagggaaacttcagacatgccagcagccgtgccccagtgtctagggaggagctgatgacagtgctgtctagactggcagatgtgcgcatccaaggcctctacttcacagagactcaaaggctcaccctgagcgaggtggggctagaggaagcctctgacacaggaagtgggcgcatagcacttgctgtggaaatctgtgcctgcccccctgcctacgctggtgactcttgtcagggttgtagccctggatactatcgggatcataaaggcttgtataccggacggtgtgttccctgcaattgcaacggacattcaaatcaatgccaggatggctcaggcatatgtgttaactgtcagcacaacaccgcgggagagcactgtgaacgctgccaggagggctactatggcaacgccgtccacggatcctgcagggcctgcccatgtcctcacactaacagctttgccactggctgtgtggtgaatgggggagacgtgcggtgctcctgcaaagctgggtacacaggaacacagtgtgaaaggtgtgcaccgggatatttcgggaatccccagaaattcggaggtagctgccaaccatgcagttgtaacagcaatggccagctgggcagctgtcatcccctgactggagactgcataaaccaagaacccaaagatagcagccctgcagaagaatgtgatgattgcgacagctgtgtgatgaccctcctgaacgacctggccaccatgggcgagcagctccgcctggtcaagtctcagctgcagggcctgagtgccagcgcagggcttctggagcagatgaggcacatggagacccaggccaaggacctgaggaatcagttgctcaactaccgttctgccatttcaaatcatggatcaaaaatagaaggcctggaaagagaactgactgatttgaatcaagaatttgagactttgcaagaaaaggctcaagtaaattccagaaaagcacaaacattaaacaacaatgttaatcgggcaacacaaagcgcaaaagaactggatgtgaagattaaaaatgtcatccggaatgtgcacattcttttaaagcagatctctgggacagatggagagggaaacaacgtgccttcaggtgacttttccagagagtgggctgaagcccagcgcatgatgagggaactgcggaacaggaactttggaaagcacctcagagaagcagaagctgataaaagggagtcgcagctcttgctgaaccggataaggacctggcagaaaacccaccagggggagaacaatgggcttgctaacagtatccgggattctttaaatgaatacgaagccaaactcagtgaccttcgtgctcggctgcaggaggcagctgcccaagccaagcaggcaaatggcttgaaccaagaaaacgagagagctttgggagccattcagagacaagtgaaagaaataaattccctgcagagtgatttcaccaagtatctaaccactgcagactcatctttgttgcaaaccaacattgcgctgcagctgatggagaaaagccagaaggaatatgaaaaattagctgccagtttaaatgaagcaagacaagaactaagtgacaaagtaagagaactttccagatctgctggcaaaacatcccttgtggaggaggcagaaaagcacgcgcggtccttacaagagctggcaaagcagctggaagagatcaagagaaacgccagcggggatgagctggtgcgctgtgctgtggatgccgccaccgcctacgagaacatcctcaatgccatcaaagcggccgaggacgcagccaacagggctgccagtgcatctgaatctgccctccagacagtgataaaggaagatctgccaagaaaagctaaaaccctgagttccaacagtgataaactgttaaatgaagccaagatgacacaaaagaagctaaagcaagaagtcagtccagctctcaacaacctacagcaaaccctgaatattgtgacagttcagaaagaagtgatagacaccaatctcacaactctccgagatggtcttcatgggatacagagaggtgatattgatgctatgatcagtagtgcaaagagcatggtcagaaaggccaacgacatcacagatgaggttctggatgggctcaaccccatccagacagatgtggaaagaattaaggacacctatgggaggacacagaacgaagacttcaaaaaggctctgactgatgcagataactcggtgaataagttaaccaacaaactacctgatctttggcgcaagattgaaagtatcaaccaacagctgttgcccttgggaaacatctctgacaacatggacagaatacgagaactaattcagcaggccagagatgctgccagtaaggttgctgtccccatgaggttcaatggtaaatctggagtcgaagtccgactgccaaatgacctggaagatttgaaaggatatacatctctgtccttgtttctccaaaggcccaactcaagagaaaatgggggtactgagaatatgtttgtgatgtaccttggaaataaagatgcctcccgggactacatcggcatggcagttgtggatggccagctcacctgtgtctacaacctgggggaccgtgaggctgaactccaagtggaccagatcttgaccaagagtgagactaaggaggcagttatggatcgggtgaaatttcagagaatttatcagtttgcaaggcttaattacaccaaaggagccacatccagtaaaccagaaacacccggagtctatgacatggatggtagaaatagcaatacactccttaatttggatcctgaaaatgttgtattttatgttggaggttacccacctgattttaaacttcccagtcgactaagtttccctccatacaaaggttgtattgaattagatgacctcaatgaaaatgttctgagcttgtacaacttcaaaaaaacattcaatctcaacacaactgaagtggagccttgtagaaggaggaaggaagagtcagacaaaaattattttgaaggtacgggctatgctcgagttccaactcaaccacatgctcccatcccaacctttggacagacaattcagaccaccgtggatagaggcttgctgttctttgcagaaaacggggatcgcttcatatctctaaatatagaagatggcaagctcatggtgagatacaaactgaattcagagctaccaaaagagagaggagttggagacgccataaacaacggcagagaccattcgattcagatcaaaattggaaaactccaaaagcgtatgtggataaatgtggacgttcaaaacactataattgatggtgaagtatttgatttcagcacatattatctgggaggaattccaattgcaatcagggaaagatttaacatttctacgcctgctttccgaggctgcatgaaaaatttgaagaaaaccagtggtgtcgttagattgaatgatactgtgggagtaaccaaaaagtgctcggaagactggaagcttgtgcgatctgcctcattctccagaggaggacaattgagtttcactgatttgggcttaccacctactgaccacctccaggcctcatttggatttcagacctttcaacccagtggcatattattagatcatcagacatggacaaggaacctgcaggtcactctggaagatggttacattgaattgagcaccagcgatagcggcagcccaatttttaaatctccacagacgtatatggatggtttactgcattatgtatctgtaataagcgacaactctggactacggcttctcatcgatgaccagcttctgagaaatagcaaaaggctaaaacacatttcaagttcccggcagtctctgcgtctgggcgggagcaattttgagggttgtattagcaatgtttttgtccagaggttatcactgagtcctgaagtcctagatttgaccagtaactctctcaagagagatgtgtccctgggaggctgcagtttaaacaaaccaccttttctaatgttgcttaaaggttctaccaggtttaacaagaccaagacttttcgtatcaaccagctgttgcaggacacaccagtggcctccccaaggagcgtgaaggtgtggcaagatgcttgctcaccacttcccaagacccaggccaatcatggagccctccagtttggggacattcccaccagccacttgctattcaagcttcctcaggagctgctgaaacccaggtcacagtttgctgtggacatgcagacaacatcctccagaggactggtgtttcacacgggcactaagaactcctttatggctctttatctttcaaaaggacgtctggtctttgcactggggacagatgggaaaaaattgaggatcaaaagcaaggagaaatgcaatgatgggaaatggcacacggtggtgtttggccatgatggggaaaaggggcgcttggttgtggatggactgagggcccgggagggaagtttgcctggaaactccaccatcagcatcagagcgccagtttacctgggatcacctccatcagggaaaccaaagagcctccccacaaacagctttgtgggatgcctgaagaactttcagctggattcaaaacccttgtataccccttcttcaagcttcggggtgtcttcctgcttgggtggtcctttggagaaaggcatttatttctctgaagaaggaggtcatgtcgtcttggctcactctgtattgttggggccagaatttaagcttgttttcagcatccgcccaagaagtctcactgggatcctaatacacatcggaagtcagcccgggaagcacttatgtgtttacctggaggcaggaaaggtcacggcctctatggacagtggggcaggtgggacctcaacgtcggtcacaccaaagcagtctctgtgtgatggacagtggcactcggtggcagtcaccataaaacaacacatcctgcacctggaactggacacagacagtagctacacagctggacagatccccttcccacctgccagcactcaagagccactacaccttggaggtgctccagccaatttgacgacactgaggatccctgtgtggaaatcattctttggctgtctgaggaatattcatgtcaatcacatccctgtccctgtcactgaagccttggaagtccaggggcctgtcagtctgaatggttgtcctgaccagtaacccaagcctatttcacagcaaggaaattcaccttcaaaagcactgattacccaatgcacctccctccccagctcgagatcattcttcactcaggacacaaaccagacaggtttaatagcgaatctaattttgaattctgaccatggatacccatcactttggcattcagtgctacatgtgtattttatataaaaatcccatttcttgaagataaaaaaattgttattcaaattgttatgcacagaatgtttttggtaatattaatttccactaaaaaattaaatgtcttttaagaaacattcttttccacttgttaaaaaaattaaatatattttaaagcactttaagaatatgaaactttcatatatgttaaaggattataatttatggaattaaaaaatgcagtgtagtccttaaa

SEQ ID NO: 15636 - DNA, 10335 bp, Homo sapiens
  source 1..10335: mol_type = unassigned DNA
gcaggtccgggaggcgcaggcggagagcggcggtgcccccgagcccctctgcggacggctcaggcgggaggaccccgcgcggctggatggcggcggccgcgcggcctcggggtcgggcactggggccagtactgccgccgacgccgctgctcctgctggtactgcgggtgctgccagcctgcggggcgaccgctcgggatcccggggccgcggccgggctcagccttcacccgacttacttcaacctggccgaggcggcgaggatttgggccaccgccacctgcggggagaggggacccggcgaggggaggccccagcccgagctctactgcaagttggtcgggggccccaccgccccaggcagcggccacaccatccagggccagttctgtgactattgcaattctgaagaccccaggaaagcacatcctgtcaccaatgccatcgatggatctgaacgttggtggcaaagccctcccctgtcctcaggcacacagtacaacagagtcaacctcaccttggatctggggcagctcttccatgtggcctatattttaatcaaatttgcaaattctcctcgccctgatctttgggtcttggaaagatctgtagactttggaagcacctactcaccatggcaatattttgctcattctaaagtagactgtttaaaagaatttgggcgggaggcaaatatggctgtcacccgggatgatgatgtactttgtgttactgaatattcccgtattgtacctttggaaaatggtgaggttgtggtgtccttgataaacggtcgtccaggtgcaaaaaattttactttctctcacaccctgagggagtttaccaaggcaacaaacatccgcttgcgttttcttagaaccaatacgcttcttggacacctcatctccaaagcccagcgagatccaactgtcactcggcggtattattacagcataaaggacatcagcattggtgggcagtgtgtttgcaatggccatgctgaagtgtgcaatataaacaatcctgaaaaactgtttcggtgtgaatgccagcaccacacctgtggggagacgtgtgatcgctgctgcacagggtacaatcagaggcgctggcggcccgccgcttgggagcagagccacgagtgtgaagcatgcaactgccacggccatgccagcaactgttactatgatccagatgttgagcggcagcaggcaagcttgaatacccagggcatctatgctggtggaggggtctgcattaactgtcagcacaacacagctggagtaaactgtgaacagtgtgctaagggctattaccgcccttatggggttccagtggatgcccctgatggctgcatcccctgcagctgtgaccctgagcatgcggatggctgtgaacagggttcaggccgctgtcactgcaagccaaatttccacggagacaactgtgagaagtgtgcaattggatactacaatttcccattttgcttgagaattcccatttttcctgtttctacaccaagttcagaagatccagtagctggagatataaaagggtgtgactgtaatctggaaggtgttctccctgaaatatgtgatgcccacggacggtgcctgtgccgccctggggttgagggccctcgatgtgatacctgccgctctggtttctactcattccctatttgccaagcctgctggtgttcagcccttggatcctaccagatgccctgcagctcagtgactggacagtgtgaatgtcggccaggagttacaggacagcggtgtgacaggtgtctctcaggagcttatgatttcccccactgccaaggttccagcagtgcttgtgacccagctggtaccatcaactccaatttggggtattgccaatgcaagcttcatgttgaaggtcctacttgtagccgctgcaaactgttatattggaatctggacaaagaaaaccccagtggatgttcagaatgcaagtgccataaggcgggaacagtgagtggaactggagagtgtaggcagggagatggtgactgtcactgcaagtcccatgtgggtggcgattcctgcgacacctgtgaagatggatattttgctttggaaaagagcaattactttgggtgtcaagggtgtcagtgtgacattggtggggcattgtcctccatgtgcagtgggccctcgggagtgtgccagtgccgagagcatgtcgtgggaaaggtgtgccagcggcctgaaaacaactactatttcccagatttgcatcatatgaagtatgagattgaagacggcagcacacctaatgggagagaccttcgatttggatttgatccgctggcatttcctgagtttagctggagaggatatgcccaaatgacctcagtacagaatgatgtaagaataacattgaatgtagggaagtcaagtggctccttgtttcgtgttattctgagatacgttaaccctggaactgaagcagtatctggccatataactatttatccatcctggggtgctgctcaaagcaaagagatcatcttcctgccgagtaaggagccagcctttgtcactgtccctggaaatggttttgcagacccattttcaatcacaccaggaatatgggttgcttgtattaaggcagaaggagtccttctggattacctggtgctgctccccagggactactatgaagcctctgtactgcagctgccagtcacagaaccatgtgcctacgcaggacctccccaagaaaattgcttactctaccagcatttgccagtgaccagattcccctgtaccctggcttgtgaggccagacacttcctgcttgatggggagccaagacccgtggcagtgaggcagcccacacctgcacaccctgtcatggtggacctcagcgggagagaggtggaattgcatctgcggctgcgcatcccacaggttggccactacgtggttgtggtcgagtattccacggaggcagctcagctgtttgtggttgatgtgaatgtgaagagctccgggtctgttctggcaggccaggtgaacatttacagctgcaactacagtgttctctgccggagtgctgtgattgatcacatgagccgcatcgccatgtatgagctattggcagatgcagacattcagctcaagggacacatggcccgattccttctgcatcaagtttgtatcatacctattgaagaattctcagctgagtatgtgagaccacaagtccactgcattgccagttatgggcgatttgtcaatcaaagtgccacctgtgtctccttggcccatgaaactcctccaacagcattaattttggatgttctaagtggcaggcctttccctcacctgccccagcagtcgtcaccttctgttgatgttcttcctggggtcaccttgaaggcaccgcagaatcaagtgaccctgagaggacgtgtaccacacctgggccgatacgtctttgtcatccatttttaccaagcagcgcacccgacgtttcccgcgcaggtgtcggtggatggcgggtggccacgggcaggctccttccatgcctctttttgcccccatgtgcttggctgccgggatcaagtgattgccgaaggccagattgagtttgacatctcagagcctgaagtggccgcaactgtgaaggttccagaaggaaagtccttggttttggtccgtgttctagtggtgcctgcagaaaactatgactaccaaatacttcacaaaaaatccatggacaagtcactcgagtttatcaccaattgtggaaaaaacagcttttaccttgacccccagacagcctccagattctgtaagaattccgccaggtccctggtggccttttaccacaagggcgccctgccttgtgagtgccaccccactggggccaccggccctcactgcagccctgagggtgggcagtgcccatgccagcccaacgtcatcgggcggcagtgcacccgctgtgcaacaggccactacggattcccacgctgcaagccgtgcagctgtggtcggcgcctttgtgaagagatgacggggcagtgccgctgccctccccgcacggtcaggccccagtgtgaggtgtgtgagacacactcattcagcttccaccccatggccggctgcgaaggctgcaactgttccaggaggggcaccatcgaggctgccatgccggagtgtgaccgggacagcgggcagtgcagatgcaagcccagaatcacagggcggcagtgtgaccgatgtgcttccgggttttaccgctttcctgagtgtgttccctgcaattgcaacagagatgggactgagccaggagtgtgtgacccagggaccggggcttgcctctgcaaggaaaatgtagaaggcacagagtgtaatgtgtgtcgagaaggctcattccatttggacccagccaatctcaagggttgtaccagctgtttctgttttggagtaaataatcaatgtcacagctcacataagcgaaggactaagtttgtggatatgctgggctggcacctggagacagcagacagagtggacatccctgtctctttcaacccaggcagcaacagtatggtggcggatctccaggagctgcccgcaaccatccacagcgcgtcctgggtcgcacccacctcctacctgggggacaaggtttcttcatatggtggttacctcacttaccaagccaagtcctttggcttgcctggcgacatggttcttctggaaaagaagccggatgtacagctcactggtcagcacatgtccatcatctatgaggagacaaacaccccacggccagaccggctgcatcatggacgagtgcacgtggtcgagggaaacttcagacatgccagcagccgtgccccagtgtctagggaggagctgatgacagtgctgtctagactggcagatgtgcgcatccaaggcctctacttcacagagactcaaaggctcaccctgagcgaggtggggctagaggaagcctctgacacaggaagtgggcgcatagcacttgctgtggaaatctgtgcctgcccccctgcctacgctggtgactcttgtcagggttgtagccctggatactatcgggatcataaaggcttgtataccggacggtgtgttccctgcaattgcaacggacattcaaatcaatgccaggatggctcaggcatatgtgttaactgtcagcacaacaccgcgggagagcactgtgaacgctgccaggagggctactatggcaacgccgtccacggatcctgcagggcctgcccatgtcctcacactaacagctttgccactggctgtgtggtgaatgggggagacgtgcggtgctcctgcaaagctgggtacacaggaacacagtgtgaaaggtgtgcaccgggatatttcgggaatccccagaaattcggaggtagctgccaaccatgcagttgtaacagcaatggccagctgggcagctgtcatcccctgactggagactgcataaaccaagaacccaaagatagcagccctgcagaagaatgtgatgattgcgacagctgtgtgatgaccctcctgaacgacctggccaccatgggcgagcagctccgcctggtcaagtctcagctgcagggcctgagtgccagcgcagggcttctggagcagatgaggcacatggagacccaggccaaggacctgaggaatcagttgctcaactaccgttctgccatttcaaatcatggatcaaaaatagaaggcctggaaagagaactgactgatttgaatcaagaatttgagactttgcaagaaaaggctcaagtaaattccagaaaagcacaaacattaaacaacaatgttaatcgggcaacacaaagcgcaaaagaactggatgtgaagattaaaaatgtcatccggaatgtgcacatgctgaaccggataaggacctggcagaaaacccaccagggggagaacaatgggcttgctaacagtatccgggattctttaaatgaatacgaagccaaactcagtgaccttcgtgctcggctgcaggaggcagctgcccaagccaagcaggcaaatggcttgaaccaagaaaacgagagagctttgggagccattcagagacaagtgaaagaaataaattccctgcagagtgatttcaccaagtatctaaccactgcagactcatctttgttgcaaaccaacattgcgctgcagctgatggagaaaagccagaaggaatatgaaaaattagctgccagtttaaatgaagcaagacaagaactaagtgacaaagtaagagaactttccagatctgctggcaaaacatcccttgtggaggaggcagaaaagcacgcgcggtccttacaagagctggcaaagcagctggaagagatcaagagaaacgccagcggggatgagctggtgcgctgtgctgtggatgccgccaccgcctacgagaacatcctcaatgccatcaaagcggccgaggacgcagccaacagggctgccagtgcatctgaatctgccctccagacagtgataaaggaagatctgccaagaaaagctaaaaccctgagttccaacagtgataaactgttaaatgaagccaagatgacacaaaagaagctaaagcaagaagtcagtccagctctcaacaacctacagcaaaccctgaatattgtgacagttcagaaagaagtgatagacaccaatctcacaactctccgagatggtcttcatgggatacagagaggtgatattgatgctatgatcagtagtgcaaagagcatggtcagaaaggccaacgacatcacagatgaggttctggatgggctcaaccccatccagacagatgtggaaagaattaaggacacctatgggaggacacagaacgaagacttcaaaaaggctctgactgatgcagataactcggtgaataagttaaccaacaaactacctgatctttggcgcaagattgaaagtatcaaccaacagctgttgcccttgggaaacatctctgacaacatggacagaatacgagaactaattcagcaggccagagatgctgccagtaaggttgctgtccccatgaggttcaatggtaaatctggagtcgaagtccgactgccaaatgacctggaagatttgaaaggatatacatctctgtccttgtttctccaaaggcccaactcaagagaaaatgggggtactgagaatatgtttgtgatgtaccttggaaataaagatgcctcccgggactacatcggcatggcagttgtggatggccagctcacctgtgtctacaacctgggggaccgtgaggctgaactccaagtggaccagatcttgaccaagagtgagactaaggaggcagttatggatcgggtgaaatttcagagaatttatcagtttgcaaggcttaattacaccaaaggagccacatccagtaaaccagaaacacccggagtctatgacatggatggtagaaatagcaatacactccttaatttggatcctgaaaatgttgtattttatgttggaggttacccacctgattttaaacttcccagtcgactaagtttccctccatacaaaggttgtattgaattagatgacctcaatgaaaatgttctgagcttgtacaacttcaaaaaaacattcaatctcaacacaactgaagtggagccttgtagaaggaggaaggaagagtcagacaaaaattattttgaaggtacgggctatgctcgagttccaactcaaccacatgctcccatcccaacctttggacagacaattcagaccaccgtggatagaggcttgctgttctttgcagaaaacggggatcgcttcatatctctaaatatagaagatggcaagctcatggtgagatacaaactgaattcagagctaccaaaagagagaggagttggagacgccataaacaacggcagagaccattcgattcagatcaaaattggaaaactccaaaagcgtatgtggataaatgtggacgttcaaaacactataattgatggtgaagtatttgatttcagcacatattatctgggaggaattccaattgcaatcagggaaagatttaacatttctacgcctgctttccgaggctgcatgaaaaatttgaagaaaaccagtggtgtcgttagattgaatgatactgtgggagtaaccaaaaagtgctcggaagactggaagcttgtgcgatctgcctcattctccagaggaggacaattgagtttcactgatttgggcttaccacctactgaccacctccaggcctcatttggatttcagacctttcaacccagtggcatattattagatcatcagacatggacaaggaacctgcaggtcactctggaagatggttacattgaattgagcaccagcgatagcggcagcccaatttttaaatctccacagacgtatatggatggtttactgcattatgtatctgtaataagcgacaactctggactacggcttctcatcgatgaccagcttctgagaaatagcaaaaggctaaaacacatttcaagttcccggcagtctctgcgtctgggcgggagcaattttgagggttgtattagcaatgtttttgtccagaggttatcactgagtcctgaagtcctagatttgaccagtaactctctcaagagagatgtgtccctgggaggctgcagtttaaacaaaccaccttttctaatgttgcttaaaggttctaccaggtttaacaagaccaagacttttcgtatcaaccagctgttgcaggacacaccagtggcctccccaaggagcgtgaaggtgtggcaagatgcttgctcaccacttcccaagacccaggccaatcatggagccctccagtttggggacattcccaccagccacttgctattcaagcttcctcaggagctgctgaaacccaggtcacagtttgctgtggacatgcagacaacatcctccagaggactggtgtttcacacgggcactaagaactcctttatggctctttatctttcaaaaggacgtctggtctttgcactggggacagatgggaaaaaattgaggatcaaaagcaaggagaaatgcaatgatgggaaatggcacacggtggtgtttggccatgatggggaaaaggggcgcttggttgtggatggactgagggcccgggagggaagtttgcctggaaactccaccatcagcatcagagcgccagtttacctgggatcacctccatcagggaaaccaaagagcctccccacaaacagctttgtgggatgcctgaagaactttcagctggattcaaaacccttgtataccccttcttcaagcttcggggtgtcttcctgcttgggtggtcctttggagaaaggcatttatttctctgaagaaggaggtcatgtcgtcttggctcactctgtattgttggggccagaatttaagcttgttttcagcatccgcccaagaagtctcactgggatcctaatacacatcggaagtcagcccgggaagcacttatgtgtttacctggaggcaggaaaggtcacggcctctatggacagtggggcaggtgggacctcaacgtcggtcacaccaaagcagtctctgtgtgatggacagtggcactcggtggcagtcaccataaaacaacacatcctgcacctggaactggacacagacagtagctacacagctggacagatccccttcccacctgccagcactcaagagccactacaccttggaggtgctccagccaatttgacgacactgaggatccctgtgtggaaatcattctttggctgtctgaggaatattcatgtcaatcacatccctgtccctgtcactgaagccttggaagtccaggggcctgtcagtctgaatggttgtcctgaccagtaacccaagcctatttcacagcaaggaaattcaccttcaaaagcactgattacccaatgcacctccctccccagctcgagatcattcttcactcaggacacaaaccagacaggtttaatagcgaatctaattttgaattctgaccatggatacccatcactttggcattcagtgctacatgtgtattttatataaaaatcccatttcttgaagataaaaaaattgttattcaaattgttatgcacagaatgtttttggtaatattaatttccactaaaaaattaaatgtcttttaagaaacattcttttccacttgttaaaaaaattaaatatattttaaagcactttaagaatatgaaactttcatatatgttaaaggattataatttatggaattaaaaaatgcagtgtagtcctt

SEQ ID NO: 15637 - DNA, 10497 bp, Homo sapiens
  source 1..10497: mol_type = unassigned DNA
gcaggtccgggaggcgcaggcggagagcggcggtgcccccgagcccctctgcggacggctcaggcgggaggaccccgcgcggctggatggcggcggccgcgcggcctcggggtcgggcactggggccagtactgccgccgacgccgctgctcctgctggtactgcgggtgctgccagcctgcggggcgaccgctcgggatcccggggccgcggccgggctcagccttcacccgacttacttcaacctggccgaggcggcgaggatttgggccaccgccacctgcggggagaggggacccggcgaggggaggccccagcccgagctctactgcaagttggtcgggggccccaccgccccaggcagcggccacaccatccagggccagttctgtgactattgcaattctgaagaccccaggaaagcacatcctgtcaccaatgccatcgatggatctgaacgttggtggcaaagccctcccctgtcctcaggcacacagtacaacagagtcaacctcaccttggatctggggcagctcttccatgtggcctatattttaatcaaatttgcaaattctcctcgccctgatctttgggtcttggaaagatctgtagactttggaagcacctactcaccatggcaatattttgctcattctaaagtagactgtttaaaagaatttgggcgggaggcaaatatggctgtcacccgggatgatgatgtactttgtgttactgaatattcccgtattgtacctttggaaaatggtgaggttgtggtgtccttgataaacggtcgtccaggtgcaaaaaattttactttctctcacaccctgagggtttaccaaggcaacaaacatccgctttttcttagaaccaatacgcttcttggacacctcatctccaaagcccagcgagatccaactgtcactcggcggtattattacagcataaaggacatcagcattggtgggcagtgtgtttgcaatggccatgctgaagtgtgcaatataaacaatcctgaaaaactgtttcggtgtgaatgccagcaccacacctgtggggagacgtgtgatcgctgctgcacagggtacaatcagaggcgctggcggcccgccgcttgggagcagagccacgagtgtgaagcatgcaactgccacggccatgccagcaactgttactatgatccagatgttgagcggcagcaggcaagcttgaatacccagggcatctatgctggtggaggggtctgcattaactgtcagcacaacacagctggagtaaactgtgaacagtgtgctaagggctattaccgcccttatggggttccagtggatgcccctgatggctgcatcccctgcagctgtgaccctgagcatgcggatggctgtgaacagggttcaggccgctgtcactgcaagccaaatttccacggagacaactgtgagaagtgtgcaattggatactacaatttcccattttgcttgagaattcccatttttcctgtttctacaccaagttcagaagatccagtagctggagatataaaagggtgtgactgtaatctggaaggtgttctccctgaaatatgtgatgcccacggacggtgcctgtgccgccctggggttgagggccctcgatgtgatacctgccgctctggtttctactcattccctatttgccaagcctgctggtgttcagcccttggatcctaccagatgccctgcagctcagtgactggacagtgtgaatgtcggccaggagttacaggacagcggtgtgacaggtgtctctcaggagcttatgatttcccccactgccaaggttccagcagtgcttgtgacccagctggtaccatcaactccaatttggggtattgccaatgcaagcttcatgttgaaggtcctacttgtagccgctgcaaactgttatattggaatctggacaaagaaaaccccagtggatgttcagaatgcaagtgccataaggcgggaacagtgagtggaactggagagtgtaggcagggagatggtgactgtcactgcaagtcccatgtgggtggcgattcctgcgacacctgtgaagatggatattttgctttggaaaagagcaattactttgggtgtcaagggtgtcagtgtgacattggtggggcattgtcctccatgtgcagtgggccctcgggagtgtgccagtgccgagagcatgtcgtgggaaaggtgtgccagcggcctgaaaacaactactatttcccagatttgcatcatatgaagtatgagattgaagacggcagcacacctaatgggagagaccttcgatttggatttgatccgctggcatttcctgagtttagctggagaggatatgcccaaatgacctcagtacagaatgatgtaagaataacattgaatgtagggaagtcaagtggctccttgtttcgtgttattctgagatacgttaaccctggaactgaagcagtatctggccatataactatttatccatcctggggtgctgctcaaagcaaagagatcatcttcctgccgagtaaggagccagcctttgtcactgtccctggaaatggttttgcagacccattttcaatcacaccaggaatatgggttgcttgtattaaggcagaaggagtccttctggattacctggtgctgctccccagggactactatgaagcctctgtactgcagctgccagtcacagaaccatgtgcctacgcaggacctccccaagaaaattgcttactctaccagcatttgccagtgaccagattcccctgtaccctggcttgtgaggccagacacttcctgcttgatggggagccaagacccgtggcagtgaggcagcccacacctgcacaccctgtcatggtggacctcagcgggagagaggtggaattgcatctgcggctgcgcatcccacaggttggccactacgtggttgtggtcgagtattccacggaggcagctcagctgtttgtggttgatgtgaatgtgaagagctccgggtctgttctggcaggccaggtgaacatttacagctgcaactacagtgttctctgccggagtgctgtgattgatcacatgagccgcatcgccatgtatgagctattggcagatgcagacattcagctcaagggacacatggcccgattccttctgcatcaagtttgtatcatacctattgaagaattctcagctgagtatgtgagaccacaagtccactgcattgccagttatgggcgatttgtcaatcaaagtgccacctgtgtctccttggcccatgaaactcctccaacagcattaattttggatgttctaagtggcaggcctttccctcacctgccccagcagtcgtcaccttctgttgatgttcttcctggggtcaccttgaaggcaccgcagaatcaagtgaccctgagaggacgtgtaccacacctgggccgatacgtctttgtcatccatttttaccaagcagcgcacccgacgtttcccgcgcaggtgtcggtggatggcgggtggccacgggcaggctccttccatgcctctttttgcccccatgtgcttggctgccgggatcaagtgattgccgaaggccagattgagtttgacatctcagagcctgaagtggccgcaactgtgaaggttccagaaggaaagtccttggttttggtccgtgttctagtggtgcctgcagaaaactatgactaccaaatacttcacaaaaaatccatggacaagtcactcgagtttatcaccaattgtggaaaaaacagcttttaccttgacccccagacagcctccagattctgtaagaattccgccaggtccctggtggccttttaccacaagggcgccctgccttgtgagtgccaccccactggggccaccggccctcactgcagccctgagggtggggcccatgccagcccaacgtcatcgggcggcagtgcacccgctgtgcaacaggcctacggattcccacgctgcaagcgtaagtcgtgcagctgtggtcggcgcctttgtgaagagatgacggggcagtgccgctgccctccccgcacggtcaggccccagtgtgaggtgtgtgagacacactcattcagcttccaccccatggccggctgcgaaggctgcaactgttccaggaggggcaccatcgaggctgccatgccggagtgtgaccgggacagcgggcagtgcagatgcaagcccagaatcacagggcggcagtgtgaccgatgtgcttccgggttttaccgctttcctgagtgtgttccctgcaattgcaacagagatgggactgagccaggagtgtgtgacccagggaccggggcttgcctctgcaaggaaaatgtagaaggcacagagtgtaatgtgtgtcgagaaggctcattccatttggacccagccaatctcaagggttgtaccagctgtttctgttttggagtaaataatcaatgtcacagctcacataagcgaaggactaagtttgtggatatgctgggctggcacctggagacagcagacagagtggacatccctgtctctttcaacccaggcagcaacagtatggtggcggatctccaggagctgcccgcaaccatccacagcgcgtcctgggtcgcacccacctcctacctgggggacaaggtttcttcatatggtggttacctcacttaccaagccaagtcctttggcttgcctggcgacatggttcttctggaaaagaagccggatgtacagctcactggtcagcacatgtccatcatctatgaggagacaaacaccccacggccagaccggctgcatcatggacgagtgcacgtggtcgagggaaacttcagacatgccagcagccgtgccccagtgtctagggaggagctgatgacagtgctgtctagactggcagatgtgcgcatccaaggcctctacttcacagagactcaaaggctcaccctgagcgaggtggggctagaggaagcctctgacacaggaagtgggcgcatagcacttgctgtggaaatctgtgcctgcccccctgcctacgctggtgactcttgtcagggttgtagccctggatactatcgggatcataaaggcttgtataccggacggtgtgttccctgcaattgcaacggacattcaaatcaatgccaggatggctcaggcatatgtgttaactgtcagcacaacaccgcgggagagcactgtgaacgctgccaggagggctactatggcaacgccgtccacggatcctgcagggcctgcccatgtcctcacactaacagctttgccactggctgtgtggtgaatgggggagacgtgcggtgctcctgcaaagctgggtacacaggaacacagtgtgaaaggtgtgcaccgggatatttcgggaatccccagaaattcggaggtagctgccaaccatgcagttgtaacagcaatggccagctgggcagctgtcatcccctgactggagactgcataaaccaagaacccaaagatagcagccctgcagaagaatgtgatgattgcgacagctgtgtgatgaccctcctgaacgacctggccaccatgggcgagcagctccgcctggtcaagtctcagctgcagggcctgagtgccagcgcagggcttctggagcagatgaggcacatggagacccaggccaaggacctgaggaatcagttgctcaactaccgttctgccatttcaaatcatggatcaaaaatagaaggcctggaaagagaactgactgatttgaatcaagaatttgagactttgcaagaaaaggctcaagtaaattccagaaaagcacaaacattaaacaacaatgttaatcgggcaacacaaagcgcaaaagaactggatgtgaagattaaaaatgtcatccggaatgtgcacattcttttaaagcagatctctgggacagatggagagggaaacaacgtgccttcaggtgacttttccagagagtgggctgaagcccagcgcatgatgagggaactgcggaacaggaactttggaaagcacctcagagaagcagaagctgataaaagggagtcgcagctcttgctgaaccggataaggacctggcagaaaacccaccagggggagaacaatgggcttgctaacagtatccgggattctttaaatgaatacgaagccaaactcagtgaccttcgtgctcggctgcaggaggcagctgcccaagccaagcaggcaaatggcttgaaccaagaaaacgagagagctttgggagccattcagagacaagtgaaagaaataaattccctgcagagtgatttcaccaagtatctaaccactgcagactcatctttgttgcaaaccaacattgcgctgcagctgatggagaaaagccagaaggaatatgaaaaattagctgccagtttaaatgaagcaagacaagaactaagtgacaaagtaagagaactttccagatctgctggcaaaacatcccttgtggaggaggcagaaaagcacgcgcggtccttacaagagctggcaaagcagctggaagagatcaagagaaacgccagcggggatgagctggtgcgctgtgctgtggatgccgccaccgcctacgagaacatcctcaatgccatcaaagcggccgaggacgcagccaacagggctgccagtgcatctgaatctgccctccagacagtgataaaggaagatctgccaagaaaagctaaaaccctgagttccaacagtgataaactgttaaatgaagccaagatgacacaaaagaagctaaagcaagaagtcagtccagctctcaacaacctacagcaaaccctgaatattgtgacagttcagaaagaagtgatagacaccaatctcacaactctccgagatggtcttcatgggatacagagaggtgatattgatgctatgatcagtagtgcaaagagcatggtcagaaaggccaacgacatcacagatgaggttctggatgggctcaaccccatccagacagatgtggaaagaattaaggacacctatgggaggacacagaacgaagacttcaaaaaggctctgactgatgcagataactcggtgaataagttaaccaacaaactacctgatctttggcgcaagattgaaagtatcaaccaacagctgttgcccttgggaaacatctctgacaacatggacagaatacgagaactaattcagcaggccagagatgctgccagtaaggttgctgtccccatgaggttcaatggtaaatctggagtcgaagtccgactgccaaatgacctggaagatttgaaaggatatacatctctgtccttgtttctccaaaggcccaactcaagagaaaatgggggtactgagaatatgtttgtgatgtaccttggaaataaagatgcctcccgggactacatcggcatggcagttgtggatggccagctcacctgtgtctacaacctgggggaccgtgaggctgaactccaagtggaccagatcttgaccaagagtgagactaaggaggcagttatggatcgggtgaaatttcagagaatttatcagtttgcaaggcttaattacaccaaaggagccacatccagtaaaccagaaacacccggagtctatgacatggatggtagaaatagcaatacactccttaatttggatcctgaaaatgttgtattttatgttggaggttacccacctgattttaaacttcccagtcgactaagtttccctccatacaaaggttgtattgaattagatgacctcaatgaaaatgttctgagcttgtacaacttcaaaaaaacattcaatctcaacacaactgaagtggagccttgtagaaggaggaaggaagagtcagacaaaaattattttgaaggtacgggctatgctcgagttccaactcaaccacatgctcccatcccaacctttggacagacaattcagaccaccgtggatagaggcttgctgttctttgcagaaaacggggatcgcttcatatctctaaatatagaagatggcaagctcatggtgagatacaaactgaattcagagctaccaaaagagagaggagttggagacgccataaacaacggcagagaccattcgattcagatcaaaattggaaaactccaaaagcgtatgtggataaatgtggacgttcaaaacactataattgatggtgaagtatttgatttcagcacatattatctgggaggaattccaattgcaatcagggaaagatttaacatttctacgcctgctttccgaggctgcatgaaaaatttgaagaaaaccagtggtgtcgttagattgaatgatactgtgggagtaaccaaaaagtgctcggaagactggaagcttgtgcgatctgcctcattctccagaggaggacaattgagtttcactgatttgggcttaccacctactgaccacctccaggcctcatttggatttcagacctttcaacccagtggcatattattagatcatcagacatggacaaggaacctgcaggtcactctggaagatggttacattgaattgagcaccagcgatagcggcagcccaatttttaaatctccacagacgtatatggatggtttactgcattatgtatctgtaataagcgacaactctggactacggcttctcatcgatgaccagcttctgagaaatagcaaaaggctaaaacacatttcaagttcccggcagtctctgcgtctgggcgggagcaattttgagggttgtattagcaatgtttttgtccagaggttatcactgagtcctgaagtcctagatttgaccagtaactctctcaagagagatgtgtccctgggaggctgcagtttaaacaaaccaccttttctaatgttgcttaaaggttctaccaggtttaacaagaccaagacttttcgtatcaaccagctgttgcaggacacaccagtggcctccccaaggagcgtgaaggtgtggcaagatgcttgctcaccacttcccaagacccaggccaatcatggagccctccagtttggggacattcccaccagccacttgctattcaagcttcctcaggagctgctgaaacccaggtcacagtttgctgtggacatgcagacaacatcctccagaggactggtgtttcacacgggcactaagaactcctttatggctctttatctttcaaaaggacgtctggtctttgcactggggacagatgggaaaaaattgaggatcaaaagcaaggagaaatgcaatgatgggaaatggcacacggtggtgtttggccatgatggggaaaaggggcgcttggttgtggatggactgagggcccgggagggaagtttgcctggaaactccaccatcagcatcagagcgccagtttacctgggatcacctccatcagggaaaccaaagagcctccccacaaacagctttgtgggatgcctgaagaactttcagctggattcaaaacccttgtataccccttcttcaagcttcggggtgtcttcctgcttgggtggtcctttggagaaaggcatttatttctctgaagaaggaggtcatgtcgtcttggctcactctgtattgttggggccagaatttaagcttgttttcagcatccgcccaagaagtctcactgggatcctaatacacatcggaagtcagcccgggaagcacttatgtgtttacctggaggcaggaaaggtcacggcctctatggacagtggggcaggtgggacctcaacgtcggtcacaccaaagcagtctctgtgtgatggacagtggcactcggtggcagtcaccataaaacaacacatcctgcacctggaactggacacagacagtagctacacagctggacagatccccttcccacctgccagcactcaagagccactacaccttggaggtgctccagccaatttgacgacactgaggatccctgtgtggaaatcattctttggctgtctgaggaatattcatgtcaatcacatccctgtccctgtcactgaagccttggaagtccaggggcctgtcagtctgaatggttgtcctgaccagtaacccaagcctatttcacagcaaggaaattcaccttcaaaagcactgattacccaatgcacctccctccccagctcgagatcattcttcactcaggacacaaaccagacaggtttaatagcgaatctaattttgaattctgaccatggatacccatcactttggcattcagtgctacatgtgtattttatataaaaatcccatttcttgaagataaaaaaattgttattcaaattgttatgcacagaatgtttttggtaatattaatttccactaaaaaattaaatgtcttttaagaaacattcttttccacttgttaaaaaaattaaatatattttaaagcactttaagaatatgaaactttcatatatgttaaaggattataatttatggaattaaaaaatgcagtgtagtcctt

SEQ ID NO: 15638 - DNA, 1826 bp, Homo sapiens
  source 1..1826: mol_type = unassigned DNA
gcaggtccgggaggcgcaggcggagagcggcggtgcccccgagcccctctgcggacggctcaggcgggaggaccccgcgcggctggatggcggcggccgcgcggcctcggggtcgggcactggggccagtactgccgccgacgccgctgctcctgctggtactgcgggtgctgccagcctgcggggcgaccgctcgggatcccggggccgcggccgggctcagccttcacccgacttacttcaacctggccgaggcggcgaggatttgggccaccgccacctgcggggagaggggacccggcgaggggaggccccagcccgagctctactgcaagttggtcgggggccccaccgccccaggcagcggccacaccatccagggccagttctgtgactattgcaattctgaagaccccaggaaagcacatcctgtcaccaatgccatcgatggatctgaacgttggtggcaaagccctcccctgtcctcaggcacacagtacaacagagtcaacctcaccttggatctggggcagctcttccatgtggcctatattttaatcaaatttgcaaattctcctcgccctgatctttgggtcttggaaagatctgtagactttggaagcacctactcaccatggcaatattttgctcattctaaagtagactgtttaaaagaatttgggcgggaggcaaatatggctgtcacccgggatgatgatgtactttgtgttactgaatattcccgtattgtacctttggaaaatggtgaggttgtggtgtccttgataaacggtcgtccaggtgcaaaaaattttactttctctcacaccctgagggagtttaccaaggcaacaaacatccgcttgcgttttcttagaaccaatacgcttcttggacacctcatctccaaagcccagcgagatccaactgtcactcggcggtattattacagcataaaggacatcagcattggtgggcagtgtgtttgcaatggccatgctgaagtgtgcaatataaacaatcctgaaaaactgtttcggtgtgaatgccagcaccacacctgtggggagacgtgtgatcgctgctgcacagggtacaatcagaggcgctggcggcccgccgcttgggagcagagccacgagtgtgaagcatgcaactgccacggccatgccagcaactgttactatgatccagatgttgagcggcagcaggcaagcttgaatacccagggcatctatgctggtggaggggtctgcattaactgtcagcacaacacagctggagtaaactgtgaacagtgtgctaagggctattaccgcccttatggggttccagtggatgcccctgatggctgcatcccctgcagctgtgaccctgagcatgcggatggctgtgaacagggttcaggccgctgtcactgcaagccaaatttccacggagacaactgtgagaagtgtgcaattggatactacaatttcccattttgcttgagaattcccatttttcctgtttctacaccaagttcagaagatccagtagctggagatataaaaggcaactggtgtgactgtaatctggaaggtgttctccctgaaatatgtgatgcccacggacggtgcctgtgccgccctggggttgagggccctcgatgtgatacctgccgctctggtttctactcattccctatttgccaaggacccagtgaaaaggtggccatctacaagccagaaagcaggccctcagcagaaactgaaccagccagcacctggatcttggacttcccagcctccagaactggagaaataaatttctattgtttaagccca

SEQ ID NO: 15639 - DNA, 5007 bp, Homo sapiens
  source 1..5007: mol_type = unassigned DNA
atgcctccagcagtgaggcggtcagcctgcagcatgggatggctgtggatctttggggcagccctggggcagtgtctgggctacagttcacagcagcaaagggtgccatttcttcagcctcccggtcaaagtcaactgcaagcgagttatgtggagtttagacccagccagggttgtagccctggatactatcgggatcataaaggcttgtataccggacggtgtgttccctgcaattgcaacggacattcaaatcaatgccaggatggctcaggcatatgtgttaactgtcagcacaacaccgcgggagagcactgtgaacgctgccaggagggctactatggcaacgccgtccacggatcctgcagggcctgcccatgtcctcacactaacagctttgccactggctgtgtggtgaatgggggagacgtgcggtgctcctgcaaagctgggtacacaggaacacagtgtgaaaggtgtgcaccgggatatttcgggaatccccagaaattcggaggtagctgccaaccatgcagttgtaacagcaatggccagctgggcagctgtcatcccctgactggagactgcataaaccaagaacccaaagatagcagccctgcagaagaatgtgatgattgcgacagctgtgtgatgaccctcctgaacgacctggccaccatgggcgagcagctccgcctggtcaagtctcagctgcagggcctgagtgccagcgcagggcttctggagcagatgaggcacatggagacccaggccaaggacctgaggaatcagttgctcaactaccgttctgccatttcaaatcatggatcaaaaatagaaggcctggaaagagaactgactgatttgaatcaagaatttgagactttgcaagaaaaggctcaagtaaattccagaaaagcacaaacattaaacaacaatgttaatcgggcaacacaaagcgcaaaagaactggatgtgaagattaaaaatgtcatccggaatgtgcacatgctgaaccggataaggacctggcagaaaacccaccagggggagaacaatgggcttgctaacagtatccgggattctttaaatgaatacgaagccaaactcagtgaccttcgtgctcggctgcaggaggcagctgcccaagccaagcaggcaaatggcttgaaccaagaaaacgagagagctttgggagccattcagagacaagtgaaagaaataaattccctgcagagtgatttcaccaagtatctaaccactgcagactcatctttgttgcaaaccaacattgcgctgcagctgatggagaaaagccagaaggaatatgaaaaattagctgccagtttaaatgaagcaagacaagaactaagtgacaaagtaagagaactttccagatctgctggcaaaacatcccttgtggaggaggcagaaaagcacgcgcggtccttacaagagctggcaaagcagctggaagagatcaagagaaacgccagcggggatgagctggtgcgctgtgctgtggatgccgccaccgcctacgagaacatcctcaatgccatcaaagcggccgaggacgcagccaacagggctgccagtgcatctgaatctgccctccagacagtgataaaggaagatctgccaagaaaagctaaaaccctgagttccaacagtgataaactgttaaatgaagccaagatgacacaaaagaagctaaagcaagaagtcagtccagctctcaacaacctacagcaaaccctgaatattgtgacagttcagaaagaagtgatagacaccaatctcacaactctccgagatggtcttcatgggatacagagaggtgatattgatgctatgatcagtagtgcaaagagcatggtcagaaaggccaacgacatcacagatgaggttctggatgggctcaaccccatccagacagatgtggaaagaattaaggacacctatgggaggacacagaacgaagacttcaaaaaggctctgactgatgcagataactcggtgaataagttaaccaacaaactacctgatctttggcgcaagattgaaagtatcaaccaacagctgttgcccttgggaaacatctctgacaacatggacagaatacgagaactaattcagcaggccagagatgctgccagtaaggttgctgtccccatgaggttcaatggtaaatctggagtcgaagtccgactgccaaatgacctggaagatttgaaaggatatacatctctgtccttgtttctccaaaggcccaactcaagagaaaatgggggtactgagaatatgtttgtgatgtaccttggaaataaagatgcctcccgggactacatcggcatggcagttgtggatggccagctcacctgtgtctacaacctgggggaccgtgaggctgaactccaagtggaccagatcttgaccaagagtgagactaaggaggcagttatggatcgggtgaaatttcagagaatttatcagtttgcaaggcttaattacaccaaaggagccacatccagtaaaccagaaacacccggagtctatgacatggatggtagaaatagcaatacactccttaatttggatcctgaaaatgttgtattttatgttggaggttacccacctgattttaaacttcccagtcgactaagtttccctccatacaaaggttgtattgaattagatgacctcaatgaaaatgttctgagcttgtacaacttcaaaaaaacattcaatctcaacacaactgaagtggagccttgtagaaggaggaaggaagagtcagacaaaaattattttgaaggtacgggctatgctcgagttccaactcaaccacatgctcccatcccaacctttggacagacaattcagaccaccgtggatagaggcttgctgttctttgcagaaaacggggatcgcttcatatctctaaatatagaagatggcaagctcatggtgagatacaaactgaattcagagctaccaaaagagagaggagttggagacgccataaacaacggcagagaccattcgattcagatcaaaattggaaaactccaaaagcgtatgtggataaatgtggacgttcaaaacactataattgatggtgaagtatttgatttcagcacatattatctgggaggaattccaattgcaatcagggaaagatttaacatttctacgcctgctttccgaggctgcatgaaaaatttgaagaaaaccagtggtgtcgttagattgaatgatactgtgggagtaaccaaaaagtgctcggaagactggaagcttgtgcgatctgcctcattctccagaggaggacaattgagtttcactgatttgggcttaccacctactgaccacctccaggcctcatttggatttcagacctttcaacccagtggcatattattagatcatcagacatggacaaggaacctgcaggtcactctggaagatggttacattgaattgagcaccagcgatagcggcagcccaatttttaaatctccacagacgtatatggatggtttactgcattatgtatctgtaataagcgacaactctggactacggcttctcatcgatgaccagcttctgagaaatagcaaaaggctaaaacacatttcaagttcccggcagtctctgcgtctgggcgggagcaattttgagggttgtattagcaatgtttttgtccagaggttatcactgagtcctgaagtcctagatttgaccagtaactctctcaagagagatgtgtccctgggaggctgcagtttaaacaaaccaccttttctaatgttgcttaaaggttctaccaggtttaacaagaccaagacttttcgtatcaaccagctgttgcaggacacaccagtggcctccccaaggagcgtgaaggtgtggcaagatgcttgctcaccacttcccaagacccaggccaatcatggagccctccagtttggggacattcccaccagccacttgctattcaagcttcctcaggagctgctgaaacccaggtcacagtttgctgtggacatgcagacaacatcctccagaggactggtgtttcacacgggcactaagaactcctttatggctctttatctttcaaaaggacgtctggtctttgcactggggacagatgggaaaaaattgaggatcaaaagcaaggagaaatgcaatgatgggaaatggcacacggtggtgtttggccatgatggggaaaaggggcgcttggttgtggatggactgagggcccgggagggaagtttgcctggaaactccaccatcagcatcagagcgccagtttacctgggatcacctccatcagggaaaccaaagagcctccccacaaacagctttgtgggatgcctgaagaactttcagctggattcaaaacccttgtataccccttcttcaagcttcggggtgtcttcctgcttgggtggtcctttggagaaaggcatttatttctctgaagaaggaggtcatgtcgtcttggctcactctgtattgttggggccagaatttaagcttgttttcagcatccgcccaagaagtctcactgggatcctaatacacatcggaagtcagcccgggaagcacttatgtgtttacctggaggcaggaaaggtcacggcctctatggacagtggggcaggtgggacctcaacgtcggtcacaccaaagcagtctctgtgtgatggacagtggcactcggtggcagtcaccataaaacaacacatcctgcacctggaactggacacagacagtagctacacagctggacagatccccttcccacctgccagcactcaagagccactacaccttggaggtgctccagccaatttgacgacactgaggatccctgtgtggaaatcattctttggctgtctgaggaatattcatgtcaatcacatccctgtccctgtcactgaagccttggaagtccaggggcctgtcagtctgaatggttgtcctgaccagtaa

SEQ ID NO: 15640 - DNA, 6547 bp, Homo sapiens
  source 1..6547: mol_type = unassigned DNA
gaatattcttctggagcccttggaggggctccaaactgagaggggagggaagaccgcagggaaaggcggacctcagtgtctgaaaagccagcttagagtgggagggcctgggagtagaaggtaaaaagggagtggtgagaatgaatgtgagaaggaagccaggacagcgcagtccccagtcccgaacggccagggagaggaggtggcctagcgctggcggggctcaccccaatccgtctgccttttgatgccgtactctgctggttgcgcagccacctcgggatactgcacacggagaggagggaaaataagcgaggcaccgccgcaccacgcgggagacctacggagacccacagcgcccgagccctggaagagcactactggatgtcagcggagaaatggctttgagctcagcctggcgctcggttctgcctctgtggctcctctggagcgctgcctgctcccgcgccgcgtccggggacgacaacgcttttccttttgacattgaagggagctcagcggttggcaggcaagacccgcctgagacgagcgaaccccgcgtggctctgggacgcctgccgcctgcggccgagaaatgcaatgctggattctttcacaccctgtcgggagaatgtgtgccctgcgactgtaatggcaattccaacgagtgtttggacggctcaggatactgtgtgcactgccagcggaacacaacaggagagcactgtgaaaagtgtctggatggttatatcggagattccatcaggggagcaccccaattctgccagccgtgcccctgtcccctgccccacttggccaattttgcagaatcctgctataggaaaaatggagctgttcggtgcatttgtaacgaaaattatgctggacctaactgtgaaagatgtgctcccggttactatggaaaccccttactcattggaagcacctgtaagaaatgtgactgcagtggaaattcagatcccaacctgatctttgaagattgtgatgaagtcactggccagtgtaggaattgcttacgcaacaccaccggattcaagtgtgaacgttgcgctcctggctactatggggacgccaggatagccaagaactgtgcagtgtgcaactgcgggggaggcccatgtgacagtgtaaccggagaatgcttggaagaaggttttgaaccccctacaggcatggactgcccaaccataagctgtgataagtgcgtctgggacctgactgatgcactgcggttagcagcgctctccatcgaggaaggcaaatccggggtgctgagcgtatcctctggggccgccgctcataggcacgtgaatgaaatcaacgccaccatctacctcctcaaaacaaaattgtcagaaagagaaaaccaatacgccctaagaaagatacaaatcaacaatgctgagaacacgatgaaaagccttctgtctgacgtagaggaattagttgaaaaggaaaatcaagcctccagaaaaggacaacttgttcagaaggaaagcatggacaccattaaccacgcaagtcagctggtagagcaagcccatgatatgagggataaaatccaagagatcaacaacaagatgctctattatggggaagagcatgaacttagccccaaggaaatctctgagaagctggtgttggcccagaagatgcttgaagagattagaagccgtcaaccatttttcacccaacgggagctcgtggatgaggaggcagatgaggcttacgaactactgagccaggctgagagctggcagcggctgcacaatgagacccgcactctgtttcctgtcgtcctggagcagctggatgactacaatgctaagttgtcagatctccaggaagcacttgaccaggcccttaactatgtcagggatgccgaagacatgaacagggccacagcagccaggcagcgggaccatgagaaacaacaggaaagagtgagggaacaaatggaagtggtgaacatgtctctgagcacatctgcggactctctgacaacacctcgtctaactctttcagaacttgatgatataataaagaatgcgtcagggatttatgcagaaatagatggagccaaaagtgaactacaagtaaaactatctaacctaagtaacctcagccatgatttagtccaagaagctattgaccatgcacaggaccttcaacaagaagctaatgaattgagcaggaagttgcacagttcagatatgaacgggctggtacagaaggctttggatgcatcaaatgtctatgaaaatattgttaattatgttagtgaagccaatgaaacagcagaatttgctttgaacaccactgaccgaatttatgatgcggtgagtgggattgatactcaaatcatttaccataaagatgaaagtgagaacctcctcaatcaagccagagaactgcaagcaaaggcagagtctagcagtgatgaagcagtggctgacactagcaggcgtgtgggtggagccctagcaaggaaaagtgcccttaaaaccagactcagtgatgccgttaagcaactacaagcagcagagagaggggatgcccagcagcgcctggggcagtctagactgatcaccgaggaagccaacaggacgacgatggaggtgcagcaggccactgcccccatggccaacaatctaaccaactggtcacagaatcttcaacattttgactcttctgcttacaacactgcagtgaactctgctagggatgcagtaagaaatctgaccgaggttgtccctcagctcctggatcagcttcgtacggttgagcagaagcgacctgcaagcaacgtttctgccagcatccagaggatccgagagctcattgctcagaccagaagtgttgccagcaagatccaagtctccatgatgtttgatggccagtcagctgtggaagtgcactcgagaaccagtatggatgacttaaaggccttcacgtctctgagcctgtacatgaaaccccctgtgaagcggccggaactgaccgagactgcagatcagtttatcctgtacctcggaagcaaaaacgccaaaaaagagtatatgggtcttgcaatcaaaaatgataatctggtatacgtctataatttgggaactaaagatgtggagattcccctggactccaagcccgtcagttcctggcctgcttacttcagcattgtcaagattgaaagggtgggaaaacatggaaaggtgtttttaacagtcccgagtctaagtagcacagcagaggaaaagttcattaaaaagggggaattttcgggagatgactctctgctggacctggaccctgaggacacagtgttttatgttggtggagtgccttccaacttcaagctccctaccagcttaaacctgcctggctttgttggctgcctggaactggccactttgaataatgatgtgatcagcttgtacaactttaagcacatctataatatggacccctccacatcagtgccatgtgcccgagataagctggccttcactcagagtcgggctgccagttacttcttcgatggctccggttatgccgtggtgagagacatcacaaggagagggaaatttggtcaggtgactcgctttgacatagaagttcgaacaccagctgacaacggccttattctcctgatggtcaatggaagtatgtttttcagactggaaatgcgcaatggttacctacatgtgttctatgattttggattcagcggtggccctgtgcatcttgaagatacgttaaagaaagctcaaattaatgatgcaaaataccatgagatctcaatcatttaccacaatgataagaaaatgatcttggtagttgacagaaggcatgtcaagagcatggataatgaaaagatgaaaataccttttacagatatatacattggaggagctcctccagaaatcttacaatccagggccctcagagcacaccttcccctagatatcaacttcagaggatgcatgaagggcttccagttccaaaagaaggacttcaatttactggagcagacagaaaccctgggagttggttatggatgcccagaagactcacttatatctcgcagagcatatttcaatggacagagcttcattgcttcaattcagaaaatatctttctttgatggctttgaaggaggttttaatttccgaacattacaaccaaatgggttactattctattatgcttcagggtcagacgtgttctccatctcactggataatggtactgtcatcatggatgtaaagggaatcaaagttcagtcagtagataagcagtacaatgatgggctgtcccacttcgtcattagctctgtctcacccacaagatatgaactgatagtagataaaagcagagttgggagtaagaatcctaccaaagggaaaatagaacagacacaagcaagtgaaaagaagttttacttcggtggctcaccaatcagtgctcagtatgctaatttcactggctgcataagtaatgcctactttaccagggtggatagagatgtggaggttgaagatttccaacggtatactgaaaaggtccacacttctctttatgagtgtcccattgagtcttcaccattgtttctcctccataaaaaaggaaaaaatttatccaagcctaaagcaagtcagaataaaaagggagggaaaagtaaagatgcaccttcatgggatcctgttgctctgaaactcccagagcggaatactccaagaaactctcattgccacctttccaacagccctagagcaatagagcacgcctatcaatatggaggaacagccaacagccgccaagagtttgaacacttaaaaggagattttggtgccaaatctcagttttccattcgtctgagaactcgttcctcccatggcatgatcttctatgtctcagatcaagaagagaatgacttcatgactctatttttggcccatggccgcttggtttacatgtttaatgttggtcacaaaaaactgaagattagaagccaggagaaatacaatgatggcctgtggcatgatgtgatatttattcgagaaaggagcagtggccgactggtaattgatggtctccgagtcctagaagaaagtcttcctcctactgaagctacctggaaaatcaagggtcccatttatttgggaggtgtggctcctggaaaggctgtgaaaaatgttcagattaactccatctacagttttagtggctgtctcagcaatctccagctcaatggggcctccatcacctctgcttctcagacattcagtgtgaccccttgctttgaaggccccatggaaacaggaacttacttttcaacagaaggaggatacgtggttctagatgaatctttcaatattggattgaagtttgaaattgcatttgaagtccgtcccagaagcagttccggaaccctggtccacggccacagtgtcaatggggagtacctaaatgttcacatgaaaaatggacaggtcatagtgaaagtcaataatggcatcagagatttttccacctcagttacacccaagcagagtctctgtgatggcagatggcacagaattacagttattagagattctaatgtggttcagttggatgtggactctgaagtgaaccatgtggttggacccctgaatccaaaaccaattgatcacagggagcctgtgtttgttggaggtgttccagaatctctactgacaccacgcttggcccccagcaaacccttcacaggctgcatacgccactttgtgattgatggacacccagtgagcttcagtaaagcagccctggtcagcggcgccgtaagcatcaactcctgtccagcagcctgacatgacagagcacagctgcccaaatacaaagttctttagagcactgaaagaaacacaaagccagccaggaggaacagtaactcttccttcgggtggaagctttcatcgagttgaacaggacttaaacgaatcatcagggaccggatatttcttatttctcatttggattcttaaccttgaatccaaagtgtctgcaatggacaacaattgaaggagtggcaaacttacttgtattgagagcacacgcaattcctactggtgaaattactgtttctgtttctaataaaatagaagggattccaaataaacacttgcacacatttttgaagtgcggctagattctcagattcacctttcttccagggaagataactttcaatctatataaaaatctctgtcctaaaactacctttctttattttgaagagacttactaacttacatataatctaaattagatgatagatttgtttttagcccttttgtttggtctatcagtataagaagaatattttaggtttatagctgaagttatcaaggtttaataaagtaaatttctaacagaatactagaaaaatgcagtataatttaattttttctaaataagaaacacaggaaatcaactactttttccccttccttatctccttaaaagaaaaataaaattgtacatgaga

SEQ ID NO: 15641 - DNA, 541 bp, Homo sapiens
  source 1..541: mol_type = unassigned DNA
agtcccgaacggccagggagaggaggtggcctagcgctggcggggctcaccccaatccgtctgccttttgatgccgtactgtaagctccgtccatctgtaggttcttgagccagaacctctgcgggaaggagaaaaactgctggttgcgcagccacctcgggatactgcacacggagaggagggaaaataagcgaggcaccgccgcaccacgcgggagacctacggagacccacagcgcccgagccctggaagagcactactggatgtcagcggagaaatggctttgagctcagcctggcgctcggttctgcctctgtggctcctctggagcgctgcctgctcccgcgccgcgtccggggacgacaacgcttttccttttgacattgaagggagctcagcggttggcaggcaagacccgcctgagacgagcgaaccccgcgtggctctgggacgcctgccgcctgcggccgagaaatgcaatgctggattctttcacaccctgtcgggagaatgtgtgccctgcgactgtaatggcaattc

SEQ ID NO: 15642 - DNA, 1061 bp, Homo sapiens
  source 1..1061: mol_type = unassigned DNA
gggagtggtgagaatgaatgtgagaaggaagccaggacagcgcagtccccagtcccgaacggccagggagaggaggtggcctagcgctggcggggctcaccccaatccgtctgccttttgatgccgtactctgctggttgcgcagccacctcgggatactgcacacggagaggagggaaaataagcgaggcaccgccgcaccacgcgggagacctacggagacccacagcgcccgagccctggaagagcactactggatgtcagcggagaaatggctttgagctcagcctggcgctcggttctgcctctgtggctcctctggagcgctgcctgctcccgcgccgcgtccggggacgacaacgcttttccttttgacattgaagggagctcagcggttggcaggcaagacccgcctgagacgagcgaaccccgcgtggctctgggacgcctgccgcctgcggccgaggtacagtgtccctgccattgccaccctgctggggcacctgcgcccccgcgggctgtgccacactcgtccttctctctctctccgcctctttcctctccccagtgccttgagagtttcacctgggctaggtcagttcggaaacttgaaataaagagttttcctttgtaagttgcatttggatgttgagagttgaaagttgaggcttcggaatgtgtctgctcaaaggggtgagagtgcatgtgttggtgctctgagttcatccgctagactctcaccggggactgcagcagcacatcggtgacttctgccacttgcgtgtcccagtagtcattttgtcaagccacggcacttaacgtgtgtgccctgtcactggcttcctgctcctctgtgctgttaggacagtgggaacactactgcaggatctttttgtctcatattagacaagaagtcttctgcagcagggaaggtgagggggtgagtgagagtggctggtcatgaaaggagctgttagacaactgctgagagggtatcttaagtagaaacgagccattgtattccagaaacaagatgtttccattaaaatcaagcctcagga

SEQ ID NO: 15643 - DNA, 776 bp, Homo sapiens
  source 1..776: mol_type = unassigned DNA
gcagtccccagtcccgaacggccagggagaggaggtggcctagcgctggcggggctcaccccaatccgtctgccttttgatgccgtactctgctggttgcgcagccacctcgggatactgcacacggagaggagggaaaataagcgaggcaccgccgcaccacgcgggagacctacggagacccacagcgcccgagccctggaagagcactactggatgtcagcggagaaatggctttgagctcagcctggcgctcggttctgcctctgtggctcctctggagcgctgcctgctcccgcgccgcgtccggggacgacaacgcttttccttttgacattgaagggagctcagcggttggcaggcaagacccgcctgagacgagcgaaccccgcgtggctctgggacgcctgccgcctgcggccgagaaatgcaatgctggattctttcacaccctgtcgggagaatgtgtgccctgcgactgtaatggcaattccaacgagtgtttggacggctcaggatactgtgtgcactgccagcggaacacaacaggagagcactgtgaaaagtgtctggatggttatatcggagattccatcaggggagcaccccaattctgccagccgtgcccctgtcccctgccccacttggccaattttgcagaatcctgctataggaaaaatggagctgttcggtgcatttgtaacgaaaattatgctggacctaactgtgaaaggccttctccacagagcacgagaggctttccactgaatgactcg

SEQ ID NO: 15644 - DNA, 672 bp, Homo sapiens
  source 1..672: mol_type = unassigned DNA
tgatctttgaagattgtgatgaagtcactggccagtgtaggaattgcttacgcaacaccaccggattcaagtgtgaacgttgcgctcctggctactatggggacgccaggatagccaagaactgtgcagtgtgcaactgcgggggaggcccatgtgacagtgtaaccggagaatgcttggaagaaggttttgaaccccctacaggcatggactgcccaaccataagctgtgataagtgcgtctgggacctgactgatgcactgcggttagcagcgctctccatcgaggaaggcaaatccggggtgctgagcgtatcctctggggccgccgctcataggcacgtgaatgaaatcaacgccaccatctacctcctcaaaacaaaattgtcagaaagagaaaaccaatacgccctaagaaagatacaaatcaacaatgctgagaacacgatgaaaagccttctgtctgacgtagaggaattagttgaaaagcactggaacaagccaagaagaagactggaattgcaggaaggagtataatgactcagaagacagtgtccattcagagagcccacagtttatgaagggactgatgaccacattgccgctgcacagtgggctctgtgactacaggagccttgctctgtagggaggggattacccttctccaataaaa

SEQ ID NO: 15645 - DNA, 6297 bp, Homo sapiens
  source 1..6297: mol_type = unassigned DNA
agaaggtaaaaagggagtggtgagaatgaatgtgagaaggaagccaggacagcgcagtccccagtcccgaacggccagggagaggaggtggcctagcgctggcggggctcaccccaatccgtctgccttttgatgccgtactctgctggttgcgcagccacctcgggatactgcacacggagaggagggaaaataagcgaggcaccgccgcaccacgcgggagacctacggagacccacagcgcccgagccctggaagagcactactggatgtcagcggagaaatggctttgagctcagcctggcgctcggttctgcctctgtggctcctctggagcgctgcctgctcccgcgccgcgtccggggacgacaacgcttttccttttgacattgaagggagctcagcggttggcaggcaagacccgcctgagacgagcgaaccccgcgtggctctgggacgcctgccgcctgcggccgagaaatgcaatgctggattctttcacaccctgtcgggagaatgtgtgccctgcgactgtaatggcaattccaacgagtgtttggacggctcaggatactgtgtgcactgccagcggaacacaacaggagagcactgtgaaaagtgtctggatggttatatcggagattccatcaggggagcaccccaattctgccagccgtgcccctgtcccctgccccacttggccaattttgcagaatcctgctataggaaaaatggagctgttcggtgcatttgtaacgaaaattatgctggacctaactgtgaaagatgtgctcccggttactatggaaaccccttactcattggaagcacctgtaagaaatgtgactgcagtggaaattcagatcccaacctgatctttgaagattgtgatgaagtcactggccagtgtaggaattgcttacgcaacaccaccggattcaagtgtgaacgttgcgctcctggctactatggggacgccaggatagccaagaactgtgcagtgtgcaactgcgggggaggcccatgtgacagtgtaaccggagaatgcttggaagaaggttttgaaccccctacaggctgtgataagtgcgtctgggacctgactgatgcactgcggttagcagcgctctccatcgaggaaggcaaatccggggtgctgagcgtatcctctggggccgccgctcataggcacgtgaatgaaatcaacgccaccatctacctcctcaaaacaaaattgtcagaaagagaaaaccaatacgccctaagaaagatacaaatcaacaatgctgagaacacgatgaaaagccttctgtctgacgtagaggaattagttgaaaaggaaaatcaagcctccagaaaaggacaacttgttcagaaggaaagcatggacaccattaaccacgcaagtcagctggtagagcaagcccatgatatgagggataaaatccaagagatcaacaacaagatgctctattatggggaagagcatgaacttagccccaaggaaatctctgagaagctggtgttggcccagaagatgcttgaagagattagaagccgtcaaccatttttcacccaacgggagctcgtggatgaggaggcagatgaggcttacgaactactgagccaggctgagagctggcagcggctgcacaatgagacccgcactctgtttcctgtcgtcctggagcagctggatgactacaatgctaagttgtcagatctccaggaagcacttgaccaggcccttaactatgtcagggatgccgaagacatgaacagggccacagcagccaggcagcgggaccatgagaaacaacaggaaagagtgagggaacaaatggaagtggtgaacatgtctctgagcacatctgcggactctctgacaacacctcgtctaactctttcagaacttgatgatataataaagaatgcgtcagggatttatgcagaaatagatggagccaaaagtgaactacaagtaaaactatctaacctaagtaacctcagccatgatttagtccaagaagctattgaccatgcacaggaccttcaacaagaagctaatgaattgagcaggaagttgcacagttcagatatgaacgggctggtacagaaggctttggatgcatcaaatgtctatgaaaatattgttaattatgttagtgaagccaatgaaacagcagaatttgctttgaacaccactgaccgaatttatgatgcggtgagtgggattgatactcaaatcatttaccataaagatgaaagtgagaacctcctcaatcaagccagagaactgcaagcaaaggcagagtctagcagtgatgaagcagtggctgacactagcaggcgtgtgggtggagccctagcaaggaaaagtgcccttaaaaccagactcagtgatgccgttaagcaactacaagcagcagagagaggggatgcccagcagcgcctggggcagtctagactgatcaccgaggaagccaacaggacgacgatggaggtgcagcaggccactgcccccatggccaacaatctaaccaactggtcacagaatcttcaacattttgactcttctgcttacaacactgcagtgaactctgctagggatgcagtaagaaatctgaccgaggttgtccctcagctcctggatcagcttcgtacggttgagcagaagcgacctgcaagcaacgtttctgccagcatccagaggatccgagagctcattgctcagaccagaagtgttgccagcaagatccaagtctccatgatgtttgatggccagtcagctgtggaagtgcactcgagaaccagtatggatgacttaaaggccttcacgtctctgagcctgtacatgaaaccccctgtgaagcggccggaactgaccgagactgcagatcagtttatcctgtacctcggaagcaaaaacgccaaaaaagagtatatgggtcttgcaatcaaaaatgataatctggtatacgtctataatttgggaactaaagatgtggagattcccctggactccaagcccgtcagttcctggcctgcttacttcagcattgtcaagattgaaagggtgggaaaacatggaaaggtgtttttaacagtcccgagtctaagtagcacagcagaggaaaagttcattaaaaagggggaattttcgggagatgactctctgctggacctggaccctgaggacacagtgttttatgttggtggagtgccttccaacttcaagctccctaccagcttaaacctgcctggctttgttggctgcctggaactggccactttgaataatgatgtgatcagcttgtacaactttaagcacatctataatatggacccctccacatcagtgccatgtgcccgagataagctggccttcactcagagtcgggctgccagttacttcttcgatggctccggttatgccgtggtgagagacatcacaaggagagggaaatttggtcaggtgactcgctttgacatagaagttcgaacaccagctgacaacggccttattctcctgatggtcaatggaagtatgtttttcagactggaaatgcgcaatggttacctacatgtgttctatgattttggattcagcggtggccctgtgcatcttgaagatacgttaaagaaagctcaaattaatgatgcaaaataccatgagatctcaatcatttaccacaatgataagaaaatgatcttggtagttgacagaaggcatgtcaagagcatggataatgaaaagatgaaaataccttttacagatatatacattggaggagctcctccagaaatcttacaatccagggccctcagagcacaccttcccctagatatcaacttcagaggatgcatgaagggcttccagttccaaaagaaggacttcaatttactggagcagacagaaaccctgggagttggttatggatgcccagaagactcacttatatctcgcagagcatatttcaatggacagagcttcattgcttcaattcagaaaatatctttctttgatggctttgaaggaggttttaatttccgaacattacaaccaaatgggttactattctattatgcttcagggtcagacgtgttctccatctcactggataatggtactgtcatcatggatgtaaagggaatcaaagttcagtcagtagataagcagtacaatgatgggctgtcccacttcgtcattagctctgtctcacccacaagatatgaactgatagtagataaaagcagagttgggagtaagaatcctaccaaagggaaaatagaacagacacaagcaagtgaaaagaagttttacttcggtggctcaccaatcagtgctcagtatgctaatttcactggctgcataagtaatgcctactttaccagggtggatagagatgtggaggttgaagatttccaacggtatactgaaaaggtccacacttctctttatgagtgtcccattgagtcttcaccattgtttctcctccataaaaaaggaaaaaatttatccaagcctaaagcaagtcagaataaaaagggagggaaaagtaaagatgcaccttcatgggatcctgttgctctgaaactcccagagcggaatactccaagaaactctcattgccacctttccaacagccctagagcaatagagcacgcctatcaatatggaggaacagccaacagccgccaagagtttgaacacttaaaaggagattttggtgccaaatctcagttttccattcgtctgagaactcgttcctcccatggcatgatcttctatgtctcagatcaagaagagaatgacttcatgactctatttttggcccatggccgcttggtttacatgtttaatgttggtcacaaaaaactgaagattagaagccaggagaaatacaatgatggcctgtggcatgatgtgatatttattcgagaaaggagcagtggccgactggtaattgatggtctccgagtcctagaagaaagtcttcctcctactgaagctacctggaaaatcaagggtcccatttatttgggaggtgtggctcctggaaaggctgtgaaaaatgttcagattaactccatctacagttttagtggctgtctcagcaatctccagctcaatggggcctccatcacctctgcttctcagacattcagtgtgaccccttgctttgaaggccccatggaaacaggaacttacttttcaacagaaggaggatacgtggttctagatgaatctttcaatattggattgaagtttgaaattgcatttgaagtccgtcccagaagcagttccggaaccctggtccacggccacagtgtcaatggggagtacctaaatgttcacatgaaaaatggacaggtcatagtgaaagtcaataatggcatcagagatttttccacctcagttacacccaagcagagtctctgtgatggcagatggcacagaattacagttattagagattctaatgtggttcagttggatgtggactctgaagtgaaccatgtggttggacccctgaatccaaaaccaattgatcacagggagcctgtgtttgttggaggtgttccagaatctctactgacaccacgcttggcccccagcaaacccttcacaggctgcatacgccactttgtgattgatggacacccagtgagcttcagtaaagcagccctggtcagcggcgccgtaagcatcaactcctgtccagcagcctgacatgacagagcacagctgcccaaatacaaagttctttagagcactgaaagaaacacaaagccagccaggaggaacagtaactcttccttcgggtggaagctttcatcgagttgaacaggacttaaacgaatcatcagggaccggatatttcttatttctcatttggattcttaaccttgaatccaaagtgtctgcaatggacaacaattgaaggagtggcaaacttacttgtattgagagcacacgcaattcctactggtgaaattactgtttctgtttctaataaaatagaagggattccaaataaacacttgcacacatttttgaagtgcggctagattctcagattcacctttcttccagggaagataactttcaatctatataaaaatctctgtcctaaaactacctttctttattttgaagagacttactaacttacatataatctaaattagatgatagatttgtttttagcccttttgtttggtctatcagtataagaagaatattttaggtttatagctgaagttatcaaggtttaataaagtaaatttctaaca

SEQ ID NO: 15646 - DNA, 5983 bp, Homo sapiens
  source 1..5983: mol_type = unassigned DNA
agtcccgaacggccagggagaggaggtggcctagcgctggcggggctcaccccaatccgtctgccttttgatgccgtactgtaagctccgtccatctgtaggttcttgagccagaacctctgcgggaaggagaaaaagtgaaagagggagagggagagggagagagagggggagaaggggagagagagagagggagagagaggctggaactctcccttactctcgcactttccctttatttcctaagctgctggttgcgcagccacctcgggatactgcacacggagaggagggaaaataagcgaggcaccgccgcaccacgcgggagacctacggagacccacagcgcccgagccctggaagagcactactggatgtcagcggagaaatggctttgagctcagcctggcgctcggttctgcctctgtggctcctctggagcgctgcctgctcccgcgccgcgtccggggacgacaacgcttttccttttgacattgaagggagctcagcggttggcaggcaagacccgcctgagacgagcgaaccccgcgtggctctgggacgcctgccgcctgcggccgagaaatgcaatgctggattctttcacaccctgtcgggagaatgtgtgccctgcgactgtaatggcaattccaacgagtgtttggacggctcaggatactgtgtgcactgccagcggaacacaacaggagagcactgtgaaaagtgtctggatggttatatcggagattccatcaggggagcaccccaattctgccagccgtgcccctgtcccctgccccacttggccaattttgcagaatcctgctataggaaaaatggagctgttcggtgcatttgtaacgaaaattatgctggacctaactgtgaaagatgtgctcccggttactatggaaaccccttactcattggaagcacctgtaagaaatgtgactgcagtggaaattcagatcccaacctgatctttgaagattgtgatgaagtcactggccagtgtaggaattgcttacgcaacaccaccggattcaagtgtgaacgttgcgctcctggctactatggggacgccaggatagccaagaactgtgcagtgtgcaactgcgggggaggcccatgtgacagtgtaaccggagaatgcttggaagaaggttttgaaccccctacaggctgtgataagtgcgtctgggacctgactgatgcactgcggttagcagcgctctccatcgaggaaggcaaatccggggtgctgagcgtatcctctggggccgccgctcataggcacgtgaatgaaatcaacgccaccatctacctcctcaaaacaaaattgtcagaaagagaaaaccaatacgccctaagaaagatacaaatcaacaatgctgagaacacgatgaaaagccttctgtctgacgtagaggaattagttgaaaaggaaaatcaagcctccagaaaaggacaacttgttcagaaggaaagcatggacaccattaaccacgcaagtcagctggtagagcaagcccatgatatgagggataaaatccaagagatcaacaacaagatgctctattatggggaagagcatgaacttagccccaaggaaatctctgagaagctggtgttggcccagaagatgcttgaagagattagaagccgtcaaccatttttcacccaacgggagctcgtggatgaggaggcagatgaggcttacgaactactgagccaggctgagagctggcagcggctgcacaatgagacccgcactctgtttcctgtcgtcctggagcagctggatgactacaatgctaagttgtcagatctccaggaagcacttgaccaggcccttaactatgtcagggatgccgaagacatgaacagggccacagcagccaggcagcgggaccatgagaaacaacaggaaagagtgagggaacaaatggaagtggtgaacatgtctctgagcacatctgcggactctctgacaacacctcgtctaactctttcagaacttgatgatataataaagaatgcgtcagggatttatgcagaaatagatggagccaaaagtgaactacaagtaaaactatctaacctaagtaacctcagccatgatttagtccaagaagctattgaccatgcacaggaccttcaacaagaagctaatgaattgagcaggaagttgcacagttcagatatgaacgggctggtacagaaggctttggatgcatcaaatgtctatgaaaatattgttaattatgttagtgaagccaatgaaacagcagaatttgctttgaacaccactgaccgaatttatgatgcggtgagtgggattgatactcaaatcatttaccataaagatgaaagtgagaacctcctcaatcaagccagagaactgcaagcaaaggcagagtctagcagtgatgaagcagtggctgacactagcaggcgtgtgggtggagccctagcaaggaaaagtgcccttaaaaccagactcagtgatgccgttaagcaactacaagcagcagagagaggggatgcccagcagcgcctggggcagtctagactgatcaccgaggaagccaacaggacgacgatggaggtgcagcaggccactgcccccatggccaacaatctaaccaactggtcacagaatcttcaacattttgactcttctgcttacaacactgcagtgaactctgctagggatgcagtaagaaatctgaccgaggttgtccctcagctcctggatcagcttcgtacggttgagcagaagcgacctgcaagcaacgtttctgccagcatccagaggatccgagagctcattgctcagaccagaagtgttgccagcaagatccaagtctccatgatgtttgatggccagtcagctgtggaagtgcactcgagaaccagtatggatgacttaaaggccttcacgtctctgagcctgtacatgaaaccccctgtgaagcggccggaactgaccgagactgcagatcagtttatcctgtacctcggaagcaaaaacgccaaaaaagagtatatgggtcttgcaatcaaaaatgataatctggtatacgtctataatttgggaactaaagatgtggagattcccctggactccaagcccgtcagttcctggcctgcttacttcagcattgtcaagattgaaagggtgggaaaacatggaaaggtgtttttaacagtcccgagtctaagtagcacagcagaggaaaagttcattaaaaagggggaattttcgggagatgactctctgctggacctggaccctgaggacacagtgttttatgttggtggagtgccttccaacttcaagctccctaccagcttaaacctgcctggctttgttggctgcctggaactggccactttgaataatgatgtgatcagcttgtacaactttaagcacatctataatatggacccctccacatcagtgccatgtgcccgagataagctggccttcactcagagtcgggctgccagttacttcttcgatggctccggttatgccgtggtgagagacatcacaaggagagggaaatttggtcaggtgactcgctttgacatagaagttcgaacaccagctgacaacggccttattctcctgatggtcaatggaagtatgtttttcagactggaaatgcgcaatggttacctacatgtgttctatgattttggattcagcggtggccctgtgcatcttgaagatacgttaaagaaagctcaaattaatgatgcaaaataccatgagatctcaatcatttaccacaatgataagaaaatgatcttggtagttgacagaaggcatgtcaagagcatggataatgaaaagatgaaaataccttttacagatatatacattggaggagctcctccagaaatcttacaatccagggccctcagagcacaccttcccctagatatcaacttcagaggatgcatgaagggcttccagttccaaaagaaggacttcaatttactggagcagacagaaaccctgggagttggttatggatgcccagaagactcacttatatctcgcagagcatatttcaatggacagagcttcattgcttcaattcagaaaatatctttctttgatggctttgaaggaggttttaatttccgaacattacaaccaaatgggttactattctattatgcttcagggtcagacgtgttctccatctcactggataatggtactgtcatcatggatgtaaagggaatcaaagttcagtcagtagataagcagtacaatgatgggctgtcccacttcgtcattagctctgtctcacccacaagatatgaactgatagtagataaaagcagagttgggagtaagaatcctaccaaagggaaaatagaacagacacaagcaagtgaaaagaagttttacttcggtggctcaccaatcagtgctcagtatgctaatttcactggctgcataagtaatgcctactttaccagggtggatagagatgtggaggttgaagatttccaacggtatactgaaaaggtccacacttctctttatgagtgtcccattgagtcttcaccattgtttctcctccataaaaaaggaaaaaatttatccaagcctaaagcaagtcagaataaaaagggagggaaaagtaaagatgcaccttcatgggatcctgttgctctgaaactcccagagcggaatactccaagaaactctcattgccacctttccaacagccctagagcaatagagcacgcctatcaatatggaggaacagccaacagccgccaagagtttgaacacttaaaaggagattttggtgccaaatctcagttttccattcgtctgagaactcgttcctcccatggcatgatcttctatgtctcagatcaagaagagaatgacttcatgactctatttttggcccatggccgcttggtttacatgtttaatgttggtcacaaaaaactgaagattagaagccaggagaaatacaatgatggcctgtggcatgatgtgatatttattcgagaaaggagcagtggccgactggtaattgatggtctccgagtcctagaagaaagtcttcctcctactgaagctacctggaaaatcaagggtcccatttatttgggaggtgtggctcctggaaaggctgtgaaaaatgttcagattaactccatctacagttttagtggctgtctcagcaatctccagctcaatggggcctccatcacctctgcttctcagacattcagtgtgaccccttgctttgaaggccccatggaaacaggaacttacttttcaacagaaggaggatacgtggttctagatgaatctttcaatattggattgaagtttgaaattgcatttgaagtccgtcccagaagcagttccggaaccctggtccacggccacagtgtcaatggggagtacctaaatgttcacatgaaaaatggacaggtcatagtgaaagtcaataatggcatcagagatttttccacctcagttacacccaagcagagtctctgtgatggcagatggcacagaattacagttattagagattctaatgtggttcagttggatgtggactctgaagtgaaccatgtggttggacccctgaatccaaaaccaattgatcacagggagcctgtgtttgttggaggtgttccagaatctctactgacaccacgcttggcccccagcaaacccttcacaggctgcatacgccactttgtgattgatggacacccagtgagcttcagtaaagcagccctggtcagcggcgccgtaagcatcaactcctgtccagcagcctgacatgacagagcacagctgcccaaatacaaagttctttagagcactgaaagaaacacaaagccagccaggaggaacagtaactcttccttcgggtggaagctttcatcgagttgaacaggacttaaacgaatcatcagggaccgg

SEQ ID NO: 15647 - DNA, 1080 bp, Homo sapiens
  source 1..1080: mol_type = unassigned DNA
aatgtgagaaggaagccaggacagcgcagtccccagtcccgaacggccagggagaggaggtggcctagcgctggcggggctcaccccaatccgtctgccttttgatgccgtactctgctggttgcgcagccacctcgggatactgcacacggagaggagggaaaataagcgaggcaccgccgcaccacgcgggagacctacggagacccacagcgcccgagccctggaagagcactactggatgtcagcggagaaatggctttgagctcagcctggcgctcggttctgcctctgtggctcctctggagcgctgcctgctcccgcgccgcgtccggggacgacaacgcttttccttttgacattgaagggagctcagcggttggcaggcaagacccgcctgagacgagcgaaccccgcgtggctctgggacgcctgccgcctgcggccgagaaatgcaatgctggattctttcacaccctgtcgggagaatgtgtgccctgcgactgtaatggcaattccaacgagtgtttggacggctcaggatactgtgtgactactgacggagaagacccaggtttttcagcttctgccctatcgttcattctcagctctcagggagccagagaagccagggctccaacatgaacacttcttgtagctcactgtcatgaccagtgtttcagtcagttcttgcaggttgcctgacttacctcatttctctcatttcctgtaagcaaccaaaaataaaaggctttcttttatttcattttgtcttattttgcttttatcttgaaggcatataagacctctgtatctgccttgttcaccttcaactgcttctaattcttcctcaattccagtgtccaatgtcaatttgaaattaaaatttacagactgattttaactaagctgttggtaaagctgacctaagccattcagccacaaaatatagagtatacaaaattatgctaccattttacacatatcaagcaagcaaagagatttttttttactggtggaacactaatctttcaaatatagaatagtggctaaatgaaaataaaacagcttagaaatcta

SEQ ID NO: 15648 - DNA, 645 bp, Homo sapiens
  source 1..645: mol_type = unassigned DNA
agaatgaatgtgagaaggaagccaggacagcgcagtccccagtcccgaacggccagggagaggaggtggcctagcgctggcggggctcaccccaatccgtctgccttttgatgccgtactgtaagctccgtccatctctgctggttgcgcagccacctcgggatactgcacacggagaggagggaaaataagcgaggcaccgccgcaccacgcgggagacctacggagacccacagcgcccgagccctggaagagcactactggatgtcagcggagaaatggctttgagctcagcctggcgctcggttctgcctctgtggctcctctggagcgctgcctgctcccgcgccgcgtccggggacgacaacgcttttccttttgacattgaagggagctcagcggttggcaggcaagacccgcctgagacgagcgaaccccgcgtggctctgggacgcctgccgcctgcggccgaggtacagtgtccctgccattgccaccctgctggggcacctgcgcccccgcgggctgtgccacactcgtccttctctctctctccgcctctttcctctccccagtgccttgagagtttcacctgggctaggtcagttcggaaacttgaaataaagagttttcctttgtaagttg

SEQ ID NO: 15649 - DNA, 1346 bp, Homo sapiens
  source 1..1346: mol_type = unassigned DNA
agtcccgaacggccagggagaggaggtggcctagcgctggcggggctcaccccaatccgtctgccttttgatgccgtactctgctggttgcgcagccacctcgggatactgcacacggagaggagggaaaataagcgaggcaccgccgcaccacgcgggagacctacggagacccacagcgcccgagccctggaagagcactactggatgtcagcggagaaatggctttgagctcagcctggcgctcggttctgcctctgtggctcctctggagcgctgcctgctcccgcgccgcgtccggggacgacaacgcttttccttttgacattgaagggagctcagcggttggcaggcaagacccgcctgagacgagcgaaccccgcgtggctctgggacgcctgccgcctgcggccgagaaatgcaatgctggattctttcacaccctgtcgggagaatgtgtgccctgcgactgtaatggcaattccaacgagtgtttggacggctcaggatactgtgtgcactgccagcggaacacaacaggagagcactgtgaaaagtgtctggatggttatatcggagattccatcaggggagcaccccaattctgccagccgtgcccctgtcccctgccccacttggccaattttgcagaatcctgctataggaaaaatggagctgttcggtgcatttgtaacgaaaattatgctggacctaactgtgaaagatgtgctcccggttactatggaaaccccttactcattggaagcacctgtaagaaatgtgactgcagtggaaattcagatcccaacctgatctttgaagattgtgatgaagtcactggccagtgtaggaattgcttacgcaacaccaccggattcaagtgtgaacgttgcgctcctggctactatggggacgccaggatagccaagaactgtgcagtgtgcaactgcgggggaggcccatgtgacagtgtaaccggagaatgcttggaagaaggttttgaaccccctacaggcatggactgcccaaccataagctgtgataagtgcgtctgggacctgactgatgcactgcggttagcagcgctctccatcgaggaaggcaaatccggggtgctgagcgtatcctctggggccgccgctcataggcacgtgaatgaaatcaacgccaccatctacctcctcaaaacaaaattgtcagaaagagaaaaccaatacgccctaagaaagatacaaatcaacaatgctgagaacacgatgaaaagccttctgtctgacgtagaggaattagttgaaaagcactggaacaagccaagaagaagactggaattgcaggaaggagtataa

SEQ ID NO: 15650 - DNA, 554 bp, Homo sapiens
  source 1..554: mol_type = unassigned DNA
gacctcagtgtctgaaaagccagcttagagtgggagggcctgggagtagaagctgctggttgcgcagccacctcgggatactgcacacggagaggagggaaaataagcgaggcaccgccgcaccacgcgggagacctacggagacccacagcgcccgagccctggaagagcactactggatgtcagcggagaaatggctttgagctcagcctggcgctcggttctgcctctgtggctcctctggagcgctgcctgctcccgcgccgcgtccggggacgacaacgcttttccttttgacattgaagggagctcagcggttggcaggcaagacccgcctgagacgagcgaaccccgcgtggctctgggacgcctgccgcctgcggccgaggtacagtgtccctgccattgccaccctgctggggcacctgcgcccccgcgggctgtgccacactcgtccttctctctctctccgcctctttcctctccccagtgccttgagagtttcacctgggctaggtcagttcggaaacttgaaataaagagttttcctttgt

SEQ ID NO: 15651 - DNA, 588 bp, Homo sapiens
  source 1..588: mol_type = unassigned DNA
aaaagctgaatattcttctggagcccttggaggggctccaaactgagaggggagggaagaccgcagggaaaggcggacctcagtgtctgaaaagccagcttagagtgggagggcctgggagtagaagctgctggttgcgcagccacctcgggatactgcacacggagaggagggaaaataagcgaggcaccgccgcaccacgcgggagacctacggagacccacagcgcccgagccctggaagagcactactggatgtcagcggagaaatggctttgagctcagcctggcgctcggttctgcctctgtggctcctctggagcgctgcctgctcccgcgccgcgtccggggacgacaacgcttttccttttgacattgaagggagctcagcggttggcaggcaagacccgcctgagacgagcgaaccccgcgtggctctgggacgcctgccgcctgcggccgagaaatgcaatgctggattctttcacaccctgtcgggagaatgtgtgccctgcgactgtaatggcaattccaacgagtgtttggacggctcaggatactgtgtgcactgccagcggaacacaacagg

SEQ ID NO: 15652 - DNA, 1330 bp, Homo sapiens
  source 1..1330: mol_type = unassigned DNA
aatccgtctgccttttgatgccgtactgtaagctccgtccatctgtaggttcttgagccagaacctctgcgggaaggagaaaaagtgaaagagggagagggagagggagagagagggggagaaggggagagagagagagggagagagaggctggaactctcccttactctcgcactttccctttatttcctaagctgctggttgcgcagccacctcgggatactgcacacggagaggagggaaaataagcgaggcaccgccgcaccacgcgggagacctacggagacccacagcgcccgagccctggaagagcactactggatgtcagcggagaaatggctttgagctcagcctggcgctcggttctgcctctgtggctcctctggagcgctgcctgctcccgcgccgcgtccggggacgacaacgcttttccttttgacattgaagggagctcagcggttggcaggcaagacccgcctgagacgagcgaaccccgcgtggctctgggacgcctgccgcctgcggccgagaaatgcaatgctggattctttcacaccctgtcgggagaatgtgtgccctgcgactgtaatggcaattccaacgagtgtttggacggctcaggatactgtgtgcactgccagcggaacacaacaggagagcactgtgaaaagtgtctggatggttatatcggagattccatcaggggagcaccccaattctgccagccgtgcccctgtcccctgccccacttggccaattttgcagaatcctgctataggaaaaatggagctgttcggtgcatttgtaacgaaaattatgctggacctaactgtgaaagatgtgctcccggttactatggaaaccccttactcattggaagcacctgtaagaaatgtgactgcagtggaaattcagatcccaacctgatctttgaagattgtgatgaagtcactggccagtgtaggaattgcttacgcaacaccaccggattcaagtgtgaacgttgcgctcctggctactatggggacgccaggatagccaagaactgtgcagtgtgcaactgcgggggaggcccatgtgacagtgtaaccggagaatgcttggaagaaggttttgaaccccctacaggcatggactgcccaaccataagctgtgataagtgcgtctgggacctgactgatgcactgcggttagcagcgctctccatcgaggaaggcaaatccggggtgctgagcgtatcctctggggccgccgctcataggcacgtgaatgaaatcaacgccaccatctacctcctcaaaacaaaattgtcagaaagagaaaaccaata

SEQ ID NO: 15653 - DNA, 539 bp, Homo sapiens
  source 1..539: mol_type = unassigned DNA
gtctatcccccagaaaaaacccgagaaaccttgctcaagaaagtgggcaccctgaccctctgccttcagagatcatctacctttggttcctgccctggaatcccttttccacccactttcctgcaaactagcgggggccacataaaatatctatctgctggttgcgcagccacctcgggatactgcacacggagaggagggaaaataagcgaggcaccgccgcaccacgcgggagacctacggagacccacagcgcccgagccctggaagagcactactggatgtcagcggagaaatggctttgagctcagcctggcgctcggttctgcctctgtggctcctctggagcgctgcctgctcccgcgccgcgtccggggacgacaacgcttttccttttgacattgaagggagctcagcggttggcaggcaagacccgcctgagacgagcgaaccccgcgtggctctgggacgcctgccgcctgcggccgagaaatgcaatgctggattctttcacaccctgtcgggagaatgtgtgccct

SEQ ID NO: 15654 - DNA, 6438 bp, Homo sapiens
  source 1..6438: mol_type = unassigned DNA
ttcttctggagcccttggaggggctccaaactgagaggggagggaagaccgcagggaaaggcggacctcagtgtctgaaaagccagcttagagtgggagggcctgggagtagaaggtaaaaagggagtggtgagaatgaatgtgagaaggaagccaggacagcgcagtccccagtcccgaacggccagggagaggaggtggcctagcgctggcggggctcaccccaatccgtctgccttttgatgccgtactgtaagctccgtccatctctgctggttgcgcagccacctcgggatactgcacacggagaggagggaaaataagcgaggcaccgccgcaccacgcgggagacctacggagacccacagcgcccgagccctggaagagcactactggatgtcagcggagaaatggctttgagctcagcctggcgctcggttctgcctctgtggctcctctggagcgctgcctgctcccgcgccgcgtccggggacgacaacgcttttccttttgacattgaagggagctcagcggttggcaggcaagacccgcctgagacgagcgaaccccgcgtggctctgggacgcctgccgcctgcggccgagaaatgcaatgctggattctttcacaccctgtcgggagaatgtgtgccctgcgactgtaatggcaattccaacgagtgtttggacggctcaggatactgtgtgcactgccagcggaacacaacaggagagcactgtgaaaagtgtctggatggttatatcggagattccatcaggggagcaccccaattctgccagccgtgcccctgtcccctgccccacttggccaattttgcagaatcctgctataggaaaaatggagctgttcggtgcatttgtaacgaaaattatgctggacctaactgtgaaagatgtgctcccggttactatggaaaccccttactcattggaagcacctgtaagaaatgtgactgcagtggaaattcagatcccaacctgatctttgaagattgtgatgaagtcactggccagtgtaggaattgcttacgcaacaccaccggattcaagtgtgaacgttgcgctcctggctactatggggacgccaggatagccaagaactgtgcagtgtgcaactgcgggggaggcccatgtgacagtgtaaccggagaatgcttggaagaaggttttgaaccccctacaggctgtgataagtgcgtctgggacctgactgatgcactgcggttagcagcgctctccatcgaggaaggcaaatccggggtgctgagcgtatcctctggggccgccgctcataggcacgtgaatgaaatcaacgccaccatctacctcctcaaaacaaaattgtcagaaagagaaaaccaatacgccctaagaaagatacaaatcaacaatgctgagaacacgatgaaaagccttctgtctgacgtagaggaattagttgaaaaggaaaatcaagcctccagaaaaggacaacttgttcagaaggaaagcatggacaccattaaccacgcaagtcagctggtagagcaagcccatgatatgagggataaaatccaagagatcaacaacaagatgctctattatggggaagagcatgaacttagccccaaggaaatctctgagaagctggtgttggcccagaagatgcttgaagagattagaagccgtcaaccatttttcacccaacgggagctcgtggatgaggaggcagatgaggcttacgaactactgagccaggctgagagctggcagcggctgcacaatgagacccgcactctgtttcctgtcgtcctggagcagctggatgactacaatgctaagttgtcagatctccaggaagcacttgaccaggcccttaactatgtcagggatgccgaagacatgaacagggccacagcagccaggcagcgggaccatgagaaacaacaggaaagagtgagggaacaaatggaagtggtgaacatgtctctgagcacatctgcggactctctgacaacacctcgtctaactctttcagaacttgatgatataataaagaatgcgtcagggatttatgcagaaatagatggagccaaaagtgaactacaagtaaaactatctaacctaagtaacctcagccatgatttagtccaagaagctattgaccatgcacaggaccttcaacaagaagctaatgaattgagcaggaagttgcacagttcagatatgaacgggctggtacagaaggctttggatgcatcaaatgtctatgaaaatattgttaattatgttagtgaagccaatgaaacagcagaatttgctttgaacaccactgaccgaatttatgatgcggtgagtgggattgatactcaaatcatttaccataaagatgaaagtgagaacctcctcaatcaagccagagaactgcaagcaaaggcagagtctagcagtgatgaagcagtggctgacactagcaggcgtgtgggtggagccctagcaaggaaaagtgcccttaaaaccagactcagtgatgccgttaagcaactacaagcagcagagagaggggatgcccagcagcgcctggggcagtctagactgatcaccgaggaagccaacaggacgacgatggaggtgcagcaggccactgcccccatggccaacaatctaaccaactggtcacagaatcttcaacattttgactcttctgcttacaacactgcagtgaactctgctagggatgcagtaagaaatctgaccgaggttgtccctcagctcctggatcagcttcgtacggttgagcagaagcgacctgcaagcaacgtttctgccagcatccagaggatccgagagctcattgctcagaccagaagtgttgccagcaagatccaagtctccatgatgtttgatggccagtcagctgtggaagtgcactcgagaaccagtatggatgacttaaaggccttcacgtctctgagcctgtacatgaaaccccctgtgaagcggccggaactgaccgagactgcagatcagtttatcctgtacctcggaagcaaaaacgccaaaaaagagtatatgggtcttgcaatcaaaaatgataatctggtatacgtctataatttgggaactaaagatgtggagattcccctggactccaagcccgtcagttcctggcctgcttacttcagcattgtcaagattgaaagggtgggaaaacatggaaaggtgtttttaacagtcccgagtctaagtagcacagcagaggaaaagttcattaaaaagggggaattttcgggagatgactctctgctggacctggaccctgaggacacagtgttttatgttggtggagtgccttccaacttcaagctccctaccagcttaaacctgcctggctttgttggctgcctggaactggccactttgaataatgatgtgatcagcttgtacaactttaagcacatctataatatggacccctccacatcagtgccatgtgcccgagataagctggccttcactcagagtcgggctgccagttacttcttcgatggctccggttatgccgtggtgagagacatcacaaggagagggaaatttggtcaggtgactcgctttgacatagaagttcgaacaccagctgacaacggccttattctcctgatggtcaatggaagtatgtttttcagactggaaatgcgcaatggttacctacatgtgttctatgattttggattcagcggtggccctgtgcatcttgaagatacgttaaagaaagctcaaattaatgatgcaaaataccatgagatctcaatcatttaccacaatgataagaaaatgatcttggtagttgacagaaggcatgtcaagagcatggataatgaaaagatgaaaataccttttacagatatatacattggaggagctcctccagaaatcttacaatccagggccctcagagcacaccttcccctagatatcaacttcagaggatgcatgaagggcttccagttccaaaagaaggacttcaatttactggagcagacagaaaccctgggagttggttatggatgcccagaagactcacttatatctcgcagagcatatttcaatggacagagcttcattgcttcaattcagaaaatatctttctttgatggctttgaaggaggttttaatttccgaacattacaaccaaatgggttactattctattatgcttcagggtcagacgtgttctccatctcactggataatggtactgtcatcatggatgtaaagggaatcaaagttcagtcagtagataagcagtacaatgatgggctgtcccacttcgtcattagctctgtctcacccacaagatatgaactgatagtagataaaagcagagttgggagtaagaatcctaccaaagggaaaatagaacagacacaagcaagtgaaaagaagttttacttcggtggctcaccaatcagtgctcagtatgctaatttcactggctgcataagtaatgcctactttaccagggtggatagagatgtggaggttgaagatttccaacggtatactgaaaaggtccacacttctctttatgagtgtcccattgagtcttcaccattgtttctcctccataaaaaaggaaaaaatttatccaagcctaaagcaagtcagaataaaaagggagggaaaagtaaagatgcaccttcatgggatcctgttgctctgaaactcccagagcggaatactccaagaaactctcattgccacctttccaacagccctagagcaatagagcacgcctatcaatatggaggaacagccaacagccgccaagagtttgaacacttaaaaggagattttggtgccaaatctcagttttccattcgtctgagaactcgttcctcccatggcatgatcttctatgtctcagatcaagaagagaatgacttcatgactctatttttggcccatggccgcttggtttacatgtttaatgttggtcacaaaaaactgaagattagaagccaggagaaatacaatgatggcctgtggcatgatgtgatatttattcgagaaaggagcagtggccgactggtaattgatggtctccgagtcctagaagaaagtcttcctcctactgaagctacctggaaaatcaagggtcccatttatttgggaggtgtggctcctggaaaggctgtgaaaaatgttcagattaactccatctacagttttagtggctgtctcagcaatctccagctcaatggggcctccatcacctctgcttctcagacattcagtgtgaccccttgctttgaaggccccatggaaacaggaacttacttttcaacagaaggaggatacgtggttctagatgaatctttcaatattggattgaagtttgaaattgcatttgaagtccgtcccagaagcagttccggaaccctggtccacggccacagtgtcaatggggagtacctaaatgttcacatgaaaaatggacaggtcatagtgaaagtcaataatggcatcagagatttttccacctcagttacacccaagcagagtctctgtgatggcagatggcacagaattacagttattagagattctaatgtggttcagttggatgtggactctgaagtgaaccatgtggttggacccctgaatccaaaaccaattgatcacagggagcctgtgtttgttggaggtgttccagaatctctactgacaccacgcttggcccccagcaaacccttcacaggctgcatacgccactttgtgattgatggacacccagtgagcttcagtaaagcagccctggtcagcggcgccgtaagcatcaactcctgtccagcagcctgacatgacagagcacagctgcccaaatacaaagttctttagagcactgaaagaaacacaaagccagccaggaggaacagtaactcttccttcgggtggaagctttcatcgagttgaacaggacttaaacgaatcatcagggaccggatatttcttatttctcatttggattcttaaccttgaatccaaagtgtctgcaatggacaacaattgaaggagtggcaaacttacttgtattgagagcacacgcaattcctactggtgaaattactgtttctgtttctaataaaatagaagggattccaaataaacacttgcacacatttttgaagtgcggctagattctcagattcacctttcttccagggaagataactttcaatctatataaaaatctctgtcctaaaactacctttctttattttgaagagacttactaacttacatataatctaaattagatgatagatttgtttttagcccttttgtttggtctatcagtataagaagaatattttaggtttatagctgaagttatcaaggtttaataaagtaaatttctaacagaatactagaaaaa

SEQ ID NO: 15655 - DNA, 1284 bp, Homo sapiens
  source 1..1284: mol_type = unassigned DNA
agcttagagtgggagggcctgggagtagaaggtaaaaagggagtggtgagaatgaatgtgagaaggaagccaggacagcgcagtccccagtcccgaacggccagggagaggaggtggcctagcgctggcggggctcaccccaatccgtctgccttttgatgccgtactctgctggttgcgcagccacctcgggatactgcacacggagaggagggaaaataagcgaggcaccgccgcaccacgcgggagacctacggagacccacagcgcccgagccctggaagagcactactggatgtcagcggagaaatggctttgagctcagcctggcgctcggttctgcctctgtggctcctctggagcgctgcctgctcccgcgccgcgtccggggacgacaacgcttttccttttgacattgaagggagctcagcggttggcaggcaagacccgcctgagacgagcgaaccccgcgtggctctgggacgcctgccgcctgcggccgagaaatgcaatgctggattctttcacaccctgtcgggagaatgtgtgccctgcgactgtaatggcaattccaacgagtgtttggacggctcaggatactgtgtgcactgccagcggaacacaacaggagagcactgtgaaaagtgtctggatggttatatcggagattccatcaggggagcaccccaattctgccagccgtgcccctgtcccctgccccacttggccaattttgcagaatcctgctataggaaaaatggagctgttcggtgcatttgtaacgaaaattatgctggacctaactgtgaaagatgtgctcccggttactatggaaaccccttactcattggaagcacctgtaagaaatgtgactgcagtggaaattcagatcccaacctgatctttgaagattgtgatgaagtcactggccagtgtaggaattgcttacgcaacaccaccggattcaagtgtgaacgttgcgctcctggctactatggggacgccaggatagccaagaactgtgcagtgtgcaactgcgggggaggcccatgtgacagtgtaaccggagaatgcttggaagaaggttttgaaccccctacaggctgtgataagtgcgtctgggacctgactgatgcactgcggttagcagcgctctccatcgaggaaggcaaatccggggtgctgagcgtatcctctggggccgccgctcataggcacgtgaatgaaatcaacgccaccatctacctcctcaaaaaaactaaacaaaaaaacaataaaaaataa

SEQ ID NO: 15656 - DNA, 11426 bp, Homo sapiens
  source 1..11426: mol_type = unassigned DNA
agacccgccgggctcccgccgcgcgcgctgtccctggagctcggggacgcggcccggagccgggaagatggcgaagcggctctgcgcggggagcgcactgtgtgttcgcggcccccggggccccgcgccgctgctgctggtcgggctggcgctgctgggcgcggcgcgggcgcgggaggaggcgggcggcggcttcagcctgcacccgccctacttcaacctggccgagggcgcccgcatcgccgcctccgcgacctgcggagaggaggccccggcgcgcggctccccgcgccccaccgaggacctttactgcaagctggtagggggccccgtggccggcggcgaccccaaccagaccatccggggccagtactgtgacatctgcacggctgccaacagcaacaaggcacaccccgcgagcaatgccatcgatggcacggagcgctggtggcagagtccaccgctgtcccgcggcctggagtacaacgaggtcaacgtcaccctggacctgggccaggtcttccacgtggcctacgtcctcatcaagtttgccaactcaccccggccggacctctgggtgctggagcggtccatggacttcggccgcacctaccagccctggcagttctttgcctcctccaagagggactgtctggagcggttcgggccacagacgctggagcgcatcacacgggacgacgcggccatctgcaccaccgagtactcacgcatcgtgcccctggagaacggagagatcgtggtgtccctggtgaacggacgtccgggcgccatgaatttctcctactcgccgctgctacgtgagttcaccaaggccaccaacgtccgcctgcgcttcctgcgtaccaacacgctgctgggccatctcatggggaaggcgctgcgggaccccacggtcacccgccggtattattacagcatcaaggatatcagcatcggaggccgctgtgtctgccacggccacgcggatgcctgcgatgccaaagaccccacggacccgttcaggctgcagtgcacctgccagcacaacacctgcgggggcacctgcgaccgctgctgccccggcttcaatcagcagccgtggaagcctgcgactgccaacagtgccaacgagtgccagtcctgtaactgctacggccatgccaccgactgttactacgaccctgaggtggaccggcgccgcgccagccagagcctggatggcacctatcagggtgggggtgtctgtatcgactgccagcaccacaccaccggcgtcaactgtgagcgctgcctgcccggcttctaccgctctcccaaccaccctctcgactcgccccacgtctgccgccgctgcaactgcgagtccgacttcacggatggcacctgcgaggacctgacgggtcgatgctactgccggcccaacttctctggggagcggtgtgacgtgtgtgccgagggcttcacgggcttcccaagctgctacccgacgccctcgtcctccaatgacaccagggagcaggtgctgccagccggccagattgtgaattgtgactgcagcgcggcagggacccagggcaacgcctgccggaaggacccaagggtgggacgctgtctgtgcaaacccaacttccaaggcacccattgtgagctctgcgcgccagggttctacggccccggctgccagccctgccagtgttccagccctggagtggccgatgaccgctgtgaccctgacacaggccagtgcaggtgccgagtgggcttcgagggggccacatgtgatcgctgtgcccccggctactttcacttccctctctgccagttgtgtggctgcagccctgcaggaaccttgcccgagggctgcgatgaggccggccgctgcctatgccagcctgagtttgctggacctcattgtgaccggtgccgccctggctaccatggtttccccaactgccaagcatgcacctgcgaccctcggggagccctggaccagctctgtggggcgggaggtttgtgccgctgccgccccggctacacaggcactgcctgccaggaatgcagccccggctttcacggcttccccagctgtgtcccctgccactgctctgctgaaggctccctgcacgcagcctgtgacccccggagtgggcagtgcagctgccggccccgtgtgacggggctgcggtgtgacacatgtgtgcccggtgcctacaacttcccctactgcgaagctggctcttgccaccctgccggtctggccccagtggatcctgcccttcctgaggcacaggttccctgtatgtgccgggctcacgtggaggggccgagctgtgaccgctgcaaacctgggttctggggactgagccccagcaaccccgagggctgtacccgctgcagctgcgacctcaggggcacactgggtggagttgctgagtgccagccgggcaccggccagtgcttctgcaagccccacgtgtgcggccaggcctgcgcgtcctgcaaggatggcttctttggactggatcaggctgactattttggctgccgcagctgccggtgtgacattggcggtgcactgggccagagctgtgaaccgaggacgggcgtctgccggtgccgccccaacacccagggccccacctgcagcgagcctgcgagggaccactacctcccggacctgcaccacctgcgcctggagctggaggaggctgccacacctgagggtcacgccgtgcgctttggcttcaaccccctcgagttcgagaacttcagctggaggggctacgcgcagatggcacctgtccagcccaggatcgtggccaggctgaacctgacctcccctgaccttttctggctcgtcttccgatacgtcaaccggggggccatgagtgtgagcgggcgggtctctgtgcgagaggagggcaggtcggccacctgcgccaactgcacagcacagagtcagcccgtggccttcccacccagcacggagcctgccttcatcaccgtgccccagaggggcttcggagagccctttgtgctgaaccctggcacctgggccctgcgtgtggaggccgaaggggtgctcctggactacgtggttctgctgcctagcgcatactacgaggcggcgctcctgcagctgcgggtgactgaggcctgcacataccgtccctctgcccagcagtctggcgacaactgcctcctctacacacacctccccctggatggcttcccctcggccgccgggctggaggccctgtgtcgccaggacaacagcctgccccggccctgccccacggagcagctcagcccgtcgcacccgccactgatcacctgcacgggcagtgatgtggacgtccagcttcaagtggcagtgccacagccaggccgctatgccctagtggtggagtacgccaatgaggatgcccgccaggaggtgggcgtggccgtgcacaccccacagcgggccccccagcaggggctgctctccctgcacccctgcctgtacagcaccctgtgccggggcactgcccgggatacccaggaccacctggctgtcttccacctggactcggaggccagcgtgaggctcacagccgaacaggcacgcttcttcctgcacggggtcactctggtgcccattgaggagttcagcccggagttcgtggagccccgggtcagctgcatcagcagccacggcgcctttggccccaacagtgccgcctgtctgccctcgcgcttcccaaagccgccccagcccatcatcctcagggactgccaggtgatcccgctgccgcccggcctcccgctgacccacgcgcaggatctcactccagccatgtccccagctggaccccgacctcggccccccaccgctgtggaccctgatgcagagcccaccctgctgcgtgagccccaggccaccgtggtcttcaccacccatgtgcccacgctgggccgctatgccttcctgctgcacggctaccagccagcccaccccaccttccccgtggaagtcctcatcaacgccggccgcgtgtggcagggccacgccaacgccagcttctgtccacatggctacggctgccgcaccctggtggtgtgtgagggccaggccctgctggacgtgacccacagcgagctcactgtgaccgtgcgtgtgcccaagggccggtggctctggctggattatgtactcgtggtccctgagaacgtctacagctttggctacctccgggaggagcccctggataaatcctatgacttcatcagccactgcgcagcccagggctaccacatcagccccagcagctcatccctgttctgccgaaacgctgctgcttccctctccctcttctataacaacggagcccgtccatgtggctgccacgaagtaggtgctacaggccccacgtgtgagcccttcgggggccagtgtccctgccatgcccatgtcattggccgtgactgctcccgctgtgccaccggatactggggcttccccaactgcaggccctgtgactgcggtgcccgcctctgtgacgagctcacgggccagtgcatctgcccgccacgcaccatcccgcccgactgcctgctgtgccagccccagacctttggctgccaccccctggtcggctgtgaggagtgtaactgctcagggcccggcatccaggagctcacagaccctacctgtgacacagacagcggccagtgcaagtgcagacccaacgtgactgggcgccgctgtgatacctgctctccgggcttccatggctacccccgctgccgcccctgtgactgtcacgaggcgggcactgcgcctggcgtgtgtgaccccctcacagggcagtgctactgtaaggagaacgtgcagggccccaaatgtgaccagtgcagccttgggaccttctcactggatgctgccaaccccaaaggttgcacccgctgcttctgctttggggccacggagcgctgccggagctcgtcctacacccgccaggagttcgtggatatggagggatgggtgctgctgagcactgaccggcaggtggtgccccacgagcggcagccagggacggagatgctccgtgcagacctgcggcacgtgcctgaggctgtgcccgaggctttccccgagctgtactggcaggccccaccctcctacctgggggaccgggtgtcatcctacggtgggaccctccgttatgaactgcactcagagacccagcggggagatgtctttgtccccatggagagcaggccggatgtggtgctgcagggcaaccagatgagcatcacattcctggagccggcataccccacgcctggccacgttcaccgtgggcagctgcagctggtggaggggaacttccggcatacggagacgcgcaacactgtgtcccgcgaggagctcatgatggtgctggccagcctggagcagctgcagatccgtgccctcttctcacagatctcctcggctgtcttcctgcgcagggtggcactggaggtggccagcccagcaggccagggggccctggccagcaatgtggagctgtgcctgtgccccgccagctaccggggggactcatgccaggaatgtgcccccggcttctatcgggacgtcaaaggtctcttcctgggccgatgtgtcccttgtcagtgccatggacactcagaccgctgcctccctggctctggcgtctgtgtggactgccagcacaacaccgaaggggcccactgtgagcgctgccaggctggcttcgtgagcagcagggacgaccccagcgccccctgtgtcagctgcccctgccccctctcagtgccttccaacaacttcgccgagggctgtgtcctgcgaggcggccgcacccagtgcctctgcaaacctggttatgcaggtgcctcctgcgagcggtgtgcgcccggattctttgggaacccactggtgctgggcagctcctgccagccatgcgactgcagcggcaacggtgaccccaacttgctcttcagcgactgcgaccccctgacgggcgcctgccgtggctgcctgcgccacaccactgggccccgctgcgagatctgtgcccccggcttctacggcaacgccctgctgcccggcaactgcacccggtgcgactgtaccccatgtgggacagaggcctgcgacccccacagcgggcactgcctgtgcaaggcgggcgtgactgggcggcgctgtgaccgctgccaggagggacattttggtttcgatggctgcgggggctgccgcccgtgtgcttgtggaccggccgccgagggctccgagtgccacccccagagcggacagtgccactgccgaccagggaccatgggaccccagtgccgcgagtgtgcccctggctactgggggctccctgagcagggctgcaggcgctgccagtgccctgggggccgctgtgaccctcacacgggccgctgcaactgccccccggggctcagcggggagcgctgcgacacctgcagccagcagcatcaggtgcctgttccaggcgggcctgtgggccacagcatccactgtgaagtgtgtgaccactgtgtggtcctgctcctggatgacctggaacgggccggcgccctcctccccgccattcacgagcaactgcgtggcatcaatgccagctccatggcctgggcccgtctgcacaggctgaacgcctccatcgctgacctgcagagccagctccggagccccctgggcccccgccatgagacggcacagcagctggaggtgctggagcagcagagcacaagcctcgggcaggacgcacggcggctaggcggccaggccgtggggacccgagaccaggcgagccaattgctggccggcaccgaggccacactgggccatgcgaagacgctgttggcggccatccgggctgtggaccgcaccctgagcgagctcatgtcccagacgggccacctggggctggccaatgcctcggctccatcaggtgagcagctgctccggacactggccgaggtggagcggctgctctgggagatgcgggcccgggacctgggggccccgcaggcagcagctgaggctgagttggctgcagcacagagattgctggcccgggtgcaggagcagctgagcagcctctgggaggagaaccaggcactggccacacaaacccgcgaccggctggcccagcacgaggccggcctcatggacctgcgagaggctttgaaccgggcagtggacgccacacgggaggcccaggagctcaacagccgcaaccaggagcgcctggaggaagccctgcaaaggaagcaggagctgtcccgggacaatgccaccctgcaggccactctgcatgcggctagggacaccctggccagcgtcttcagattgctgcacagcctggaccaggctaaggaggagctggagcgcctcgccgccagcctggatggggctcggaccccactgctgcagaggatgcagaccttctccccggcgggcagcaagctgcgtctagtggaggccgccgaggcccacgcacagcagctgggccagctggcactcaatctgtccagcatcatcctggacgtcaaccaggaccgcctcacccagagggccatcgaggcctccaacgcctacagccgcatcctgcaggccgtgcaggctgccgaggatgctgctggccaggccctgcagcaggcggaccacacgtgggcgacggtggtgcggcagggcctggtggaccgagcccagcagctcctggccaacagcactgcactagaagaggccatgctccaggaacagcagaggctgggccttgtgtgggctgccctccagggtgccaggacccagctccgagatgtccgggccaagaaggaccagctggaggcgcacatccaggcggcgcaggccatgcttgccatggacacagacgagacaagcaagaagatcgcacatgccaaggctgtggctgctgaagcccaggacaccgccacccgtgtgcagtcccagctgcaggccatgcaggagaatgtggagcggtggcagggccagtacgagggcctgcggggccaggacctgggccaggcagtgcttgacgcaggccactcagtgtccaccctggagaagacgctgccccagctgctggccaagctgagcatcctggagaaccgtggggtgcacaacgccagcctggccctgtccgccagcattggccgcgtgcgagagctcattgcccaggcccggggggctgccagtaaggtcaaggtgcccatgaagttcaacgggcgctcaggggtgcagctgcgcaccccacgggatcttgccgaccttgctgcctacactgccctcaagttctacctgcagggcccagagcctgagcctgggcagggtaccgaggatcgctttgtgatgtacatgggcagccgccaggccactggggactacatgggtgtgtctctgcgtgacaagaaggtgcactgggtgtatcagctgggtgaggcgggccctgcagtcctaagcatcgatgaggacattggggagcagttcgcagctgtcagcctggacaggactctccagtttggccacatgtccgtcacagtggagagacagatgatccaggaaaccaagggtgacacggtggcccctggggcagaggggctgctcaacctgcggccagacgacttcgtcttctacgtcggggggtaccccagtaccttcacgccccctcccctgcttcgcttccccggctaccggggctgcatcgagatggacacgctgaatgaggaggtggtcagcctctacaacttcgagaggaccttccagctggacacggctgtggacaggccttgtgcccgctccaagtcgaccggggacccgtggctcacggacggctcctacctggacggcaccggcttcgcccgcatcagcttcgacagtcagatcagcaccaccaagcgcttcgagcaggagctgcggctcgtgtcctacagcggggtgctcttcttcctgaagcagcagagccagttcctgtgcttggccgtgcaagaaggcagcctcgtgctgttgtatgactttggggctggcctgaaaaaggccgtcccactgcagcccccaccgcccctgacctcggccagcaaggcgatccaggtgttcctgctggggggcagccgcaagcgtgtgctggtgcgtgtggagcgggccacggtgtacagcgtggagcaggacaatgatctggagctggccgacgcctactacctggggggcgtgccgcccgaccagctgcccccgagcctgcgacggctcttccccaccggaggctcagtccgtggctgcgtcaaaggcatcaaggccctgggcaagtatgtggacctcaagcggctgaacacgacaggcgtgagcgccggctgcaccgccgacctgctggtggggcgcgccatgactttccatggccacggcttccttcgcctggcgctctcgaacgtggcaccgctcactggcaacgtctactccggcttcggcttccacagcgcccaggacagtgccctgctctactaccgggcgtccccggatgggctatgccaggtgtccctgcagcagggccgtgtgagcctacagctcctgaggactgaagtgaaaactcaagcgggcttcgccgatggtgccccccattacgtcgccttctacagcaatgccacgggagtctggctgtatgtcgatgaccagctccagcagatgaagccccaccggggaccaccccccgagctccagccgcagcctgaggggcccccgaggctcctcctgggaggcctgcctgagtctggcaccatttacaacttcagtggctgcatcagcaacgtcttcgtgcagcggctcctgggcccacagcgcgtatttgatctgcagcagaacctgggcagcgtcaatgtgagcacgggctgtgcacccgccctgcaagcccagaccccgggcctggggcctagaggactgcaggccaccgcccggaaggcctcccgccgcagccgtcagcccgcccggcatcctgcctgcatgctgcccccacacctcaggaccacccgagactcctaccagtttgggggttccctgtccagtcacctggagtttgtgggcatcctggcccgacataggaactggcccagtctctccatgcacgtcctcccgcgaagctcccgaggcctcctcctcttcactgcccgtctgaggcccggcagcccctccctggcgctcttcctgagcaatggccacttcgttgcacagatggaaggcctcgggactcggctccgcgcccagagccgccagcgctcccggcctggccgctggcacaaggtctccgtgcgctgggagaagaaccggatcctgctggtgacggacggggcccgggcctggagccaggaggggccgcaccggcagcaccagggggcagagcacccccagccccacaccctctttgtgggcggcctcccggccagcagccacagctccaaacttccggtgaccgtcgggttcagcggctgtgtgaagagactgaggctgcacgggaggcccctgggggcccccacacggatggcaggggtcacaccctgcatcttgggccccctggaggcgggcctgttcttcccaggcagcgggggagttatcactttagacctcccaggagctacactgcctgatgtgggcctggaactggaggtgcggcccctggcagtcaccggactgatcttccacttgggccaggcccggacgcccccctacttgcagttgcaggtgaccgagaagcaagtcctgctgcgggcggatgacggagcaggggagttctccacgtcagtgacccgcccctcagtgctgtgtgatggccagtggcaccggctagcggtgatgaaaagcgggaatgtgctccggctggaggtggacgcgcagagcaaccacaccgtgggccccttgctggcggctgcagctggtgccccagcccctctgtacctcgggggcctgcctgagcccatggccgtgcagccctggccccccgcctactgcggctgcatgaggaggctggcggtgaaccggtcccccgtcgccatgactcgctctgtggaggtccacggggcagtgggggccagtggctgcccagccgcctaggacacagccaaccccggcccctggtcaggcccctgcagctgcctcacaccgccccttgtgctcgcctcataggtgtctatttggactctaagctctacgggtgacagatcttgtttctgaagatggtttaagttatagcttcttaaacgaaagaataaaatactgcaaaatgtttttatatttggcccttccacccatttttaattgtgagagatttgtcaccaatcatcactggttcctccttaaaaattaaaaagtaacttctgtgtaa

SEQ ID NO: 15657 - DNA, 1674 bp, Homo sapiens
  source 1..1674: mol_type = unassigned DNA
ggggacgcggcccggagccgggaagatggcgaagcggctctgcgcggggagcgcactgtgtgttcgcggcccccggggccccgcgccgctgctgctggtcgggctggcgctgctgggcgcggcgcgggcgcgggaggaggcgggcggcggcttcagcctgcacccgccctacttcaacctggccgagggcgcccgcatcgccgcctccgcgacctgcggagaggaggccccggcgcgcggctccccgcgccccaccgaggacctttactgcaagctggtagggggccccgtggccggcggcgaccccaaccagaccatccggggccagtactgtgacatctgcacggctgccaacagcaacaaggcacaccccgcgagcaatgccatcgatggcacggagcgctggtggcagagtccaccgctgtcccgcggcctggagtacaacgaggtcaacgtcaccctggacctgggccaggtcttccacgtggcctacgtcctcatcaagtttgccaactcaccccggccggacctctgggtgctggagcggtccatggacttcggccgcacctaccagccctggcagttctttgcctcctccaagagggactgtctggagcggttcgggccacagacgctggagcgcatcacacgggacgacgcggccatctgcaccaccgagtactcacgcatcgtgcccctggagaacggagagatcgtggtgtccctggtgaacggacgtccgggcgccatgaatttctcctactcgccgctgctacgtgagttcaccaaggccaccaacgtccgcctgcgcttcctgcgtaccaacacgctgctgggccatctcatggggaaggcgctgcgggaccccacggtcacccgccggtattattacagcatcaaggatatcagcatcggaggccgctgtgtctgccacggccacgcggatgcctgcgatgccaaagaccccacggacccgttcaggctgcagtgcacctgccagcacaacacctgcgggggcacctgcgaccgctgctgccccggcttcaatcagcagccgtggaagcctgcgactgccaacagtgccaacgagtgccagtcctgtaactgctacggccatgccaccgactgttactacgaccctgaggtggaccggcgccgcgccagccagagcctggatggcacctatcagggtgggggtgtctgtatcgactgccagcaccacaccaccggcgtcaactgtgagcgctgcctgcccggcttctaccgctctcccaaccaccctctcgactcgccccacgtctgccgccgctgcaactgcgagtccgacttcacggatggcacctgcgaggacctgacgggtcgatgctactgccggcccaacttctctggggagcggtgtgacgtgtgtgccgagggcttcacgggcttcccaagctgctacccgacgccctcgtcctccaatgacaccagggagcaggtgctgccagccggccagattgtgacaaatacaaaaattagctgggtgtagtgatgtgtgcctgtagttcgagctactccggaggctgaggtggaaggattgcttgagcctggaaggccgaagctgcagtgagccatgatcacaccacagcactccagcctgggcaacagagtgagaccttgtttcaaaaaagaaaa

SEQ ID NO: 15658 - DNA, 1943 bp, Homo sapiens
  source 1..1943: mol_type = unassigned DNA
ccgccgcgcgcgctgtccctggagctcggggacgcggcccggagccgggaagatggcgaagcggctctgcgcggggagcgcactgtgtgttcgcggcccccggggccccgcgccgctgctgctggtcgggctggcgctgctgggcgcggcgcgggcgcgggaggaggcgggcggcggcttcagcctgcacccgccctacttcaacctggccgagggcgcccgcatcgccgcctccgcgacctgcggagaggaggccccggcgcgcggctccccgcgccccaccgaggacctttactgcaagctggtagggggccccgtggccggcggcgaccccaaccagaccatccggggccagtactgtgacatctgcacggctgccaacagcaacaaggcacaccccgcgagcaatgccatcgatggcacggagcgctggtggcagagtccaccgctgtcccgcggcctggagtacaacgaggtcaacgtcaccctggacctgggccaggtcttccacgtggcctacgtcctcatcaagtttgccaactcaccccggccggacctctgggtgctggagcggtccatggacttcggccgcacctaccagccctggcagttctttgcctcctccaagagggactgtctggagcggttcgggccacagacgctggagcgcatcacacgggacgacgcggccatctgcaccaccgagtactcacgcatcgtgcccctggagaacggagagatcgtggtgtccctggtgaacggacgtccgggcgccatgaatttctcctactcgccgctgctacgtgagttcaccaaggccaccaacgtccgcctgcgcttcctgcgtaccaacacgctgctgggccatctcatggggaaggcgctgcgggaccccacggtcacccgccggtattattacagcatcaaggatatcagcatcggaggccgctgtgtctgccacggccacgcggatgcctgcgatgccaaagaccccacggacccgttcaggctgcagtgcacctgccagcacaacacctgcgggggcacctgcgaccgctgctgccccggcttcaatcagcagccgtggaagcctgcgactgccaacagtgccaacgagtgccagtcctgtaactgctacggccatgccaccgactgttactacgaccctgaggtggaccggcgccgcgccagccagagcctggatggcacctatcagggtgggggtgtctgtatcgactgccagcaccacaccaccggcgtcaactgtgagcgctgcctgcccggcttctaccgctctcccaaccaccctctcgactcgccccacgtctgccgccgctgcaactgcgagtccgacttcacggatggcacctgcgaggacctgacgggtcgatgctactgccggcccaacttctctggggagcggtgtgacgtgtgtgccgagggcttcacgggcttcccaagctgctacccgacgccctcgtcctccaatgacaccagggagcaggtgctgccagccggccagattgtgaatggagtttcactctgtcgtccaggctggagtgcagttgcacgatctcggctcacttcaacctctgcctcctgggttcaagcgattctcctgcctcagtctcccgagtagctgggattacaggcacctgccaccacgcctggccaattttttgtatttttagtagagacggggtttcaccatgttggccaggctggtcttgaactctgaccacaagtgatccacctgcctcggcctcccaaagtgctggtattacaggcatgagccaccacgcctggccagttttcttcctcatcttaagtcaggtttgattatttgtattagcaaattgtgtattttgtttggattttttaatgtattgacataaagttatgcacagtggcctgttataaagttaaaatttctgttcatttct

SEQ ID NO: 15659 - DNA, 5725 bp, Homo sapiens
  source 1..5725: mol_type = unassigned DNA
ttgcggccgcccgccccttcagccccggctctccgtatgcgcatgagcagaggcgcctccctctgttcctcccaaggctaaactttctaattcccttctttgggctcgggggctcccggagcagggcgagagctcgcgtcgccggaaaggaagacgggaagaaagggcaggcggctcggcgggcgtcttctccactcctctgccgcgtccccgtggctgcagggagccggcatggggcttctccagttgctagctttcagtttcttagccctgtgcagagcccgagtgcgcgctcaggaacccgagttcagctacggctgcgcagaaggcagctgctatcccgccacgggcgaccttctcatcggccgagcacagaagctttcggtgacctcgacgtgcgggctgcacaagcccgaaccctactgtatcgtcagccacttgcaggaggacaaaaaatgcttcatatgcaattcccaagatccttatcatgagaccctgaatcctgacagccatctcattgaaaatgtggtcactacatttgctccaaaccgccttaagatttggtggcaatctgaaaatggtgtggaaaatgtaactatccaactggatttggaagcagaattccattttactcatctcataatgactttcaagacattccgtccagctgctatgctgatagaacgatcgtccgactttgggaaaacctggggtgtgtatagatacttcgcctatgactgtgaggcctcgtttccaggcatttcaactggccccatgaaaaaagtcgatgacataatttgtgattctcgatattctgacattgaaccctcaactgaaggagaggtgatatttcgtgctttagatcctgctttcaaaatagaagatccttatagcccaaggatacagaatttattaaaaattaccaacttgagaatcaagtttgtgaaactgcatactttgggagataaccttctggattccaggatggaaatcagagaaaagtattattatgcagtttatgatatggtggttcgaggaaattgcttctgctatggtcatgccagcgaatgtgcccctgtggatggattcaatgaagaagtggaaggaatggttcacggacactgcatgtgcaggcataacaccaagggcttaaactgtgaactctgcatggatttctaccatgatttaccttggagacctgctgaaggccgaaacagcaacgcctgtaaaaaatgtaactgcaatgaacattccatctcttgtcactttgacatggctgtttacctggccacggggaacgtcagcggaggcgtgtgtgatgactgtcagcacaacaccatggggcgcaactgtgagcagtgcaagccgttttactaccagcacccagagagggacatccgagatcctaatttctgtgaacgatgtacgtgtgacccagctggctctcaaaatgagggaatttgtgacagctatactgatttttctactggtctcattgctggccagtgtcggtgtaaattaaatgtggaaggagaacattgtgatgtttgcaaagaaggcttctatgatttaagcagtgaagatccatttggttgtaaatcttgtgcttgcaatcctctgggaacaattcctggagggaatccttgtgattccgagacaggtcactgctactgcaagcgtctggtgacaggacagcattgtgaccagtgcctgccagagcactggggcttaagcaatgatttggatggatgtcgaccatgtgactgtgaccttgggggagccttaaacaacagttgctttgcggagtcaggccagtgctcatgccggcctcacatgattggacgtcagtgcaacgaagtggaacctggttactactttgccaccctggatcactacctctatgaagcggaggaagccaacttggggcctggggttagcatagtggagcggcaatatatccaggaccggattccctcctggactggagccggcttcgtccgagtgcctgaaggggcttatttggagtttttcattgacaacataccatattccatggagtacgacatcctaattcgctacgagccacagctacccgaccactgggaaaaagctgtcatcacagtgcagcgacctggaaggattccaaccagcagccgatgtggtaataccatccccgatgatgacaaccaggtggtgtcattatcaccaggctcaagatatgtcgtccttcctcggccggtgtgctttgagaagggaacaaactacacggtgaggttggagctgcctcagtacacctcctctgatagcgacgtggagagcccctacacgctgatcgattctcttgttctcatgccatactgtaaatcactggacatcttcaccgtgggaggttcaggagatggggtggtcaccaacagtgcctgggaaacctttcagagataccgatgtctagagaacagcagaagcgttgtgaaaacaccgatgacagatgtttgcagaaacatcatctttagcatttctgccctgttacaccagacaggcctggcttgtgaatgcgaccctcagggttcgttaagttccgtgtgtgatcccaacggaggccagtgccagtgccggcccaacgtggttggaagaacctgcaacagatgtgcacctggaacttttggctttggccccagtggatgcaaaccttgtgagtgccatctgcaaggatctgtcaatgccttctgcaatcccgtcactggccagtgccactgtttccagggagtgtatgctcggcagtgtgatcggtgcttacctgggcactggggctttccaagttgccagccctgccagtgcaatggccacgccgatgactgcgacccagtgactggggagtgcttgaactgccaggactacaccatgggtcataactgtgaaaggtgcttggctggttactatggcgaccccatcattgggtcaggagatcactgccgcccttgcccttgcccagatggtcccgacagtggacgccagtttgccaggagctgctaccaagatcctgttactttacagcttgcctgtgtttgtgatcctggatacattggttccagatgtgacgactgtgcctcaggatactttggcaatccatcagaagttggggggtcgtgtcagccttgccagtgtcacaacaacattgacacgacagacccagaagcctgtgacaaggagactgggaggtgtctcaagtgcctgtaccacacggaaggggaacactgtcagttctgccggtttggatactatggtgatgccctccagcaggactgtcgaaagtgtgtctgtaattacctgggcaccgtgcaagagcactgtaacggctctgactgccagtgcgacaaagccactggtcagtgcttgtgtcttcctaatgtgatcgggcagaactgtgaccgctgtgcgcccaatacctggcagctggccagtggcactggctgtgacccatgcaactgcaatgctgctcattccttcgggccatcttgcaatgagttcacggggcagtgccagtgcatgcctgggtttggaggccgcacctgcagcgagtgccaggaactcttctggggagaccccgacgtggagtgccgagcctgtgactgtgaccccaggggcattgagacgccacagtgtgaccagtccacgggccagtgtgtctgcgttgagggtgttgagggtccacgctgtgacaagtgcacgcgagggtactcgggggtcttccctgactgcacaccctgccaccagtgctttgctctctgggatgtgatcattgccgagctgaccaacaggacacacagattcctggagaaagccaaggccttgaagatcagtggtgtgatcgggccttaccgtgagactgtggactcggtggagaggaaagtcagcgagataaaagacatcctggcgcagagccccgcagcagagccactgaaaaacattgggaatctctttgaggaagcagagaaactgattaaagatgttacagaaatgatggctcaagtagaagtgaaattatctgacacaacttcccaaagcaacagcacagccaaagaactggattctctacagacagaagccgaaagcctagacaacactgtgaaagaacttgctgaacaactggaatttatcaaaaactcagatattcggggtgccttggatagcattaccaagtatttccagatgtctcttgaggcagaggagagggtgaatgcctccaccacagaacccaacagcactgtggagcagtcagccctcatgagagacagagtagaagacgtgatgatggagcgagaatcccagttcaaggaaaaacaagaggagcaggctcgcctccttgatgaactggcaggcaagctacaaagcctagacctttcagccgctgccgaaatgacctgtggaacacccccaggggcctcctgttccgagactgaatgtggcgggccaaactgcagaactgacgaaggagagaggaagtgtggggggcctggctgtggtggtctggttactgttgcacacaacgcctggcagaaagccatggacttggaccaagatgtcctgagtgccctggctgaagtggaacagctctccaagatggtctctgaagcaaaactgagggcagatgaggcaaaacaaagtgctgaagacattctgttgaagacaaatgctaccaaagaaaaaatggacaagagcaatgaggagctgagaaatctaatcaagcaaatcagaaactttttgacccaggatagtgctgatttggacagcattgaagcagttgctaatgaagtattgaaaatggagatgcctagcaccccacagcagttacagaacttgacagaagatatacgtgaacgagttgaaagcctttctcaagtagaggttattcttcagcatagtgctgctgacattgccagagctgagatgttgttagaagaagctaaaagagcaagcaaaagtgcaacagatgttaaagtcactgcagatatggtaaaggaagctctggaagaagcagaaaaggcccaggtcgcagcagagaaggcaattaaacaagcagatgaagacattcaaggaacccagaacctgttaacttcgattgagtctgaaacagcagcttctgaggaaaccttgttcaacgcgtcccagcgcatcagcgagttagagaggaatgtggaagaacttaagcggaaagctgcccaaaactccggggaggcagaatatattgaaaaagtagtatatactgtgaagcaaagtgcagaagatgttaagaagactttagatggtgaacttgatgaaaagtataaaaaagtagaaaatttaattgccaaaaaaactgaagagtcagctgatgccagaaggaaagccgaaatgctacaaaatgaagcaaaaactcttttagctcaagcaaatagcaagctgcaactgctcaaagatttagaaagaaaatatgaagacaatcaaagatacttagaagataaagctcaagaattagcaagactggaaggagaagtccgttcactcctaaaggatataagccagaaagttgctgtgtatagcacatgcttgtaacagaggagaataaaaaatggctgaggtgaacaaggtaaaacaactacattttaaaaactgacttaatgctcttcaaaataaaacatcacctatttaatgtttttaatcacattttgtatggagttaaataaag

SEQ ID NO: 15660 - DNA, 550 bp, Homo sapiens
  source 1..550: mol_type = unassigned DNA
ttctttgggctcgggggctcccggagcagggcgagagctcgcgtcgccgggtgaggagaacaaagtggctgcacgattttccccactttccagcccaccccccgcttccgtgggagcgacaggaaatggaagggcgcctcttctctctttgaacatttgccttttttcccctcctttccacctctccagaaaggaagacgggaagaaagggcaggcggctcggcgggcgtcttctccactcctctgccgcgtccccgtggctgcagggagccggcatggggcttctccagttgctagctttcagtttcttagccctgtgcagagcccgagtgcgcgctcaggaacccgagttcagctacggctgcgcagaaggcagctgctatcccgccacgggcgaccttctcatcggccgagcacagaagctttcggtgacctcgacgtgcgggctgcacaagcccgaaccctactgtatcgtcagccacttgcaggaggacaaaaaatgcttcatatgcaattcccaagatccttatcatgagaccctgaatcctga

SEQ ID NO: 15661 - DNA, 2806 bp, Homo sapiens
  source 1..2806: mol_type = unassigned DNA
ctcccaaggctaaactttctaattcccttctttgggctcgggggctcccggagcagggcgagagctcgcgtcgccggaaaggaagacgggaagaaagggcaggcggctcggcgggcgtcttctccactcctctgccgcgtccccgtggctgcagggagccggcatggggcttctccagttgctagctttcagtttcttagccctgtgcagagcccgagtgcgcgctcaggaacccgagttcagctacggctgcgcagaaggcagctgctatcccgccacgggcgaccttctcatcggccgagcacagaagctttcggtgacctcgacgtgcgggctgcacaagcccgaaccctactgtatcgtcagccacttgcaggaggacaaaaaatgcttcatatgcaattcccaagatccttatcatgagaccctgaatcctgacagccatctcattgaaaatgtggtcactacatttgctccaaaccgccttaagatttggtggcaatctgaaaatggtgtggaaaatgtaactatccaactggatttggaagcagaattccattttactcatctcataatgactttcaagacattccgtccagctgctatgctgatagaacgatcgtccgactttgggaaaacctggggtgtgtatagatacttcgcctatgactgtgaggcctcgtttccaggcatttcaactggccccatgaaaaaagtcgatgacataatttgtgattctcgatattctgacattgaaccctcaactgaaggagaggtgatatttcgtgctttagatcctgctttcaaaatagaagatccttatagcccaaggatacagaatttattaaaaattaccaacttgagaatcaagtttgtgaaactgcatactttgggagataaccttctggattccaggatggaaatcagagaaaagtattattatgcagtttatgatatggtggttcgaggaaattgcttctgctatggtcatgccagcgaatgtgcccctgtggatggattcaatgaagaagtggaaggaatggttcacggacactgcatgtgcaggcataacaccaagggcttaaactgtgaactctgcatggatttctaccatgatttaccttggagacctgctgaaggccgaaacagcaacgcctgtaaaaaatgtaactgcaatgaacattccatctcttgtcactttgacatggctgtttacctggccacggggaacgtcagcggaggcgtgtgtgatgactgtcagcacaacaccatggggcgcaactgtgagcagtgcaagccgttttactaccagcacccagagagggacatccgagatcctaatttctgtgaacgatgtacgtgtgacccagctggctctcaaaatgagggaatttgtgacagctatactgatttttctactggtctcattgctggccagtgtcggtgtaaattaaatgtggaaggagaacattgtgatgtttgcaaagaaggcttctatgatttaagcagtgaagatccatttggttgtaaatcttgtgcttgcaatcctctgggaacaattcctggagggaatccttgtgattccgagacaggtcactgctactgcaagcgtctggtgacaggacagcattgtgaccagtgcctgccagagcactggggcttaagcaatgatttggatggatgtcgaccatgtgactgtgaccttgggggagccttaaacaacagttgctttgcggagtcaggccagtgctcatgccggcctcacatgattggacgtcagtgcaacgaagtggaacctggttactactttgccaccctggatcactacctctatgaagcggaggaagccaacttggggcctggggttagcatagtggagcggcaatatatccaggaccggattccctcctggactggagccggcttcgtccgagtgcctgaaggggcttatttggagtttttcattgacaacataccatattccatggagtacgacatcctaattcgctacgagccacagctacccgaccactgggaaaaagctgtcatcacagtgcagcgacctggaaggattccaaccagcagccgatgtggtaataccatccccgatgatgacaaccaggtggtgtcattatcaccaggctcaagatatgtcgtccttcctcggccggtgtgctttgagaagggaacaaactacacggtgaggttggagctgcctcagtacacctcctctgatagcgacgtggagagcccctacacgctgatcgattctcttgttctcatgccatactgtaaatcactggacatcttcaccgtgggaggttcaggagatggggtggtcaccaacagtgcctgggaaacctttcagagataccgatgtctagagaacagcagaagcgttgtgaaaacaccgatgacagatgtttgcagaaacatcatctttagcatttctgccctgttacaccagacaggcctggcttgtgaatgcgaccctcagggttcgttaagttccgtgtgtgatcccaacggaggccagtgccagtgccggcccaacgtggttggaagaacctgcaacagatgtgcacctggaacttttggctttggccccagtggatgcaaacgtaggttcctcaaaagcattgttatgcattcattcagattaactcagccattgtggcagggttccattgctgcagagccgatgcttccctcctgaagttgatcacaccaacccatgagcattctgaattggggacagggtgcttataaaaggagcatgtttccattgaatgagtttctcaaggca

SEQ ID NO: 15662 - DNA, 5643 bp, Homo sapiens
  source 1..5643: mol_type = unassigned DNA
agggaccgctggacagacctgggaactgacagagggcctggagggaaacaggccaaagacccacaggcagagttgacacggaaccccaaagcaaggaggagggctcgggcccgagaccgttcacctccccttatccctgttcccctcttcaggatggagctgacctcaagggaaagagggaggggacagcctctgccctgggaacttcgactgggcctactgctaagcgtgctggctgccacactggcacaggcccctgccccggatgtgcctggctgttccaggggaagctgctaccccgccacgggcgacctgctggtgggccgagctgacagactgactgcctcatccacttgtggcctgaatggcccccagccctactgcatcgtcagtcacctgcaggacgaaaagaagtgcttcctttgtgactcccggcgccccttctctgctagagacaacccacacagccatcgcatccagaatgtagtcaccagctttgcaccacagcggcgggcagcctggtggcagtcagagaatggtatccctgcggtcaccatccagctggacctggaggctgagtttcatttcacacacctcattatgaccttcaagacatttcgccctgctgccatgctggtggaacgctcagcagactttggccgcacctggcatgtgtaccgatatttctcctatgactgtggggctgacttcccaggagtcccactagcacccccacggcactgggatgatgtagtctgtgagtcccgctactcagagattgagccatccactgaaggcgaggtcatctatcgtgtgctggaccctgccatccctatcccagacccctacagctcacggattcagaacctgttgaagatcaccaacctacgggtgaacctgactcgtctacacacgttgggagacaacctactcgacccacggagggagatccgagagaagtactactatgccctctatgagctggttgtacgtggcaactgcttctgctacggacacgcctcagagtgtgcacccgccccaggggcaccagcccatgctgagggcatggtgcacggagcttgcatctgcaaacacaacacacgtggcctcaactgcgagcagtgtcaggatttctatcgtgacctgccctggcgtccggctgaggacggccatagtcatgcctgtaggaagtgtgagtgccatgggcacacccacagctgccacttcgacatggccgtatacctggcatctggcaatgtgagtggaggtgtgtgtgatggatgtcagcataacacagctgggcgccactgtgagctctgtcggcccttcttctaccgtgacccaaccaaggacctgcgggatccggctgtgtgccgctcctgtgattgtgaccccatgggttctcaagacggtggtcgctgtgattcccatgatgaccctgcactgggactggtctccggccagtgtcgctgcaaagaacatgtggtgggcactcgctgccagcaatgccgtgatggcttctttgggctcagcatcagtgaccgtctgggctgccggcgatgtcaatgtaatgcacggggcacagtgcctgggagcactccttgtgaccccaacagtggatcctgttactgcaaacgtctagtgactggacgtggatgtgaccgctgcctgcctggccactggggcctgagccacgacctgctcggctgccgcccctgtgactgcgacgtgggtggtgctttggatccccagtgtgatgagggcacaggtcaatgccactgccgccagcacatggttgggcgacgctgtgagcaggtgcaacctggctacttccggcccttcctggaccacctaatttgggaggctgaggacacccgagggcaggtgctcgatgtggtggagcgcctggtgacccccggggaaactccatcctggactggctcaggcttcgtgcggctacaggaaggtcagaccctggagttcctggtggcctctgtgccgaaggctatggactatgacctgctgctgcgcttagagccccaggtccctgagcaatgggcagagttggaactgattgtgcagcgtccagggcctgtgcctgcccacagcctgtgtgggcatttggtgcccaaggatgatcgcatccaagggactctgcaaccacatgccaggtacttgatatttcctaatcctgtctgccttgagcctggtatctcctacaagctgcatctgaagctggtacggacagggggaagtgcccagcctgagactccctactctggacctggcctgctcattgactcgctggtgctgctgccccgtgtcctggtgctagagatgtttagtgggggtgatgctgctgccctggagcgccaggccacctttgaacgctaccaatgccatgaggagggtctggtgcccagcaagacttctccctctgaggcctgcgcacccctcctcatcagcctgtccaccctcatctacaatggtgccctgccatgtcagtgcaaccctcaaggttcactgagttctgagtgcaaccctcatggtggtcagtgcctgtgcaagcctggagtggttgggcgccgctgtgacctctgtgcccctggctactatggctttggccccacaggctgtcaagcctgccagtgcagccacgagggggcactcagcagtctctgtgaaaagaccagtgggcaatgtctctgtcgaactggtgcctttgggcttcgctgtgaccgctgccagcgtggccagtggggattccctagctgccggccatgtgtctgcaatgggcatgcagatgagtgcaacacccacacaggcgcttgcctgggctgccgtgatcacacagggggtgagcactgtgaaaggtgcattgctggtttccacggggacccacggctgccatatgggggccagtgccggccctgtccctgtcctgaaggccctgggagccaacggcactttgctacttcttgccaccaggatgaatattcccagcagattgtgtgccactgccgggcaggctatacggggctgcgatgtgaagcttgtgcccctgggcactttggggacccatcaaggccaggtggccggtgccaactgtgtgagtgcagtgggaacattgacccaatggatcctgatgcctgtgacccccacacggggcaatgcctgcgctgtttacaccacacagagggtccacactgtgcccactgcaagcctggcttccatgggcaggctgcccgacagagctgtcaccgctgcacatgcaacctgctgggcacaaatccgcagcagtgcccatctcctgaccagtgccactgtgatccaagcagtgggcagtgcccatgcctccccaatgtccagggccctagctgtgaccgctgtgcccccaacttctggaacctcaccagtggccatggttgccagccttgtgcctgccacccaagccgggccagaggccccacctgcaacgagttcacagggcagtgccactgccgtgccggctttggagggcggacttgttctgagtgccaagagctccactggggagaccctgggttgcagtgccatgcctgtgattgtgactctcgtggaatagatacacctcagtgtcaccgcttcacaggtcactgcagctgccgcccaggggtgtctggtgtgcgctgtgaccagtgtgcccgtggcttctcaggaatctttcctgcctgccatccctgccatgcatgcttcggggattgggaccgagtggtgcaggacttggcagcccgtacacagcgcctagagcagcgggcgcaggagttgcaacagacgggtgtgctgggtgcctttgagagcagcttctggcacatgcaggagaagctgggcattgtgcagggcatcgtaggtgcccgcaacacctcagccgcctccactgcacagcttgtggaggccacagaggagctgcggcgtgaaattggggaggccactgagcacctgactcagctcgaggcagacctgacagatgtgcaagatgagaacttcaatgccaaccatgcactaagtggtctggagcgagataggcttgcacttaatctcacactgcggcagctcgaccagcatcttgacttgctcaaacattcaaacttcctgggtgcctatgacagcatccggcatgcccatagccagtctgcagaggcagaacgtcgtgccaatacctcagccctggcagtacctagccctgtgagcaactcggcaagtgctcggcatcggacagaggcactgatggatgctcagaaggaggacttcaacagcaaacacatggccaaccagcgggcacttggcaagctctctgcccatacccacaccctgagcctgacagacataaatgagctggtgtgtggggcaccaggggatgcaccctgtgctacaagcccttgtgggggtgccggctgtcgagatgaggatgggcagccgcgctgtgggggcctcagctgcaatggggcagcggctacagcagacctagcactgggccgggcccggcacacacaggcagagctgcagcgggcactggcagaaggtggtagcatcctcagcagagtggctgagactcgtcggcaggcaagcgaggcacagcagcgggcccaggcagccctggacaaggctaatgcttccaggggacaggtggaacaggccaaccaggaacttcaagaacttatccagagtgtgaaggacttcctcaaccaggagggggctgatcctgatagcattgaaatggtggccacacgggtgctagagctctccatcccagcttcagctgagcagatccagcacctggcgggtgcgattgcagagcgagtccggagcctggcagatgtggatgcgatcctggcacgtactgtaggagatgtgcgtcgtgccgagcagctactgcaggatgcacggcgggcaaggagctgggctgaggatgagaaacagaaggcagagacagtacaggcagcactggaggaggcccagcgggcacagggtattgcccagggtgccatccggggggcagtggctgacacacgggacacagagcagaccctgtaccaggtacaggagaggatggcaggtgcagagcgggcactgagctctgcaggtgaaagggctcggcagttggatgctctcctggaggctctgaaattgaaacgggcaggaaatagtctggcagcctctacagcagaagaaacggcaggcagtgcccagggtcgtgcccaggaggctgagcagctgctacgcggtcctctgggtgatcagtaccagacggtgaaggccctagctgagcgcaaggcccaaggtgtgctggctgcacaggcaagggcagaacaactgcgggatgaggctcgggacctgttgcaagccgctcaggacaagctgcagcggctacaggaattggaaggcacctatgaggaaaatgagcgggcactggagagtaaggcagcccagttggacgggttggaggccaggatgcgcagcgtgcttcaagccatcaacttgcaggtgcagatctacaacacctgccagtgacccctgcccaaggcctaccccagttcctagcactgccccacatgcatgtctgcctatgcactgaagagctcttggcccggcagggcccccaat

SEQ ID NO: 15663 - DNA, 1356 bp, Homo sapiens
  source 1..1356: mol_type = unassigned DNA
atgcaggagaagctgggcattgtgcagggcatcgtaggtgcccgcaacacctcagccgcctccactgcacagcttgtggaggccacagaggagctgcggcgtgaaattggggaggccactgagcacctgactcagctcgaggcagacctgacagatgtgcaagatgagaacttcaatgccaaccatgcactaagtggtctggagcgagataggcttgcacttaatctcacactgcggcagctcgaccagcatcttgacttgctcaaacattcaaacttcctgggtgcctatgacagcatccggcatgcccatagccagtctgcagaggcagaacgtcgtgccaatacctcagccctggcagtacctagccctgtgagcaactcggcaagtgctcggcatcggacagaggcactgatggatgctcagaaggaggacttcaacagcaaacacatggccaaccagcgggcacttggcaagctctctgcccatacccacaccctgagcctgacagacataaatgagctggtgtgtggggcaccaggggatgcaccctgtgctacaagcccttgtgggggtgccggctgtcgagatgaggatgggcagccgcgctgtgggggcctcagctgcaatggggcagcggctacagcagacctagcactgggccgggcccggcacacacaggcagagctgcagcgggcactggcagaaggtggtagcatcctcagcagagtggctgagactcgtcggcaggcaagcgaggcacagcagcgggcccaggcagccctggacaaggctaatgcttccaggggacaggtggaacaggccaaccaggaacttcaagaacttatccagagtgtgaaggacttcctcaaccaggagggggctgatcctgatagcattgaaatggtggccacacgggtgctagagctctccatcccagcttcagctgagcagatccagcacctggcgggtgcgattgcagagcgagtccggagcctggcagatgtggatgcgatcctggcacagggtattgcccagggtgccatccggggggcagtggctgacacacgggacacagagcagcctgtaccaggtacaggagaggatggcaggtgcagagcgggcactgagctctgcaggtgaaagggctcggcagttggatgctctcctggaggctctgaaattgaaacgggcaggaaatagtctggcagcctctacagcagaagaaacggcaggcagtgcccagggtcgtgcccaggaggctgagcagctgctacgcggtcctctgggtgatcagtaccagacggtgaaggccctagctgagcgcaaggcccaaggtgtgctggctgcacaggc

SEQ ID NO: 15664 - DNA, 5674 bp, Homo sapiens
  source 1..5674: mol_type = unassigned DNA
ccgcccggtgttgcgctccttcccagaatccgctccggcctttccttcctgccgcgattcccaactttgctcaaagtcgctggactctaagctgtcggagggaccgctggacagacctgggaactgacagagggcctggagggaaacaggccaaagacccacaggatggagctgacctcaagggaaagagggaggggacagcctctgccctgggaacttcgactgggcctactgctaagcgtgctggctgccacactggcacaggcccctgccccggatgtgcctggctgttccaggggaagctgctaccccgccacgggcgacctgctggtgggccgagctgacagactgactgcctcatccacttgtggcctgaatggcccccagccctactgcatcgtcagtcacctgcaggacgaaaagaagtgcttcctttgtgactcccggcgccccttctctgctagagacaacccacacagccatcgcatccagaatgtagtcaccagctttgcaccacagcggcgggcagcctggtggcagtcagagaatggtatccctgcggtcaccatccagctggacctggaggctgagtttcatttcacacacctcattatgaccttcaagacatttcgccctgctgccatgctggtggaacgctcagcagactttggccgcacctggcatgtgtaccgatatttctcctatgactgtggggctgacttcccaggagtcccactagcacccccacggcactgggatgatgtagtctgtgagtcccgctactcagagattgagccatccactgaaggcgaggtcatctatcgtgtgctggaccctgccatccctatcccagacccctacagctcacggattcagaacctgttgaagatcaccaacctacgggtgaacctgactcgtctacacacgttgggagacaacctactcgacccacggagggagatccgagagaagtactactatgccctctatgagctggttgtacgtggcaactgcttctgctacggacacgcctcagagtgtgcacccgccccaggggcaccagcccatgctgagggcatggtgcacggagcttgcatctgcaaacacaacacacgtggcctcaactgcgagcagtgtcaggatttctatcgtgacctgccctggcgtccggctgaggacggccatagtcatgcctgtaggaagtgtgagtgccatgggcacacccacagctgccacttcgacatggccgtatacctggcatctggcaatgtgagtggaggtgtgtgtgatggatgtcagcataacacagctgggcgccactgtgagctctgtcggcccttcttctaccgtgacccaaccaaggacctgcgggatccggctgtgtgccgctcctgtgattgtgaccccatgggttctcaagacggtggtcgctgtgattcccatgatgaccctgcactgggactggtctccggccagtgtcgctgcaaagaacatgtggtgggcactcgctgccagcaatgccgtgatggcttctttgggctcagcatcagtgaccgtctgggctgccggcgatgtcaatgtaatgcacggggcacagtgcctgggagcactccttgtgaccccaacagtggatcctgttactgcaaacgtctagtgactggacgtggatgtgaccgctgcctgcctggccactggggcctgagccacgacctgctcggctgccgcccctgtgactgcgacgtgggtggtgctttggatccccagtgtgatgagggcacaggtcaatgccactgccgccagcacatggttgggcgacgctgtgagcaggtgcaacctggctacttccggcccttcctggaccacctaatttgggaggctgaggacacccgagggcaggtgctcgatgtggtggagcgcctggtgacccccggggaaactccatcctggactggctcaggcttcgtgcggctacaggaaggtcagaccctggagttcctggtggcctctgtgccgaaggctatggactatgacctgctgctgcgcttagagccccaggtccctgagcaatgggcagagttggaactgattgtgcagcgtccagggcctgtgcctgcccacagcctgtgtgggcatttggtgcccaaggatgatcgcatccaagggactctgcaaccacatgccaggtacttgatatttcctaatcctgtctgccttgagcctggtatctcctacaagctgcatctgaagctggtacggacagggggaagtgcccagcctgagactccctactctggacctggcctgctcattgactcgctggtgctgctgccccgtgtcctggtgctagagatgtttagtgggggtgatgctgctgccctggagcgccaggccacctttgaacgctaccaatgccatgaggagggtctggtgcccagcaagacttctccctctgaggcctgcgcacccctcctcatcagcctgtccaccctcatctacaatggtgccctgccatgtcagtgcaaccctcaaggttcactgagttctgagtgcaaccctcatggtggtcagtgcctgtgcaagcctggagtggttgggcgccgctgtgacctctgtgcccctggctactatggctttggccccacaggctgtcaagcctgccagtgcagccacgagggggcactcagcagtctctgtgaaaagaccagtgggcaatgtctctgtcgaactggtgcctttgggcttcgctgtgaccgctgccagcgtggccagtggggattccctagctgccggccatgtgtctgcaatgggcatgcagatgagtgcaacacccacacaggcgcttgcctgggctgccgtgatcacacagggggtgagcactgtgaaaggtgcattgctggtttccacggggacccacggctgccatatgggggccagtgccggccctgtccctgtcctgaaggccctgggagccaacggcactttgctacttcttgccaccaggatgaatattcccagcagattgtgtgccactgccgggcaggctatacggggctgcgatgtgaagcttgtgcccctgggcactttggggacccatcaaggccaggtggccggtgccaactgtgtgagtgcagtgggaacattgacccaatggatcctgatgcctgtgacccccacacggggcaatgcctgcgctgtttacaccacacagagggtccacactgtgcccactgcaagcctggcttccatgggcaggctgcccgacagagctgtcaccgctgcacatgcaacctgctgggcacaaatccgcagcagtgcccatctcctgaccagtgccactgtgatccaagcagtgggcagtgcccatgcctccccaatgtccagggccctagctgtgaccgctgtgcccccaacttctggaacctcaccagtggccatggttgccagccttgtgcctgccacccaagccgggccagaggccccacctgcaacgagttcacagggcagtgccactgccgtgccggctttggagggcggacttgttctgagtgccaagagctccactggggagaccctgggttgcagtgccatgcctgtgattgtgactctcgtggaatagatacacctcagtgtcaccgcttcacaggtcactgcagctgccgcccaggggtgtctggtgtgcgctgtgaccagtgtgcccgtggcttctcaggaatctttcctgcctgccatccctgccatgcatgcttcggggattgggaccgagtggtgcaggacttggcagcccgtacacagcgcctagagcagcgggcgcaggagttgcaacagacgggtgtgctgggtgcctttgagagcagcttctggcacatgcaggagaagctgggcattgtgcagggcatcgtaggtgcccgcaacacctcagccgcctccactgcacagcttgtggaggccacagaggagctgcggcgtgaaattggggaggccactgagcacctgactcagctcgaggcagacctgacagatgtgcaagatgagaacttcaatgccaaccatgcactaagtggtctggagcgagataggcttgcacttaatctcacactgcggcagctcgaccagcatcttgacttgctcaaacattcaaacttcctgggtgcctatgacagcatccggcatgcccatagccagtctgcagaggcagaacgtcgtgccaatacctcagccctggcagtacctagccctgtgagcaactcggcaagtgctcggcatcggacagaggcactgatggatgctcagaaggaggacttcaacagcaaacacatggccaaccagcgggcacttggcaagctctctgcccatacccacaccctgagcctgacagacataaatgagctggtgtgtggggcaccaggggatgcaccctgtgctacaagcccttgtgggggtgccggctgtcgagatgaggatgggcagccgcgctgtgggggcctcagctgcaatggggcagcggctacagcagacctagcactgggccgggcccggcacacacaggcagagctgcagcgggcactggcagaaggtggtagcatcctcagcagagtggctgagactcgtcggcaggcaagcgaggcacagcagcgggcccaggcagccctggacaaggctaatgcttccaggggacaggtggaacaggccaaccaggaacttcaagaacttatccagagtgtgaaggacttcctcaaccaggagggggctgatcctgatagcattgaaatggtggccacacgggtgctagagctctccatcccagcttcagctgagcagatccagcacctggcgggtgcgattgcagagcgagtccggagcctggcagatgtggatgcgatcctggcacgtactgtaggagatgtgcgtcgtgccgagcagctactgcaggatgcacggcgggcaaggagctgggctgaggatgagaaacagaaggcagagacagtacaggcagcactggaggaggcccagcgggcacagggtattgcccagggtgccatccggggggcagtggctgacacacgggacacagagcagaccctgtaccaggtacaggagaggatggcaggtgcagagcgggcactgagctctgcaggtgaaagggctcggcagttggatgctctcctggaggctctgaaattgaaacgggcaggaaatagtctggcagcctctacagcagaagaaacggcaggcagtgcccagggtcgtgcccaggaggctgagcagctgctacgcggtcctctgggtgatcagtaccagacggtgaaggccctagctgagcgcaaggcccaaggtgtgctggctgcacaggcaagggcagaacaactgcgggatgaggctcgggacctgttgcaagccgctcaggacaagctgcagcggctacaggaattggaaggcacctatgaggaaaatgagcgggcactggagagtaaggcagcccagttggacgggttggaggccaggatgcgcagcgtgcttcaagccatcaacttgcaggtgcagatctacaacacctgccagtgacccctgcccaaggcctaccccagttcctagcactgccccacatgcatgtctgcctatgcactgaagagctcttggcccggcagggcccccaataaaccagtgtgaaccccca

SEQ ID NO: 15665 - DNA, 4033 bp, Homo sapiens
  source 1..4033: mol_type = unassigned DNA
ggctgttgtttaaaaacctggagccgggaggggagacccccacattcaagaggagctttcaggcgatctggagaaagaacggcagaacacacagcaaggaaaggtcctttctggggatcaccccattggctgaagatgagaccattcttcctcttgtgttttgccctgcctggcctcctgcatgcccaacaagcctgctcccgtggggcctgctatccacctgttggggacctgcttgttgggaggacccggtttctccgagcttcatctacctgtggactgaccaagcctgagacctactgcacccagtatggcgagtggcagatgaaatgctgcaagtgtgactccaggcagcctcacaactactacagtcaccgagtagagaatgtggcttcatcctccggccccatgcgctggtggcagtcacagaatgatgtgaaccctgtctctctgcagctggacctggacaggagattccagcttcaagaagtcatgatggagttccaggggcccatgcccgccggcatgctgattgagcgctcctcagacttcggtaagacctggcgagtgtaccagtacctggctgccgactgcacctccaccttccctcgggtccgccagggtcggcctcagagctggcaggatgttcggtgccagtccctgcctcagaggcctaatgcacgcctaaatggggggaaggtccaacttaaccttatggatttagtgtctgggattccagcaactcaaagtcaaaaaattcaagaggtgggggagatcacaaacttgagagtcaatttcaccaggctggcccctgtgccccaaaggggctaccaccctcccagcgcctactatgctgtgtcccagctccgtctgcaggggagctgcttctgtcacggccatgctgatcgctgcgcacccaagcctggggcctctgcaggcccctccaccgctgtgcaggtccacgatgtctgtgtctgccagcacaacactgccggcccaaattgtgagcgctgtgcacccttctacaacaaccggccctggagaccggcggagggccaggacgcccatgaatgccaaaggtgcgactgcaatgggcactcagagacatgtcactttgaccccgctgtgtttgccgccagccagggggcatatggaggtgtgtgtgacaattgccgggaccacaccgaaggcaagaactgtgagcggtgtcagctgcactatttccggaaccggcgcccgggagcttccattcaggagacctgcatctcctgcgagtgtgatccggatggggcagtgccaggggctccctgtgacccagtgaccgggcagtgtgtgtgcaaggagcatgtgcagggagagcgctgtgacctatgcaagccgggcttcactggactcacctacgccaacccgcagggctgccaccgctgtgactgcaacatcctggggtcccggagggacatgccgtgtgacgaggagagtgggcgctgcctttgtctgcccaacgtggtgggtcccaaatgtgaccagtgtgctccctaccactggaagctggccagtggccagggctgtgaaccgtgtgcctgcgacccgcacaactccctcagcccacagtgcaaccagttcacagggcagtgcccctgtcgggaaggctttggtggcctgatgtgcagcgctgcagccatccgccagtgtccagaccggacctatggagacgtggccacaggatgccgagcctgtgactgtgatttccggggaacagagggcccgggctgcgacaaggcatcaggccgctgcctctgccgccctggcttgaccgggccccgctgtgaccagtgccagcgaggctactgtaatcgctacccggtgtgcgtggcctgccacccttgcttccagacctatgatgcggacctccgggagcaggccctgcgctttggtagactccgcaatgccaccgccagcctgtggtcagggcctgggctggaggaccgtggcctggcctcccggatcctagatgcaaagagtaagattgagcagatccgagcagttctcagcagccccgcagtcacagagcaggaggtggctcaggtggccagtgccatcctctccctcaggcgaactctccagggcctgcagctggatctgcccctggaggaggagacgttgtcccttccgagagacctggagagtcttgacagaagcttcaatggtctccttactatgtatcagaggaagagggagcagtttgaaaaaataagcagtgctgatccttcaggagccttccggatgctgagcacagcctacgagcagtcagcccaggctgctcagcaggtctccgacagctcgcgccttttggaccagctcagggacagccggagagaggcagagaggctggtgcggcaggcgggaggaggaggaggcaccggcagccccaagcttgtggccctgaggctggagatgtcttcgttgcctgacctgacacccaccttcaacaagctctgtggcaactccaggcagatggcttgcaccccaatatcatgccctggtgagctatgtccccaagacaatggcacagcctgtggctcccgctgcaggggtgtccttcccagggccggtggggccttcttgatggcggggcaggtggctgagcagctgcggggcttcaatgcccagctccagcggaccaggcagatgattagggcagccgaggaatctgcctcacagattcaatccagtgcccagcgcttggagacccaggtgagcgccagccgctcccagatggaggaagatgtcagacgcacacggctcctaatccagcaggtccgggacttcctaacagaccccgacactgatgcagccactatccaggaggtcagcgaggccgtgctggccctgtggctgcccacagactcagctactgttctgcagaagatgaatgagatccaggccattgcagccaggctccccaacgtggacttggtgctgtcccagaccaagcaggacattgcgcgtgcccgccggttgcaggctgaggctgaggaagccaggagccgagcccatgcagtggagggccaggtggaagatgtggttgggaacctgcggcaggggacagtggcactgcaggaagctcaggacaccatgcaaggcaccagccgctcccttcggcttatccaggacagggttgctgaggttcagcaggtactgcggccagcagaaaagctggtgacaagcatgaccaagcagctgggtgacttctggacacggatggaggagctccgccaccaagcccggcagcagggggcagaggcagtccaggcccagcagcttgcggaaggtgccagcgagcaggcattgagtgcccaagagggatttgagagaataaaacaaaagtatgctgagttgaaggaccggttgggtcagagttccatgctgggtgagcagggtgcccggatccagagtgtgaagacagaggcagaggagctgtttggggagaccatggagatgatggacaggatgaaagacatggagttggagctgctgcggggcagccaggccatcatgctgcgctcagcggacctgacaggactggagaagcgtgtggagcagatccgtgaccacatcaatgggcgcgtgctctactatgccacctgcaagtgatgctacagcttccagcccgttgccccactcatctgccgcctttgcttttggttgggggcagattgggttggaatgctttccatctccaggagactttcatgcagcctaaagtacagcctggaccacccctggtgtgtagctagtaagattaccctgagctgcagctgagcctgagccaatgggacagttacacttgacagacaaagatggtggagattggcatgccattgaaactaagagctctcaagtcaaggaagctgggctgggcagtatcccccgcctttagttctccactggggaggaatcctggaccaagcacaaaaacttaacaaaagtgatgtaaaaatgaaaagccaaataaaaatctttggaaaagagc

SEQ ID NO: 15666 - DNA, 3931 bp, Homo sapiens
  source 1..3931: mol_type = unassigned DNA
gcgggaggaggactgtatctctggatgcctggggcctggtttcagggcctgatttattcctcttcctgggagctcactcaggaaaggtcctttctggggatcaccccattggctgaagatgagaccattcttcctcttgtgttttgccctgcctggcctcctgcatgcccaacaagcctgctcccgtggggcctgctatccacctgttggggacctgcttgttgggaggacccggtttctccgagcttcatctacctgtggactgaccaagcctgagacctactgcacccagtatggcgagtggcagatgaaatgctgcaagtgtgactccaggcagcctcacaactactacagtcaccgagtagagaatgtggcttcatcctccggccccatgcgctggtggcagtcacagaatgatgtgaaccctgtctctctgcagctggacctggacaggagattccagcttcaagaagtcatgatggagttccaggggcccatgcccgccggcatgctgattgagcgctcctcagacttcggtaagacctggcgagtgtaccagtacctggctgccgactgcacctccaccttccctcgggtccgccagggtcggcctcagagctggcaggatgttcggtgccagtccctgcctcagaggcctaatgcacgcctaaatggggggaaggtccaacttaaccttatggatttagtgtctgggattccagcaactcaaagtcaaaaaattcaagaggtgggggagatcacaaacttgagagtcaatttcaccaggctggcccctgtgccccaaaggggctaccaccctcccagcgcctactatgctgtgtcccagctccgtctgcaggggagctgcttctgtcacggccatgctgatcgctgcgcacccaagcctggggcctctgcaggcccctccaccgctgtgcaggtccacgatgtctgtgtctgccagcacaacactgccggcccaaattgtgagcgctgtgcacccttctacaacaaccggccctggagaccggcggagggccaggacgcccatgaatgccaaaggtgcgactgcaatgggcactcagagacatgtcactttgaccccgctgtgtttgccgccagccagggggcatatggaggtgtgtgtgacaattgccgggaccacaccgaaggcaagaactgtgagcggtgtcagctgcactatttccggaaccggcgcccgggagcttccattcaggagacctgcatctcctgcgagtgtgatccggatggggcagtgccaggggctccctgtgacccagtgaccgggcagtgtgtgtgcaaggagcatgtgcagggagagcgctgtgacctatgcaagccgggcttcactggactcacctacgccaacccgcagggctgccaccgctgtgactgcaacatcctggggtcccggagggacatgccgtgtgacgaggagagtgggcgctgcctttgtctgcccaacgtggtgggtcccaaatgtgaccagtgtgctccctaccactggaagctggccagtggccagggctgtgaaccgtgtgcctgcgacccgcacaactccctcagcccacagtgcaaccagttcacagggcagtgcccctgtcgggaaggctttggtggcctgatgtgcagcgctgcagccatccgccagtgtccagaccggacctatggagacgtggccacaggatgccgagcctgtgactgtgatttccggggaacagagggcccgggctgcgacaaggcatcaggccgctgcctctgccgccctggcttgaccgggccccgctgtgaccagtgccagcgaggctactgtaatcgctacccggtgtgcgtggcctgccacccttgcttccagacctatgatgcggacctccgggagcaggccctgcgctttggtagactccgcaatgccaccgccagcctgtggtcagggcctgggctggaggaccgtggcctggcctcccggatcctagatgcaaagagtaagattgagcagatccgagcagttctcagcagccccgcagtcacagagcaggaggtggctcaggtggccagtgccatcctctccctcaggcgaactctccagggcctgcagctggatctgcccctggaggaggagacgttgtcccttccgagagacctggagagtcttgacagaagcttcaatggtctccttactatgtatcagaggaagagggagcagtttgaaaaaataagcagtgctgatccttcaggagccttccggatgctgagcacagcctacgagcagtcagcccaggctgctcagcaggtctccgacagctcgcgccttttggaccagctcagggacagccggagagaggcagagaggctggtgcggcaggcgggaggaggaggaggcaccggcagccccaagcttgtggccctgaggctggagatgtcttcgttgcctgacctgacacccaccttcaacaagctctgtggcaactccaggcagatggcttgcaccccaatatcatgccctggtgagctatgtccccaagacaatggcacagcctgtggctcccgctgcaggggtgtccttcccagggccggtggggccttcttgatggcggggcaggtggctgagcagctgcggggcttcaatgcccagctccagcggaccaggcagatgattagggcagccgaggaatctgcctcacagattcaatccagtgcccagcgcttggagacccaggtgagcgccagccgctcccagatggaggaagatgtcagacgcacacggctcctaatccagcaggtccgggacttcctaacagaccccgacactgatgcagccactatccaggaggtcagcgaggccgtgctggccctgtggctgcccacagactcagctactgttctgcagaagatgaatgagatccaggccattgcagccaggctccccaacgtggacttggtgctgtcccagaccaagcaggacattgcgcgtgcccgccggttgcaggctgaggctgaggaagccaggagccgagcccatgcagtggagggccaggtggaagatgtggttgggaacctgcggcaggggacagtggcactgcaggaagctcaggacaccatgcaaggcaccagccgctcccttcggcttatccaggacagggttgctgaggttcagcaggtactgcggccagcagaaaagctggtgacaagcatgaccaagcagctgggtgacttctggacacggatggaggagctccgccaccaagcccggcagcagggggcagaggcagtccaggcccagcagcttgcggaaggtgccagcgagcaggcattgagtgcccaagagggatttgagagaataaaacaaaagtatgctgagttgaaggaccggttgggtcagagttccatgctgggtgagcagggtgcccggatccagagtgtgaagacagaggcagaggagctgtttggggagaccatggagatgatggacaggatgaaagacatggagttggagctgctgcggggcagccaggccatcatgctgcgctcagcggacctgacaggactggagaagcgtgtggagcagatccgtgaccacatcaatgggcgcgtgctctactatgccacctgcaagtgatgctacagcttccagcccgttgccccactcatctgccgcctttgcttttggttgggggcagattgggttggaatgctttccatctccaggagactttcatgcagcctaaagtacagcctggaccacccctggtgtgtagctagtaagattaccctgagctgcagctgagcctgagccaatgggacagttacacttgacagacaaagatggtggagattggcatgccattgaaactaagagctctcaagtcaaggaagctgggctgggcagtatcccccgcctttagttctccac

SEQ ID NO: 15667 - DNA, 4305 bp, Homo sapiens
  source 1..4305: mol_type = unassigned DNA
cttttctcctgcaaagggtccagccttttcctgctccccacgttgtccttacggctgtgtggggtagggcagggtccacactccttcccatccattttagaggaggaagctggagtctgggaagggatgggattttcccagggcaccctgtgagtcacatgccacttgagacaagggtctagagctccagcattttccaagctacaaatgtatctgctgctccaagtgtcctagatcaggaccctaggtaaagacttctgaaaaatacttgagtctagaaacagaaaagaaaaagggctagtgtgctctaggggtttgcactgttgtacccagtttgctttgctgtgtcctaggaaaggtcctttctggggatcaccccattggctgaagatgagaccattcttcctcttgtgttttgccctgcctggcctcctgcatgcccaacaagcctgctcccgtggggcctgctatccacctgttggggacctgcttgttgggaggacccggtttctccgagcttcatctacctgtggactgaccaagcctgagacctactgcacccagtatggcgagtggcagatgaaatgctgcaagtgtgactccaggcagcctcacaactactacagtcaccgagtagagaatgtggcttcatcctccggccccatgcgctggtggcagtcacagaatgatgtgaaccctgtctctctgcagctggacctggacaggagattccagcttcaagaagtcatgatggagttccaggggcccatgcccgccggcatgctgattgagcgctcctcagacttcggtaagacctggcgagtgtaccagtacctggctgccgactgcacctccaccttccctcgggtccgccagggtcggcctcagagctggcaggatgttcggtgccagtccctgcctcagaggcctaatgcacgcctaaatggggggaaggtccaacttaaccttatggatttagtgtctgggattccagcaactcaaagtcaaaaaattcaagaggtgggggagatcacaaacttgagagtcaatttcaccaggctggcccctgtgccccaaaggggctaccaccctcccagcgcctactatgctgtgtcccagctccgtctgcaggggagctgcttctgtcacggccatgctgatcgctgcgcacccaagcctggggcctctgcaggcccctccaccgctgtgcaggtccacgatgtctgtgtctgccagcacaacactgccggcccaaattgtgagcgctgtgcacccttctacaacaaccggccctggagaccggcggagggccaggacgcccatgaatgccaaaggtgcgactgcaatgggcactcagagacatgtcactttgaccccgctgtgtttgccgccagccagggggcatatggaggtgtgtgtgacaattgccgggaccacaccgaaggcaagaactgtgagcggtgtcagctgcactatttccggaaccggcgcccgggagcttccattcaggagacctgcatctcctgcgagtgtgatccggatggggcagtgccaggggctccctgtgacccagtgaccgggcagtgtgtgtgcaaggagcatgtgcagggagagcgctgtgacctatgcaagccgggcttcactggactcacctacgccaacccgcagggctgccaccgctgtgactgcaacatcctggggtcccggagggacatgccgtgtgacgaggagagtgggcgctgcctttgtctgcccaacgtggtgggtcccaaatgtgaccagtgtgctccctaccactggaagctggccagtggccagggctgtgaaccgtgtgcctgcgacccgcacaactccctcagcccacagtgcaaccagttcacagggcagtgcccctgtcgggaaggctttggtggcctgatgtgcagcgctgcagccatccgccagtgtccagaccggacctatggagacgtggccacaggatgccgagcctgtgactgtgatttccggggaacagagggcccgggctgcgacaaggcatcaggccgctgcctctgccgccctggcttgaccgggccccgctgtgaccagtgccagcgaggctactgtaatcgctacccggtgtgcgtggcctgccacccttgcttccagacctatgatgcggacctccgggagcaggccctgcgctttggtagactccgcaatgccaccgccagcctgtggtcagggcctgggctggaggaccgtggcctggcctcccggatcctagatgcaaagagtaagattgagcagatccgagcagttctcagcagccccgcagtcacagagcaggaggtggctcaggtggccagtgccatcctctccctcaggcgaactctccagggcctgcagctggatctgcccctggaggaggagacgttgtcccttccgagagacctggagagtcttgacagaagcttcaatggtctccttactatgtatcagaggaagagggagcagtttgaaaaaataagcagtgctgatccttcaggagccttccggatgctgagcacagcctacgagcagtcagcccaggctgctcagcaggtctccgacagctcgcgccttttggaccagctcagggacagccggagagaggcagagaggctggtgcggcaggcgggaggaggaggaggcaccggcagccccaagcttgtggccctgaggctggagatgtcttcgttgcctgacctgacacccaccttcaacaagctctgtggcaactccaggcagatggcttgcaccccaatatcatgccctggtgagctatgtccccaagacaatggcacagcctgtggctcccgctgcaggggtgtccttcccagggccggtggggccttcttgatggcggggcaggtggctgagcagctgcggggcttcaatgcccagctccagcggaccaggcagatgattagggcagccgaggaatctgcctcacagattcaatccagtgcccagcgcttggagacccaggtgagcgccagccgctcccagatggaggaagatgtcagacgcacacggctcctaatccagcaggtccgggacttcctaacagaccccgacactgatgcagccactatccaggaggtcagcgaggccgtgctggccctgtggctgcccacagactcagctactgttctgcagaagatgaatgagatccaggccattgcagccaggctccccaacgtggacttggtgctgtcccagaccaagcaggacattgcgcgtgcccgccggttgcaggctgaggctgaggaagccaggagccgagcccatgcagtggagggccaggtggaagatgtggttgggaacctgcggcaggggacagtggcactgcaggaagctcaggacaccatgcaaggcaccagccgctcccttcggcttatccaggacagggttgctgaggttcagcaggtactgcggccagcagaaaagctggtgacaagcatgaccaagcagctgggtgacttctggacacggatggaggagctccgccaccaagcccggcagcagggggcagaggcagtccaggcccagcagcttgcggaaggtgccagcgagcaggcattgagtgcccaagagggatttgagagaataaaacaaaagtatgctgagttgaaggaccggttgggtcagagttccatgctgggtgagcagggtgcccggatccagagtgtgaagacagaggcagaggagctgtttggggagaccatggagatgatggacaggatgaaagacatggagttggagctgctgcggggcagccaggccatcatgctgcgctcagcggacctgacaggactggagaagcgtgtggagcagatccgtgaccacatcaatgggcgcgtgctctactatgccacctgcaagtgatgctacagcttccagcccgttgccccactcatctgccgcctttgcttttggttgggggcagattgggttggaatgctttccatctccaggagactttcatgcagcctaaagtacagcctggaccacccctggtgtgtagctagtaagattaccctgagctgcagctgagcctgagccaatgggacagttacacttgacagacaaagatggtggagattggcatgccattgaaactaagagctctcaagtcaaggaagctgggctgggcagtatcccccgcctttagttctccactggggaggaatcctggaccaagcacaaaaacttaacaaaagtgatgtaaaaatgaaaagccaaataaaaatctttggaaaagagcctggaggttcaacgagg

SEQ ID NO: 15668 - DNA, 908 bp, Homo sapiens
  source 1..908: mol_type = unassigned DNA
ccctgagaaaagccagccctctctcttggggctggaactaggtcttggccctttctacagcttttctcctgcaaagggtccagccttttcctgctccccacgttgtccttacggctgtgtggggtagggcagggtccacactccttcccatccattttagaggaggaagctggagtctgggaagggatgggattttcccagggcaccctgtgagtcacatgccacttgagacaagggtctagagctccagcattttccaagctacaaatgtatctgctgctccaagtgtcctagatcaggaccctaggaaaggtcctttctggggatcaccccattggctgaagatgagaccattcttcctcttgtgttttgccctgcctggcctcctgcatgcccaacaagcctgctcccgtggggcctgctatccacctgttggggacctgcttgttgggaggacccggtttctccgagcttcatctacctgtggactgaccaagcctgagacctactgcacccagtatggcgagtggcagatgaaatgctgcaagtgtgactccaggcagcctcacaactactacagtcaccgagtagagaatgtggcttcatcctccggccccatgcgctggtggcagtcacagaatgatgtgaaccctgtctctctgcagctggacctggacaggagattccagcttcaagaagtcatgatggagttccaggggcccatgcccgccggcatgctgattgagcgctcctcagacttcggtaagacctggcgagtgtaccagtacctggctgccgactgcacctccaccttccctcgggtccgccagggtcggcctcagagctggcaggatgttcggtgccagtccctgcctcagaggcctaatgcacgcctaaatggggggaag

SEQ ID NO: 15669 - DNA, 710 bp, Homo sapiens
  source 1..710: mol_type = unassigned DNA
agggggcagcagctccttgggacaccacggtagaggggccactgtgggtgccttccacaagtgctgctcagctaggagaggcctcgtatctctggggaggttagtgggctcctacagtcaaatgcgtgttgtcttccagaccccgacactgatgcagccactatccaggaggtcagcgaggccgtgctggccctgtggctgcccacagactcagctactgttctgcagaagatgaatgagatccaggccattgcagccaggctccccaacgtggacttggtgctgtcccagaccaagcaggacattgcgcgtgcccgccggttgcaggctgaggctgaggaagccaggagccgagcccatgcagtggagggccaggtggaagatgtggttgggaacctgcggcaggggacagtggcactgcaggaagctcaggacaccatgcaaggcaccagccgctcccttcggcttatccaggacagggttgctgaggttcagcaggtactgcggccagcagaaaagctggtgacaagcatgaccaagcagctgggtgacttctggacacggatggaggagctccgccaccaagcccggcagcagggggcagaggcagtccaggcccagcagcttgcggaaggtgccagcgagcaggcattgagtgcccaagagggatttgagagaataaaacaaaagtatgctgagttgaaggaccg

SEQ ID NO: 15670 - DNA, 7887 bp, Homo sapiens
  source 1..7887: mol_type = unassigned DNA
gcaggctgctcccggggtaggtgagggaagcgcggaggcggcgcgcgggggcagtggtcggcgagcagcgcggtcctcgctaggggcgcccacccgtcagtctctccggcgcgagccgccgccaccgcccgcgccggagtcaggcccctgggcccccaggctcaagcagcgaagcggcctccgggggacgccgctaggcgagaggaacgcgccggtgcccttgccttcgccgtgacccagcgtgcgggcggcgggatgagagggagccatcgggccgcgccggccctgcggccccgggggcggctctggcccgtgctggccgtgctggcggcggccgccgcggcgggctgtgcccaggcagccatggacgagtgcacggacgagggcgggcggccgcagcgctgcatgcccgagttcgtcaacgccgccttcaacgtgactgtggtggccaccaacacgtgtgggactccgcccgaggaatactgtgtgcagaccggggtgaccggggtcaccaagtcctgtcacctgtgcgacgccgggcagccccacctgcagcacggggcagccttcctgaccgactacaacaaccaggccgacaccacctggtggcaaagccagaccatgctggccggggtgcagtaccccagctccatcaacctcacgctgcacctgggaaaagcttttgacatcacctatgtgcgtctcaagttccacaccagccgcccggagagctttgccatttacaagcgcacacgggaagacgggccctggattccttaccagtactacagtggttcctgtgagaacacctactccaaggcaaaccgcggcttcatcaggacaggaggggacgagcagcaggccttgtgtactgatgaattcagtgacatttctcccctcactgggggcaacgtggccttttctaccctggaaggaaggcccagcgcctataactttgacaatagccctgtgctgcaggaatgggtaactgccactgacatcagagtaactcttaatcgcctgaacacttttggagatgaagtgtttaacgatcccaaagttctcaagtcctattattatgccatctctgattttgctgtaggtggcagatgtaaatgtaatggacacgcaagcgagtgtatgaagaacgaatttgataagctggtgtgtaattgcaaacataacacatatggagtagactgtgaaaagtgtcttcctttcttcaatgaccggccgtggaggagggcaactgcggaaagtgccagtgaatgcctgccctgtgattgcaatggtcgatcccaggaatgctacttcgaccctgaactctatcgttccactggccatgggggccactgtaccaactgccaggataacacagatggcgcccactgtgagaggtgccgagagaacttcttccgccttggcaacaatgaagcctgctcttcatgccactgtagtcctgtgggctctctaagcacacagtgtgatagttacggcagatgcagctgtaagccaggagtgatgggggacaaatgtgaccgttgccagcctggattccattctctcactgaagcaggatgcaggccatgctcttgtgatccctctggcagcatagatgaatgtaatattgaaacaggaagatgtgtttgcaaagacaatgtcgaaggcttcaattgtgaaagatgcaaacctggattttttaatctggaatcatctaatcctcggggttgcacaccctgcttctgctttgggcattcttctgtctgtacaaacgctgttggctacagtgtttattctatctcctctacctttcagattgatgaggatgggtggcgtgcggaacagagagatggctctgaagcatctctcgagtggtcctctgagaggcaagatatcgccgtgatctcagacagctactttcctcggtacttcattgctcctgcaaagttcttgggcaagcaggtgttgagttatggtcagaacctctccttctcctttcgagtggacaggcgagatactcgcctctctgcagaagaccttgtgcttgagggagctggcttaagagtatctgtacccttgatcgctcagggcaattcctatccaagtgagaccactgtgaagtatgtcttcaggctccatgaagcaacagattacccttggaggcctgctcttaccccttttgaatttcagaagctcctaaacaacttgacctctatcaagatacgtgggacatacagtgagagaagtgctggatatttggatgatgtcaccctggcaagtgctcgtcctgggcctggagtccctgcaacttgggtggagtcctgcacctgtcctgtgggatatggagggcagttttgtgagatgtgcctctcaggttacagaagagaaactcctaatcttggaccatacagtccatgtgtgctttgcgcctgcaatggacacagcgagacctgtgatcctgagacaggtgtttgtaactgcagagacaatacggctggcccgcactgtgagaagtgcagtgatgggtactatggagattcaactgcaggcacctcctccgattgccaaccctgtccgtgtcctggaggttcaagttgtgctgttgttcccaagacaaaggaggtggtgtgcaccaactgtcctactggcaccactggtaagagatgtgagctctgtgatgatggctactttggagaccccctgggtagaaacggccctgtgagactttgccgcctgtgccagtgcagtgacaacatcgatcccaatgcagttggaaattgcaatcgcttgacgggagaatgcctgaagtgcatctataacactgctggcttctattgtgaccggtgcaaagacggattttttggaaatcccctggctcccaatccagcagacaaatgcaaagcctgcaattgcaatctgtatgggaccatgaagcagcagagcagctgtaaccccgtgacggggcagtgtgaatgtttgcctcacgtgactggccaggactgtggtgcttgtgaccctggattctacaatctgcagagtgggcaaggctgtgagaggtgtgactgccatgccttgggctccaccaatgggcagtgtgacatccgcaccggccagtgtgagtgccagcccggcatcactggtcagcactgtgagcgctgtgaggtcaaccactttgggtttggacctgaaggctgcaaaccctgtgactgtcatcctgagggatctctttcacttcagtgcaaagatgatggtcgctgtgaatgcagagaaggctttgtgggaaatcgctgtgaccagtgtgaagaaaactatttctacaatcggtcttggcctggctgccaggaatgtccagcttgttaccggctggtaaaggataaggttgctgatcatagagtgaagctccaggaattagagagtctcatagcaaaccttggaactggggatgagatggtgacagatcaagccttcgaggatagactaaaggaagcagagagggaagttatggacctccttcgtgaggcccaggatgtcaaagatgttgaccagaatttgatggatcgcctacagagagtgaataacactctgtccagccaaattagccgtttacagaatatccggaataccattgaagagactggaaacttggctgaacaagcgcgtgcccatgtagagaacacagagcggttgattgaaatcgcatccagagaacttgagaaagcaaaagtcgctgctgccaatgtgtcagtcactcagccagaatctacaggggacccaaacaacatgactcttttggcagaagaggctcgaaagcttgctgaacgtcataaacaggaagctgatgacattgttcgagtggcaaagacagccaatgatacgtcaactgaggcatacaacctgcttctgaggacactggcaggagaaaatcaaacagcatttgagattgaagagcttaataggaagtatgaacaagcgaagaacatctcacaggatctggaaaaacaagctgcccgagtacatgaggaggccaaaagggccggtgacaaagctgtggagatctatgccagcgtggctcagctgagccctttggactctgagacactggagaatgaagcaaataacataaagatggaagctgagaatctggaacaactgattgaccagaaattaaaagattatgaggacctcagagaagatatgagagggaaggaacttgaagtcaagaaccttctggagaaaggcaagactgaacagcagaccgcagaccaactcctagcccgagctgatgctgccaaggccctcgctgaagaagctgcaaagaagggacgggataccttacaagaagctaatgacattctcaacaacctgaaagattttgataggcgtgtgaacgataacaagacggccgcagaggaggcactaaggaagattcctgccatcaaccagaccatcactgaagccaatgaaaagaccagagaagcccagcaggccctgggcagtgctgcggcggatgccacagaggccaagaacaaggcccatgaggcggagaggatcgcgagcgctgtccaaaagaatgccaccagcaccaaggcagaagctgaaagaacttttgcagaagttacagatctggataatgaggtgaacaatatgttgaagcaactgcaggaagcagaaaaagagctaaagagaaaacaagatgacgctgaccaggacatgatgatggcagggatggcttcacaggctgctcaagaagccgagatcaatgccagaaaagccaaaaactctgttactagcctcctcagcattattaatgacctcttggagcagctggggcagctggatacagtggacctgaataagctaaacgagattgaaggcaccctaaacaaagccaaagatgaaatgaaggtcagcgatcttgataggaaagtgtctgacctggagaatgaagccaagaagcaggaggctgccatcatggactataaccgagatatcgaggagatcatgaaggacattcgcaatctggaggacatcaggaagaccttaccatctggctgcttcaacaccccgtccattgaaaagccctagtgtctttagggctggaaggcagcatccctctgacaggggggcagttgtgaggccacagagtgccttgacacaaagattacatttttcagacccccactcctctgctgctgtccatgactgtccttttgaaccaggaaaagtcacagagtttaaagagaagcaaattaaacatcctgaatcgggaacaaagggttttatctaataaagtgtctcttccattcacgttgctaccttacccacactttcccttctgatttgcgtgaggacgtggcatcctacgttactgtacagtggcataagcacatcgtgtgagcccatgtatgctggggtagagcaagtagccctcccctgtctcatcgataccagcagaacctcctcagtctcagtactcttgtttctatgaaggaaaagtttggctactaacagtagcattgtgatggccagtatatccagtccatggataaagaaaatgcatctgcatctcctacccctcttccttctaagcaaaaggaaataaacatcctgtgccaaaggtattggtcatttagaatgtcggtagccatccatcagtgcttttagttattatgagtgtaggacactgagccatccgtgggtcaggatgcaattatttataaaagtctccaggtgaacatggctgaagatttttctagtatattaataattgactaggaagatgaactttttttcagatctttgggcagctgataatttaaatctggatgggcagcttgcactcaccaatagaccaaaagacatcttttgatattcttataaatggaacttacacagaagaaatagggatatgataaccactaaaattttgttttcaaaatcaaactaattcttacagcttttttattagttagtcttggaactagtgttaagtatctggcagagaacagttaatccctaaggtcttgacaaaacagaagaaaaacaagcctcctcgtcctagtcttttctagcaaagggataaaacttagatggcagcttgtactgtcagaatcccgtgtatccatttgttcttctgttggagagatgagacatttgacccttagctccagttttcttctgatgtttccatcttccagaatccctcaaaaaacattgtttgccaaatcctggtggcaaatacttgcactcagtatttcacacagctgccaacgctatcgagttcctgcactttgtgatttaaatccactctaaaccttccctctaagtgtagagggaagacccttacgtggagtttcctagtgggcttctcaacttttgatcctcagctctgtggttttaagaccacagtgtgacagttccctgccacacacccccttcctcctaccaacccacctttgagattcatatatagcctttaacactatgcaactttgtactttgcgtagcaggggcggggtggggggaaagaaactattatctgacacactggtgctattaattatttcaaatttatatttttgtgtgaatgttttgtgttttgtttatcatgattatagaataaggaatttatgtaaatatacttagtcctatttctagaatgacactctgttcactttgctcaatttttcctcttcactggcacaatgtatctgaatacctccttccctcccttctagaattctttggattgtactccaaagaattgtgccttgtgtttgcagcatctccattctctaaaattaatataattgctttcctccacacccagccactgtaaagaggtaacttgggtcctcttccattgcagtcctgatgatcctaacctgcagcacggtggttttacaatgttccagagcaggaacgccaggttgacaagctatggtaggattaggaaagtttgctgaagaggatctttgacgccacagtgggactagccaggaatgagggagaaatgccctttctggcaattgttggagctggataggtaagttttataagggagtacattttgactgagcacttagggcatcaggaacagtgctacttactgatgggtagactgggagaggtggtgtaacttagttcttgatgatcccacttcctgtttccatctgcttgggatataccagagtttaccacaagtgttttgacgatatactcctgagctttcactctgctgcttctcccaggcctcttctactatggcaggagatgtggcgtgctgttgcaaagttttcacgtcattgtttcctggctagttcatttcattaagtggctacatcctaacatatgcatttggtcaaggttgcagaagaggactgaagattgactgccaagctagtttgggtgaagttcactccagcaagtctcaggccacaatggggtggtttggtttggtttccttttaactttctttttgttatttgcttttctcctccacctgtgtggtatattttttaagcagaattttattttttaaaataaaaggttctttacaagatgataccttaattacactcccgcaacacagccattattttattgtctagctccagttatctgtattttatgtaatgtaattgacaggatggctgctgcagaatgctggttgacacagggattattatactgctatttttccctgaatttttttcctttgaattccaactgtggaccttttatatgtgccttcactttagctgtttgccttaatctctacagccttgctctccggggtggttaataaaatgcaacacttggcatttttatgttttaagaaaaacagtattttatttataataaaatctgaatatttgtaacccttta

SEQ ID NO: 15671 - DNA, 5147 bp, Homo sapiens
  source 1..5147: mol_type = unassigned DNA
accaaccgaggcgccgggcagcgacccctgcagcggagacagagactgagcggcccggccccgccatgcctgcgctctggctgggctgctgcctctgcttctcgctcctcctgcccgcagcccgggccacctccaggagggaagtctgtgattgcaatgggaagtccaggcagtgtatctttgatcgggaacttcacagacaaactggtaatggattccgctgcctcaactgcaatgacaacactgatggcattcactgcgagaagtgcaagaatggcttttaccggcacagagaaagggaccgctgtttgccctgcaattgtaactccaaaggttctcttagtgctcgatgtgacaactccggacggtgcagctgtaaaccaggtgtgacaggagccagatgcgaccgatgtctgccaggcttccacatgctcacggatgcggggtgcacccaagaccagagactgctagactccaagtgtgactgtgacccagctggcatcgcagggccctgtgacgcgggccgctgtgtctgcaagccagctgtcactggagaacgctgtgataggtgtcgatcaggttactataatctggatggggggaaccctgagggctgtacccagtgtttctgctatgggcattcagccagctgccgcagctctgcagaatacagtgtccataagatcacctctacctttcatcaagatgttgatggctggaaggctgtccaacgaaatgggtctcctgcaaagctccaatggtcacagcgccatcaagatgtgtttagctcagcccaacgactagaccctgtctattttgtggctcctgccaaatttcttgggaatcaacaggtgagctatggtcaaagcctgtcctttgactaccgtgtggacagaggaggcagacacccatctgcccatgatgtgattctggaaggtgctggtctacggatcacagctcccttgatgccacttggcaagacactgccttgtgggctcaccaagacttacacattcaggttaaatgagcatccaagcaataattggagcccccagctgagttactttgagtatcgaaggttactgcggaatctcacagccctccgcatccgagctacatatggagaatacagtactgggtacattgacaatgtgaccctgatttcagcccgccctgtctctggagccccagcaccctgggttgaacagtgtatatgtcctgttgggtacaaggggcaattctgccaggattgtgcttctggctacaagagagattcagcgagactggggccttttggcacctgtattccttgtaactgtcaagggggaggggcctgtgatccagacacaggagattgttattcaggggatgagaatcctgacattgagtgtgctgactgcccaattggtttctacaacgatccgcacgacccccgcagctgcaagccatgtccctgtcataacgggttcagctgctcagtgatgccggagacggaggaggtggtgtgcaataactgccctcccggggtcaccggtgcccgctgtgagctctgtgctgatggctactttggggacccctttggtgaacatggcccagtgaggccttgtcagccctgtcaatgcaacaacaatgtggaccccagtgcctctgggaattgtgaccggctgacaggcaggtgtttgaagtgtatccacaacacagccggcatctactgcgaccagtgcaaagcaggctacttcggggacccattggctcccaacccagcagacaagtgtcgagcttgcaactgtaaccccatgggctcagagcctgtaggatgtcgaagtgatggcacctgtgtttgcaagccaggatttggtggccccaactgtgagcatggagcattcagctgtccagcttgctataatcaagtgaagattcagatggatcagtttatgcagcagcttcagagaatggaggccctgatttcaaaggctcagggtggtgatggagtagtacctgatacagagctggaaggcaggatgcagcaggctgagcaggcccttcaggacattctgagagatgcccagatttcagaaggtgctagcagatcccttggtctccagttggccaaggtgaggagccaagagaacagctaccagagccgcctggatgacctcaagatgactgtggaaagagttcgggctctgggaagtcagtaccagaaccgagttcgggatactcacaggctcatcactcagatgcagctgagcctggcagaaagtgaagcttccttgggaaacactaacattcctgcctcagaccactacgtggggccaaatggctttaaaagtctggctcaggaggccacaagattagcagaaagccacgttgagtcagccagtaacatggagcaactgacaagggaaactgaggactattccaaacaagccctctcactggtgcgcaaggccctgcatgaaggagtcggaagcggaagcggtagcccggacggtgctgtggtgcaagggcttgtggaaaaattggagaaaaccaagtccctggcccagcagttgacaagggaggccactcaagcggaaattgaagcagataggtcttatcagcacagtctccgcctcctggattcagtgtctcggcttcagggagtcagtgatcagtcctttcaggtggaagaagcaaagaggatcaaacaaaaagcggattcactctcaagcctggtaaccaggcatatggatgagttcaagcgtacacagaagaatctgggaaactggaaagaagaagcacagcagctcttacagaatggaaaaagtgggagagagaaatcagatcagctgctttcccgtgccaatcttgctaaaagcagagcacaagaagcactgagtatgggcaatgccactttttatgaagttgagagcatccttaaaaacctcagagagtttgacctgcaggtggacaacagaaaagcagaagctgaagaagccatgaagagactctcctacatcagccagaaggtttcagatgccagtgacaagacccagcaagcagaaagagccctggggagcgctgctgctgatgcacagagggcaaagaatggggccggggaggccctggaaatctccagtgagattgaacaggagattgggagtctgaacttggaagccaatgtgacagcagatggagccttggccatggaaaagggactggcctctctgaagagtgagatgagggaagtggaaggagagctggaaaggaaggagctggagtttgacacgaatatggatgcagtacagatggtgattacagaagcccagaaggttgataccagagccaagaacgctggggttacaatccaagacacactcaacacattagacggcctcctgcatctgatggaccagcctctcagtgtagatgaagaggggctggtcttactggagcagaagctttcccgagccaagacccagatcaacagccaactgcggcccatgatgtcagagctggaagagagggcacgtcagcagaggggccacctccatttgctggagacaagcatagatgggattctggctgatgtgaagaacttggagaacattagggacaacctgcccccaggctgctacaatacccaggctcttgagcaacagtgaagctgccataaatatttctcaactgaggttcttgggatacagatctcagggctcgggagccatgtcatgtgagtgggtgggatggggacatttgaacatgtttaatgggtatgctcaggtcaactgacctgaccccattcctgatcccatggccaggtggttgtcttattgcaccatactccttgcttcctgatgctgggcaatgaggcagatagcactgggtgtgagaatgatcaaggatctggaccccaaagaatagactggatggaaagacaaactgcacaggcagatgtttgcctcataatagtcgtaagtggagtcctggaatttggacaagtgctgttgggatatagtcaacttattctttgagtaatgtgactaaaggaaaaaactttgactttgcccaggcatgaaattcttcctaatgtcagaacagagtgcaacccagtcacactgtggccagtaaaatactattgcctcatattgtcctctgcaagcttcttgctgatcagagttcctcctacttacaacccagggtgtgaacatgttctccattttcaagctggaagaagtgagcagtgttggagtgaggacctgtaaggcaggcccattcagagctatggtgcttgctggtgcctgccaccttcaagttctggacctgggcatgacatcctttcttttaatgatgccatggcaacttagagattgcatttttattaaagcatttcctaccagcaaagcaaatgttgggaaagtatttactttttcggtttcaaagtgatagaaaagtgtggcttgggcattgaaagaggtaaaattctctagatttattagtcctaattcaatcctacttttcgaacaccaaaaatgatgcgcatcaatgtattttatcttattttctcaatctcctctctctttcctccacccataataagagaatgttcctactcacacttcagctgggtcacatccatccctccattcatccttccatccatctttccatccattacctccatccatccttccaacatatatttattgagtacctactgtgtgccaggggctggtgggacagtggtgacatagtctctgccctcatagagttgattgtctagtgaggaagacaagcatttttaaaaaataaatttaaacttacaaactttgtttgtcacaagtggtgtttattgcaataaccgcttggtttgcaacctctttgctcaacagaacatatgttgcaagaccctcccatgggggcacttgagttttggcaaggctgacagagctctgggttgtgcacatttctttgcattccagctgtcactctgtgcctttctacaactgattgcaacagactgttgagttatgataacaccagtgggaattgctggaggaaccagaggcacttccaccttggctgggaagactatggtgctgccttgcttctgtatttccttggattttcctgaaagtgtttttaaataaagaacaattgttaga

SEQ ID NO: 15672 - DNA, 4313 bp, Homo sapiens
  source 1..4313: mol_type = unassigned DNA
accacctgatcaaggaaaaggaaggcacagcggagcgcagagtgagaaccaccaaccgaggcgccgggcagcgacccctgcagcggagacagagactgagcggcccggccccgccatgcctgcgctctggctgggctgctgcctctgcttctcgctcctcctgcccgcagcccgggccacctccaggagggaagtctgtgattgcaatgggaagtccaggcagtgtatctttgatcgggaacttcacagacaaactggtaatggattccgctgcctcaactgcaatgacaacactgatggcattcactgcgagaagtgcaagaatggcttttaccggcacagagaaagggaccgctgtttgccctgcaattgtaactccaaaggttctcttagtgctcgatgtgacaactccggacggtgcagctgtaaaccaggtgtgacaggagccagatgcgaccgatgtctgccaggcttccacatgctcacggatgcggggtgcacccaagaccagagactgctagactccaagtgtgactgtgacccagctggcatcgcagggccctgtgacgcgggccgctgtgtctgcaagccagctgtcactggagaacgctgtgataggtgtcgatcaggttactataatctggatggggggaaccctgagggctgtacccagtgtttctgctatgggcattcagccagctgccgcagctctgcagaatacagtgtccataagatcacctctacctttcatcaagatgttgatggctggaaggctgtccaacgaaatgggtctcctgcaaagctccaatggtcacagcgccatcaagatgtgtttagctcagcccaacgactagaccctgtctattttgtggctcctgccaaatttcttgggaatcaacaggtgagctatggtcaaagcctgtcctttgactaccgtgtggacagaggaggcagacacccatctgcccatgatgtgattctggaaggtgctggtctacggatcacagctcccttgatgccacttggcaagacactgccttgtgggctcaccaagacttacacattcaggttaaatgagcatccaagcaataattggagcccccagctgagttactttgagtatcgaaggttactgcggaatctcacagccctccgcatccgagctacatatggagaatacagtactgggtacattgacaatgtgaccctgatttcagcccgccctgtctctggagccccagcaccctgggttgaacagtgtatatgtcctgttgggtacaaggggcaattctgccaggattgtgcttctggctacaagagagattcagcgagactggggccttttggcacctgtattccttgtaactgtcaagggggaggggcctgtgatccagacacaggagattgttattcaggggatgagaatcctgacattgagtgtgctgactgcccaattggtttctacaacgatccgcacgacccccgcagctgcaagccatgtccctgtcataacgggttcagctgctcagtgatgccggagacggaggaggtggtgtgcaataactgccctcccggggtcaccggtgcccgctgtgagctctgtgctgatggctactttggggacccctttggtgaacatggcccagtgaggccttgtcagccctgtcaatgcaacaacaatgtggaccccagtgcctctgggaattgtgaccggctgacaggcaggtgtttgaagtgtatccacaacacagccggcatctactgcgaccagtgcaaagcaggctacttcggggacccattggctcccaacccagcagacaagtgtcgagcttgcaactgtaaccccatgggctcagagcctgtaggatgtcgaagtgatggcacctgtgtttgcaagccaggatttggtggccccaactgtgagcatggagcattcagctgtccagcttgctataatcaagtgaagattcagatggatcagtttatgcagcagcttcagagaatggaggccctgatttcaaaggctcagggtggtgatggagtagtacctgatacagagctggaaggcaggatgcagcaggctgagcaggcccttcaggacattctgagagatgcccagatttcagaaggtgctagcagatcccttggtctccagttggccaaggtgaggagccaagagaacagctaccagagccgcctggatgacctcaagatgactgtggaaagagttcgggctctgggaagtcagtaccagaaccgagttcgggatactcacaggctcatcactcagatgcagctgagcctggcagaaagtgaagcttccttgggaaacactaacattcctgcctcagaccactacgtggggccaaatggctttaaaagtctggctcaggaggccacaagattagcagaaagccacgttgagtcagccagtaacatggagcaactgacaagggaaactgaggactattccaaacaagccctctcactggtgcgcaaggccctgcatgaaggagtcggaagcggaagcggtagcccggacggtgctgtggtgcaagggcttgtggaaaaattggagaaaaccaagtccctggcccagcagttgacaagggaggccactcaagcggaaattgaagcagataggtcttatcagcacagtctccgcctcctggattcagtgtctcggcttcagggagtcagtgatcagtcctttcaggtggaagaagcaaagaggatcaaacaaaaagcggattcactctcaagcctggtaaccaggcatatggatgagttcaagcgtacacagaagaatctgggaaactggaaagaagaagcacagcagctcttacagaatggaaaaagtgggagagagaaatcagatcagctgctttcccgtgccaatcttgctaaaagcagagcacaagaagcactgagtatgggcaatgccactttttatgaagttgagagcatccttaaaaacctcagagagtttgacctgcaggtggacaacagaaaagcagaagctgaagaagccatgaagagactctcctacatcagccagaaggtttcagatgccagtgacaagacccagcaagcagaaagagccctggggagcgctgctgctgatgcacagagggcaaagaatggggccggggaggccctggaaatctccagtgagattgaacaggagattgggagtctgaacttggaagccaatgtgacagcagatggagccttggccatggaaaagggactggcctctctgaagagtgagatgagggaagtggaaggagagctggaaaggaaggagctggagtttgacacgaatatggatgcagtacagatggtgattacagaagcccagaaggttgataccagagccaagaacgctggggttacaatccaagacacactcaacacattagacggcctcctgcatctgatgggtatgtgaacccacaacccacaaccttccagctccatgctccagggctttgctccagaacactcactatacctagccccagcaaaggggagtctcagctttccttaaggatatcagtaaatgtgctttgtttccaggcccagataactttcggcaggttcccttacatttactggaccctgttttaccgttgctaagatgggtcactgaacacctattgcacttgggggtaaaggtctgtgggccaaagaacaggtgtatataagcaacttcacagaacacgagacagcttgggaatcctgctaaagagtctggcctggaccctgagaagccagtggacagttttaagcagaggaataacatcaccactgtatatttcagaaagatcactagggcagccgagtggaggaaagcttgaagagggggttagagagaaggcaggttgagactacttaagatattgttgaaataattgaagagagaaatgacaggagcctgctctaaggcagtagaatggtggctgggaagatgtgaaggaagattttcccagtctgtgaagtcaagaatcacttgccggccgggtgtggtggctcacgcctgtaattctagcactttgggagactgaagcgggtggatcacccgaggtcaggagttgaagaccagcctggccaacatggtgaaaccctgtctctactaaaagtacaaaaattagctggatgtggtggtgggcgcctgtaattccagctactcaggagtctgaggcaggagaatcgcttgaacccaggaggcggaggttacagtgagccaagattgcaccactgctctccagcctggggaacagagcaagactgtctcaaaaaaaaaaaaaaaa

SEQ ID NO: 15673 - DNA, 4345 bp, Homo sapiens
  source 1..4345: mol_type = unassigned DNA
agagtgagaaccaccaaccgaggcgccgggcagcgacccctgcagcggagacagagactgagcggcccggccccgccatgcctgcgctctggctgggctgctgcctctgcttctcgctcctcctgcccgcagcccgggccacctccaggagggaagtctgtgattgcaatgggaagtccaggcagtgtatctttgatcgggaacttcacagacaaactggtaatggattccgctgcctcaactgcaatgacaacactgatggcattcactgcgagaagtgcaagaatggcttttaccggcacagagaaagggaccgctgtttgccctgcaattgtaactccaaaggttctcttagtgctcgatgtgacaactccggacggtgcagctgtaaaccaggtgtgacaggagccagatgcgaccgatgtctgccaggcttccacatgctcacggatgcggggtgcacccaagaccagagactgctagactccaagtgtgactgtgacccagctggcatcgcagggccctgtgacgcgggccgctgtgtctgcaagccagctgtcactggagaacgctgtgataggtgtcgatcaggttactataatctggatggggggaaccctgagggctgtacccagtgtttctgctatgggcattcagccagctgccgcagctctgcagaatacagtgtccataagatcacctctacctttcatcaagatgttgatggctggaaggctgtccaacgaaatgggtctcctgcaaagctccaatggtcacagcgccatcaagatgtgtttagctcagcccaacgactagaccctgtctattttgtggctcctgccaaatttcttgggaatcaacaggtgagctatggtcaaagcctgtcctttgactaccgtgtggacagaggaggcagacacccatctgcccatgatgtgattctggaaggtgctggtctacggatcacagctcccttgatgccacttggcaagacactgccttgtgggctcaccaagacttacacattcaggttaaatgagcatccaagcaataattggagcccccagctgagttactttgagtatcgaaggttactgcggaatctcacagccctccgcatccgagctacatatggagaatacagtactgggtacattgacaatgtgaccctgatttcagcccgccctgtctctggagccccagcaccctgggttgaacagtgtatatgtcctgttgggtacaaggggcaattctgccaggattgtgcttctggctacaagagagattcagcgagactggggccttttggcacctgtattccttgtaactgtcaagggggaggggcctgtgatccagacacaggagattgttattcaggggatgagaatcctgacattgagtgtgctgactgcccaattggtttctacaacgatccgcacgacccccgcagctgcaagccatgtccctgtcataacgggttcagctgctcagtgatgccggagacggaggaggtggtgtgcaataactgccctcccggggtcaccggtgcccgctgtgagctctgtgctgatggctactttggggacccctttggtgaacatggcccagtgaggccttgtcagccctgtcaatgcaacaacaatgtggaccccagtgcctctgggaattgtgaccggctgacaggcaggtgtttgaagtgtatccacaacacagccggcatctactgcgaccagtgcaaagcaggctacttcggggacccattggctcccaacccagcagacaagtgtcgagcttgcaactgtaaccccatgggctcagagcctgtaggatgtcgaagtgatggcacctgtgtttgcaagccaggatttggtggccccaactgtgagcatggagcattcagctgtccagcttgctataatcaagtgaagattcagatggatcagtttatgcagcagcttcagagaatggaggccctgatttcaaaggctcagggtggtgatggagtagtacctgatacagagctggaaggcaggatgcagcaggctgagcaggcccttcaggacattctgagagatgcccagatttcagaaggtgctagcagatcccttggtctccagttggccaaggtgaggagccaagagaacagctaccagagccgcctggatgacctcaagatgactgtggaaagagttcgggctctgggaagtcagtaccagaaccgagttcgggatactcacaggctcatcactcagatgcagctgagcctggcagaaagtgaagcttccttgggaaacactaacattcctgcctcagaccactacgtggggccaaatggctttaaaagtctggctcaggaggccacaagattagcagaaagccacgttgagtcagccagtaacatggagcaactgacaagggaaactgaggactattccaaacaagccctctcactggtgcgcaaggccctgcatgaaggagtcggaagcggaagcggtagcccggacggtgctgtggtgcaagggcttgtggaaaaattggagaaaaccaagtccctggcccagcagttgacaagggaggccactcaagcggaaattgaagcagataggtcttatcagcacagtctccgcctcctggattcagtgtctcggcttcagggagtcagtgatcagtcctttcaggtggaagaagcaaagaggatcaaacaaaaagcggattcactctcaagcctggtaaccaggcatatggatgagttcaagcgtacacagaagaatctgggaaactggaaagaagaagcacagcagctcttacagaatggaaaaagtgggagagagaaatcagatcagctgctttcccgtgccaatcttgctaaaagcagagcacaagaagcactgagtatgggcaatgccactttttatgaagttgagagcatccttaaaaacctcagagagtttgacctgcaggtggacaacagaaaagcagaagctttcccgagccaagacccagatcaacagccaactgcggcccatgatgtcagagctggaagagagggcacgtcagcagaggggccacctccatttgctggagacaagcatagatgggattctggctgatgtgaagaacttggagaacattagggacaacctgcccccaggctgctacaatacccaggctcttgagcaacagtgaagctgccataaatatttctcaactgaggttcttgggatacagatctcagggctcgggagccatgtcatgtgagtgggtgggatggggacatttgaacatgtttaatgggtatgctcaggtcaactgacctgaccccattcctgatcccatggccaggtggttgtcttattgcaccatactccttgcttcctgatgctgggcaatgaggcagatagcactgggtgtgagaatgatcaaggatctggaccccaaagaatagactggatggaaagacaaactgcacaggcagatgtttgcctcataatagtcgtaagtggagtcctggaatttggacaagtgctgttgggatatagtcaacttattctttgagtaatgtgactaaaggaaaaaactttgactttgcccaggcatgaaattcttcctaatgtcagaacagagtgcaacccagtcacactgtggccagtaaaatactattgcctcatattgtcctctgcaagcttcttgctgatcagagttcctcctacttacaacccagggtgtgaacatgttctccattttcaagctggaagaagtgagcagtgttggagtgaggacctgtaaggcaggcccattcagagctatggtgcttgctggtgcctgccaccttcaagttctggacctgggcatgacatcctttcttttaatgatgccatggcaacttagagattgcatttttattaaagcatttcctaccagcaaagcaaatgttgggaaagtatttactttttcggtttcaaagtgatagaaaagtgtggcttgggcattgaaagaggtaaaattctctagatttattagtcctaattcaatcctacttttcgaacaccaaaaatgatgcgcatcaatgtattttatcttattttctcaatctcctctctctttcctccacccataataagagaatgttcctactcacacttcagctgggtcacatccatccctccattcatccttccatccatctttccatccattacctccatccatccttccaacatatatttattgagtacctactgtgtgccaggggctggtgggacagtggtgacatagtctctgccctcatagagttgattgtctagtgaggaagacaagcatttttaaaaaataaatttaaacttac

SEQ ID NO: 15674 - DNA, 1688 bp, Homo sapiens
  source 1..1688: mol_type = unassigned DNA
ccccgcaggggaaggcgggtcctggcggccagcgcgcggtccgcgcccaccctagccgagcggggccggcagagcgcgcggcgtcggtgcccttgaccatggcggcggctgcgcttctgctggggctggcgctgctggcaccgcgggcggccggcgcgggcatgggcgcgtgctatgacggcgcagggcgcccgcagcgctgcctgccggtgttcgagaacgcggcgtttgggcggctcgcccaggcctcgcacacgtgcggcagcccgcccgaggacttctgtccccacgtgggcgccgcgggcgcgggggctcattgccagcgctgcgacgccgccgacccccagcgccaccacaacgcctcctacctcaccgacttccacagccaggacgagagcacctggtggcagagcccgtccatggccttcggcgtgcagtaccccacctcggtcaacatcaccctccgcctagggaaggcttatgagatcacgtatgtgaggctgaagttccacaccagtcgccctgagagctttgccatctacaagcgcagccgcgccgacggcccatgggagccctaccagttctacagcgcctcctgccagaagacctacggccggcccgagggccagtacctgcgccccggcgaggacgagcgcgtggccttctgcacctctgagttcagcgacatctccccgctgagtggcggcaacgtggccttctccaccctggagggccggcccagcgcctacaacttcgaggagagccctgggctgcaggagtgggtcaccagcaccgaactcctcatctctctagaccggctcaacacgtttggggacgacatcttcaaggaccccaaggtgctccagtcctactattatgccgtgtccgacttctctgtgggcggcaggtgcaagtgcaacgggcatgccagcgagtgcggccccgacgtggcaggccagttggcctgccggtgccagcacaacaccaccggcacagactgtgagcgctgcctgcccttcttccaggaccgcccgtgggcccggggcaccgccgaggctgcccacgagtgtctgccctgcaactgcagtggccgctccgaggaatgcacgtttgatcgggagctcttccgcagcacaggccacggcgggcgctgtcaccactgccgtgaccacacagctgggccacactgtgagcgctgtcaggagaatttctatcactgggacccgcggatgccatgccagccctgtgactgccagtcggcaggctccctacacctccagtgcgatgacacaggcacctgcgcctgcaagcccacggtgactggctggaagtgtgaccgctgtctgcccgggttccactcgctcagtgagggaggctgcagaccctgcacttgcaatcccgctggcagcctggacacctgtgacccccgcagtgggcgctgcccctgcaaagagaatgtggaaggcaacctatgtgacagatgtcgcccggggacctttaacctgcagccccacaatccagctggcaggagctgcagatccagggcttcgagagtgacctcgccgagatccgcgccgacaaacagaacctggaggccattctgcacagcctgcccgagaactgtgccagctggcagtgagggctgcccagatccccggcacacactcccccacctgctgtttacatga

SEQ ID NO: 15675 - DNA, 6133 bp, Homo sapiens
  source 1..6133: mol_type = unassigned DNA
gccgccgccgcccgcccctccctccagcctccccgccccgcaggggaaggcgggtcctggcggccagcgcgcggtccgcgcccaccctagccgagcggggccggcagagcgcgcggcgtcggtgcccttgaccatggcggcggctgcgcttctgctggggctggcgctgctggcaccgcgggcggccggcgcgggcatgggcgcgtgctatgacggcgcagggcgcccgcagcgctgcctgccggtgttcgagaacgcggcgtttgggcggctcgcccaggcctcgcacacgtgcggcagcccgcccgaggacttctgtccccacgtgggcgccgcgggcgcgggggctcattgccagcgctgcgacgccgccgacccccagcgccaccacaacgcctcctacctcaccgacttccacagccaggacgagagcacctggtggcagagcccgtccatggccttcggcgtgcagtaccccacctcggtcaacatcaccctccgcctagggaaggcttatgagatcacgtatgtgaggctgaagttccacaccagtcgccctgagagctttgccatctacaagcgcagccgcgccgacggcccatgggagccctaccagttctacagcgcctcctgccagaagacctacggccggcccgagggccagtacctgcgccccggcgaggacgagcgcgtggccttctgcacctctgagttcagcgacatctccccgctgagtggcggcaacgtggccttctccaccctggagggccggcccagcgcctacaacttcgaggagagccctgggctgcaggagtgggtcaccagcaccgaactcctcatctctctagaccggctcaacacgtttggggacgacatcttcaaggaccccaaggtgctccagtcctactattatgccgtgtccgacttctctgtgggcggcaggtgcaagtgcaacgggcatgccagcgagtgcggccccgacgtggcaggccagttggcctgccggtgccagcacaacaccaccggcacagactgtgagcgctgcctgcccttcttccaggaccgcccgtgggcccggggcaccgccgaggctgcccacgagtgtctgccctgcaactgcagtggccgctccgaggaatgcacgtttgatcgggagctcttccgcagcacaggccacggcgggcgctgtcaccactgccgtgaccacacagctgggccacactgtgagcgctgtcaggagaatttctatcactgggacccgcggatgccatgccagccctgtgactgccagtcggcaggctccctacacctccagtgcgatgacacaggcacctgcgcctgcaagcccacggtgactggctggaagtgtgaccgctgtctgcccgggttccactcgctcagtgagggaggctgcagaccctgcacttgcaatcccgctggcagcctggacacctgtgacccccgcagtgggcgctgcccctgcaaagagaatgtggaaggcaacctatgtgacagatgtcgcccggggacctttaacctgcagccccacaatccagctggctgcagcagctgtttctgctatggccactccaaggtgtgcgcgtccactgcccagttccaggtgcatcacatcctcagcgatttccaccagggagccgaaggctggtgggccagaagtgtggggggctctgagcaccccccacaatggagcccaaatggggtcctcctgagcccagaagacgaggaggagctcacagcaccagagaagttcctgggagaccagcggttcagctatgggcagcccctcatactgaccttccgggtgccccccggggactccccactccctgtacagctgaggctggaagggacaggcttggccctgtccctgaggcactctagcctgtctggcccccaggatgccgggcatcccagggaggtagagctcaggttccacctgcaggagacctccgaggacgtggcccctccactgccccccttccacttccagcggctcctcgccaacctgaccagcctccgcctccgcgtcagtcccggccccagccctgccggtccagtgttcctgactgaggtccggctcacatccgcccggccagggctttccccgccagcctcctgggtggagatttgttcatgtcccactggctacacgggccagttctgtgaatcctgtgctccgggatacaagagggagatgccacaggggggtccctatgccagctgtgtcccctgcacctgtaaccagcatggcacctgtgaccccaacacagggatctgtgtctgcagccaccataccgagggcccatcctgtgaacgctgtttgccaggtttctatggcaaccctttcgcgggccaagccgacgactgccagccctgtccctgccctggccagtcggcctgtacgaccatcccagagagccgggaggtggtgtgtacccactgccccccgggccagagagggcggcgctgtgaggtctgtgatgatggcttttttggggacccgctggggctctttgggcacccccagccctgccaccagtgccagtgtagcgggaacgtggaccccaatgccgtgggcaactgtgaccccctgtctggccactgcctgcgctgcctgcacaacaccacgggtgaccactgtgagcactgtcaggaaggcttctacgggagcgccctggcccctcgacccgcagacaaatgcatgccttgcagctgtcacccacagggctcggtcagtgagcagatgccctgcgacccagtgacaggccaatgctcctgcctgcctcatgtgactgcacgggactgcagccgctgctaccctggcttcttcgacctccagcctgggaggggctgccggagctgcaagtgtcacccactgggctcccaggaggaccagtgccatcccaagactggacagtgcacctgccgcccaggtgtcacaggccaggcctgtgacaggtgccagctgggtttcttcggcttctccatcaagggctgccgggcctgcaggtgctccccactgggcgctgcctcggcccagtgccacgagaacggcacatgcgtgtgcaggcctggcttcgagggctacaaatgtgaccgctgccacgacaacttcttcctcacggcagacggcacacactgccagcaatgtccgtcctgctacgccctggtgaaggaggaggcagccaagctgaaggccagactgactttgacggaggggtggctccaagggtccgactgtggcagtccctggggaccactagacattctgctgggagaggccccaaggggggacgtctaccagggccatcacctgcttccaggggctcgggaagccttcctggagcagatgatgagcctcgagggtgctgtcaaggccgcccgggagcagctgcagaggctgaacaagggtgcccgctgtgcccaggccggatcccagaagacctgcacccagctggcagacctggaggcagtgctggagtcctcggaagaggagattctgcatgcagctgccattctcgcgtctctggagattcctcaggaaggtcccagtcagccgaccaaatggagccacctggccacagaggcccgtgccctcgccaggagccacagagacaccgccaccaagatcgcagccactgcttggagggccctgctcgcctccaacaccagctacgcgcttctctggaatctgctggagggaagggtggccctagagacccagcgggacctggaggacaggtaccaggaggtccaggcggcccagaaagcactgaggacggctgtggcagaggtgctgcctgaagcggaaagcgtgttggccaccgtgcagcaagttggcgcagatacagccccgtacctggccttgctggcttccccgggagctctgcctcagaagtcccgggctgaagacctgggcctgaaggcgaaggccctggagaagacagttgcatcatggcagcacatggccactgaggctgcccgaaccctccagactgctgcccaggcgacgctacggcaaacagaacccctcacaaagctgcaccaggaggccagagccgccctgacccaggcttcctcatctgtccaggctgcgacagtgactgtcatgggagccaggactctgctggctgatctggaaggaatgaagctgcagtttccccggcccaaggaccaggcggcattgcagaggaaggcagactccgtcagtgacagactccttgcagacacgagaaagaagaccaagcaggcggagaggatgctgggaaacgcggcccctctttcctccagtgccaagaagaagggcagagaagcagaggtgttggccaaggacagtgccaagcttgccaaggccttgctgagggagcggaaacaggcgcaccgccgtgccagcaggctcaccagccagacgcaagccacgctccaacaggcgtcccagcaggtgctggcgtctgaagcacgcagacaggagctggaggaagctgagcgggtgggtgctgggctgagcgagatggagcagcagatccgggaatcgcgtatctcactggagaaggacatcgagaccttgtcagagctgcttgccaggctggggtcgctggacacccatcaagccccagcccaggccctgaacgagactcagtgggcactagaacgcctgaggctgcagctgggctccccggggtccttgcagaggaaactcagtctgctggagcaggaatcccagcagcaggagctgcagatccagggcttcgagagtgacctcgccgagatccgcgccgacaaacagaacctggaggccattctgcacagcctgcccgagaactgtgccagctggcagtgagggctgcccagatccccggcacacactcccccacctgctgtttacatgacccagggggtgcacactaccccacaggtgtgcccatacagacattccccggagccggctgctgtgaactcgcccccgtgtggatagtcactccctgccgattctgtctgtggcttcttccctgccagcaggactgagtgtgcgtacccagttcacctggacatgagtgcacactctcacccctgcacatgcataaacgggcacaccccagtgtcaataacatacacacgtgagggtgcatgtctgtgtgtatgacccacacgtgttcaagtctaatccatccagtcagcagcttacggtccacacacattacagtccacagctgttgtgagagccacctgtgtgctggacaccctctggatgttgggcaagttgttacatgagatgccctggggtgctacatccactcactccagatagcagggaggtctcagcagatctgcagagatcaagggggtcagcaacagccaaagcccctagtcccagagctggctgccctctgtttcacagcagctccctgacctgtgttgctgcgtgcactccctacagctcgacacagccaggggaccaacaggccaagaaatgcaagatcccgggagggttcttagcagcagaatctgaggcccagagaccctgaggccgtggccaggcctgctagtctggctagagcaaggcccattcctggcgggggtgtcattgccttcaccggacgcttccctctcagggtcctgggactgcaccagatgccctgagggaatggcccaccctggcctgtacccacttcagcctgtgatctatccaaagagccaggcccaaaagcgcctaggtcagggtgctcaggctaccaggagcacgcctctgtgcccccggcaacccagttgacctttaattgacgctttccagaccagccctgcggcaccacttgccatgcgggaggccaccagggtgtgcaagcctggctgccattccagtctgtcctgtctgggaatcgccctgtggccaggcccgcatgctggcctctgcccaggactcctcagcatttcctcttggcatccctcccctctcccagaccctcttccagcagatggcaaggcctcggcattgggaagtcaggcacctctgcgggcccagccccctcccgtggctcccctgacaggggcaggggtagggcagcagcacagaccaattccgttgaacgtggaaataaaggaccctttcactggg

SEQ ID NO: 15676 - DNA, 1647 bp, Homo sapiens
  source 1..1647: mol_type = unassigned DNA
gagaagggcttcaggacgcgggaggcgcacttgcttcaagtcgcgggcgtgggaacggggcttgcttccggcgtcatggctcaaagggccttcccgaatccttatgctgattataacaaatccctggccgaaggctactttgatgctgccgggaggctgactcctgagttctcacaacgcttgaccaataagattcgggagcttcttcagcaaatggagagaggcctgaaatcagcagaccctcgggatggcaccggttacactggctgggcaggtattgctgtgctttacttacatctttatgatgtatttggggaccctgcctacctacagttagcacatggctatgtaaagcaaagtctgaactgcttaaccaagcgctccatcaccttcctttgtggggatgcaggccccctggcagtggccgctgtgctatatcacaagatgaacaatgagaagcaggcagaagattgcatcacacggctaattcacctaaataagattgatcctcatgctccaaatgaaatgctctatgggcgaataggctacatctatgctcttctttttgtcaataagaactttggagtggaaaagattcctcaaagccatattcagcagatttgtgaaacaattttaacctctggagaaaacctagctaggaagagaaacttcacggcaaagtctccactgatgtatgaatggtaccaggaatattatgtaggggctgctcatggcctggctggaatttattactacctgatgcagcccagccttcaagtgagccaagggaagttacatagtttggtcaagcccagtgtagactacgtctgccagctgaaattcccttctggcaattaccctccatgtataggtgataatcgagatctgcttgtccattggtgccatggcgcccctggggtaatctacatgctcatccaggcctataaggtattcagagaggaaaagtatctctgtgatgcctatcagtgtgctgatgtgatctggcaatatgggttgctgaagaagggatatgggctgtgccacggttctgcagggaatgcctatgccttcctgacactctacaacctcacacaggacatgaagtacctgtatagggcctgtaagtttgctgaatggtgcttagagtatggagaacatggatgcagaacaccagacacccctttctctctctttgaaggaatggctggaacaatatatttcctggctgacctgctagtccccacaaaagccaggttccctgcatttgaactctgaaaggatagcatgccacctgcaactcactgcatgaccctttctgtatattcaaacccaagctaagtgcttccgttgctttccaaggaaacaaagagtcaaactgtggacttgattttgttagcttttttcagaatttatctttcattcagttcccttccattatcatttacttttacttagaagtatccaaggaagtcttttaactttaatttccatttcttcctaaagggagagtgagtgatatgtacagtgttttgagattgtatacatatattccagaacttggaggaaatcttatttaagtttatgaatataaccatctgttactgttctaaaaatgtttaaaagaaactcaatacagataaagataaa

SEQ ID NO: 15677 - DNA, 1270 bp, Homo sapiens
  source 1..1270: mol_type = unassigned DNA
ctggcaggaactgggcggtaaaatagcccttctgttactgtccggggctgcggggcttgcttccggcgtcatggctcaaagggccttcccgaatccttatgctgattataacaaatccctggccgaaggctactttgatgctgccgggaggctgactcctgagttctcacaacgcttgaccaataagattcgggagcttcttcagcaaatggagagaggcctgaaatcagcagaccctcgggatggcaccggttacactggctgggcaggtattgctgtgctttacttacatctttatgatgtatttggggaccctgcctacctacagttagcacatggctatgtaaagcaaagtctgaactgcttaaccaagcgctccatcaccttcctttgtggggatgcaggccccctggcagtggccgctgtgctatatcacaagatgaacaatgagaagcaggcagaagattgcatcacacggctaattcacctaaataagattgatcctcatgctccaaatgaaatgctctatgggcgaataggctacatctatgctcttctttttgtcaataagaactttggagtggaaaagattcctcaaagccatattcagcagatttgtgaaacaattttaacctctggagaaaacctagctaggaagagaaacttcacggcaaagtctccactgatgtatgaatggtaccaggaatattatgtaggggctgctcatggcctggctggaatttattactacctgatgcagcccagccttcaagtgagccaagggaagttacatagtttggtcaagcccagtgtagactacgtctgccagctgaaattcccttctggcaattaccctccatgtataggtgataatcgagatctgcttgtccattggtgccatggcgcccctggggtaatctacatgctcatccaggcctataaggtattcagagaggaaaagtatctctgtgatgcctatcagtgtgctgatgtgatctggcaatatgggttgctgaagaagggatatgggctgtgccacggttctgcagggaatgcctatgccttcctgacactctacaacctcacacaggacatgaagtacctgtatagggcctgtaagtttgctgaatggtgcttagagtatggagaacatggatgcagaacaccagacacccctttctctctctttgaaggaatggctggaacaatatatttcctggctgacctgctagtccccacaaaagccaggttccctgcatttgaactctga

SEQ ID NO: 15678 - DNA, 4503 bp, Homo sapiens
  source 1..4503: mol_type = unassigned DNA
taaaatagcccttctgttactgtccggggctgcggggtgagaggccagggcttgcttccggcgtcatggctcaaagggccttcccgaatccttatgctgattataacaaatccctggccgaaggctactttgatgctgccgggaggctgactcctgagttctcacaacgcttgaccaataagattcgggagcttcttcagcaaatggagagaggcctgaaatcagcagaccctcgggatggcaccggttacactggctgggcaggtattgctgtgctttacttacatctttatgatgtatttggggaccctgcctacctacagttagcacatggctatgtaaagcaaagtctgaactgcttaaccaagcgctccatcaccttcctttgtggggatgcaggccccctggcagtggccgctgtgctatatcacaagatgaacaatgagaagcaggcagaagattgcatcacacggctaattcacctaaataagattgatcctcatgctccaaatgaaatgctctatgggcgaataggctacatctatgctcttctttttgtcaataagaactttggagtggaaaagattcctcaaagccatattcagcagatttgtgaaacaattttaacctctggagaaaacctagctaggaagagaaacttcacggcaaagtctccactgatgtatgaatggtaccaggaatattatgtaggggctgctcatggcctggctggaatttattactacctgatgcagcccagccttcaagtgagccaagggaagttacatagtttggtcaagcccagtgtagactacgtctgccagctgaaattcccttctggcaattaccctccatgtataggtgataatcgagatctgcttgtccattggtgccatggcgcccctggggtaatctacatgctcatccaggcctataaggtattcagagaggaaaagtatctctgtgatgcctatcagtgtgctgatgtgatctggcaatatgggttgctgaagaagggatatgggctgtgccacggttctgcagggaatgcctatgccttcctgacactctacaacctcacacaggacatgaagtacctgtatagggcctgtaagtttgctgaatggtgcttagagtatggagaacatggatgcagaacaccagacacccctttctctctctttgaaggaatggctggaacaatatatttcctggctgacctgctagtccccacaaaagccaggttccctgcatttgaactctgaaaggatagcatgccacctgcaactcactgcatgaccctttctgtatattcaaacccaagctaagtgcttccgttgctttccaaggaaacaaagagtcaaactgtggacttgattttgttagcttttttcagaatttatctttcattcagttcccttccattatcatttacttttacttagaagtatccaaggaagtcttttaactttaatttccatttcttcctaaagggagagtgagtgatatgtacagtgttttgagattgtatacatatattccagaacttggaggaaatcttatttaagtttatgaatataaccatctgttactgttctaaaaatgtttaaaagaaactcaatacagataaagataaatatgtgactattattgggtattacacttcacttctctttaatatttttcctccaactggagggcagacaattttctgacttgcttttctctaggtggttcattttgaaaggggacagaaatataactaaatgcttccaggagaaaaattccaagagttacaatctggacttggtacctaaatatcattttttaaattcttgatgcctatttggactagaggtaaacatactttcagattggcctgtttttgtcggtaaggcatacagccttcagaagccaacatttttaatcaaaaacttataaaacatgatgatcattgtgaaaattctgagttgaaggttagtttaagataagctaacaataacagtctgtgttttctctaaaataatctgagttttttggaactctttatttaaatatgtgtgtttttcagtattcaaataagatcaggaagccaattttctatgtatgaatatgctttaacctaggatttcagtccactctgactgactttctaaactttaacttgggtttttacagtgactatgcattagtgctgactctttggtataagccataaaatattttccttcctatcaatttatctgaactttggtcttttcactaaattgtacagtattctacttctgtttaaaaaggggagatgagaaagggaatactatctaaccaataacttgaacaaaaacactaaactaagcatttaatagaaatgctttttattgaggaggtattatccagagttcatgcttagaacaaatgcatctttgcgtatcctagacttaacaattcatcagtttctgagaccacagaatcaggttttccgtagtagataaagactctctggtgcttcaaattctgttcaagtgttttgactcatcagcttctactctttctattactgcctttgcctggcttgttttgtctctttgcaactgattttgcaaaaaaaaattgtagctttaaaataacagggtctaagtattttaaatgtgcctatttcacagctctcttggtcacaaaaacatgctatttttattggaacttcaaaccaaatccccactgagtgtgtactggttcctgcaggtagcagtctcctattatctcctgtttagcaccaaaagagctaatattattggaaactgaccttttaaaggccactggcagtaggatttaaaaagcagcccactgctcagtttccaggatcagcttcctccttctgtcacttgtgtaagttggcactaccttgtgcctctcagattgctgaagtgctgctggtaagcatgtgcatgctctgcctttcttgtgaaagttttcaatcagcgatatcagcacttacagtaagaagtaaaagtagtgcacagcaaagctaatttgcctttgcctggggtgttcagcttgaaagaataaagctcatttggtttagttaaatgtcttactctactgtgcctatgcttttagctgcgttactaagcaagggaaaaataacagtttctctgagccagagaagacttgatcacagttctccaagcatcgtgatagcaatgcttaaccccaggaagatttcaaggcagggagaagaacatttcaaataagattcttgttaacccatttatgcctagtgttccattattggaatgctaagcttgtgggagtcatttacatcctactgctcaaagtcattgccaaggtctgatttttcacacaaaaaattgcaacccccagcataaatgggttagctactgtcatcagttagcaaattcatccacacaaacacaattagagtttggtttttttttaagcttttcaaaacttactaaactggcacaattttatatgtatgctatttgttgtatttatgcttaagagcaaaaaagttttgatgggattttaaattcaggcaaagcctacaacgctgagacaatcccctaacaacatggtagtaactaaagaaacttttatactaggcttcttagttttaaaaggaagtggcatcattgtttcagttctagtttgtatttttctctcagatatttttcttctttaaaaatctttcccagaagttggttcctagaaaactcaataccatcatctcttatctctatacagggactaggtaataaaaccttcaaaggttgtcaaaggtcatcaagcagtgttcatttatcctgtcacatgtttctgtttctatagtaatttagaaattgcaaatagttaacttttcatcatgtaaaaagttaacattatcctatttccatagataccatggacggcggtgtggcctgagttgtcagtctttaatcctgagtcatgtggctctcttttcatctttgatgtcagttccaattatttggcatcaaaaaccttcatggtaggtagagttttaggtaaaagtggatctagggttactttctttattaacatttcctaaataactgaattgagagacatactctgctactatgtcctcaggttaatttttgtctgatcttacgatgccctgccttttactagctactttagaaatagaaaatgtgaagagtgactatttacatgtatactcctttggctgctagaactcatctgtagtcctttattatttacactgaattccaatttcatttctgcttccgctaagtaagagcacctcattcctgtgttttctctactattgagctgtagacgaactgtttctctaattataaagcaaactgtttgggatattcagggaaactaccccaatgttatgttgtcatttaatgggaaaggctgggatcatatgtatttctatgttctgtaaagtatttgacttactagttctcaataaaattttattaggactatata

SEQ ID NO: 15679 - DNA, 4781 bp, Homo sapiens
  source 1..4781: mol_type = unassigned DNA
actgtccggggctgcggggtgagaggccagggccgagaagggcttcaggacgcgggaggcgcacttgcttcaagtcgcgggcgtgggaacggggttgcaaaacggggcctctttgtccgggtgggttaagggccctggcagctttttcgcgaaggcgccatgtcctagcagttgggccgcagtgggcccgaggtccactcggaccgccgagacggctcgatggccctggagctggaggaagggggatacctgggcgccgccgccgccctcgcaactcggccgaggcccctatctcaacctagtttctgtttttcccctgttctgcaggcttgcttccggcgtcatggctcaaagggccttcccgaatccttatgctgattataacaaatccctggccgaaggctactttgatgctgccgggaggctgactcctgagttctcacaacgcttgaccaataagattcgggagcttcttcagcaaatggagagaggcctgaaatcagcagaccctcgggatggcaccggttacactggctgggcaggtattgctgtgctttacttacatctttatgatgtatttggggaccctgcctacctacagttagcacatggctatgtaaagcaaagtctgaactgcttaaccaagcgctccatcaccttcctttgtggggatgcaggccccctggcagtggccgctgtgctatatcacaagatgaacaatgagaagcaggcagaagattgcatcacacggctaattcacctaaataagattgatcctcatgctccaaatgaaatgctctatgggcgaataggctacatctatgctcttctttttgtcaataagaactttggagtggaaaagattcctcaaagccatattcagcagatttgtgaaacaattttaacctctggagaaaacctagctaggaagagaaacttcacggcaaagtctccactgatgtatgaatggtaccaggaatattatgtaggggctgctcatggcctggctggaatttattactacctgatgcagcccagccttcaagtgagccaagggaagttacatagtttggtcaagcccagtgtagactacgtctgccagctgaaattcccttctggcaattaccctccatgtataggtgataatcgagatctgcttgtccattggtgccatggcgcccctggggtaatctacatgctcatccaggcctataaggtattcagagaggaaaagtatctctgtgatgcctatcagtgtgctgatgtgatctggcaatatgggttgctgaagaagggatatgggctgtgccacggttctgcagggaatgcctatgccttcctgacactctacaacctcacacaggacatgaagtacctgtatagggcctgtaagtttgctgaatggtgcttagagtatggagaacatggatgcagaacaccagacacccctttctctctctttgaaggaatggctggaacaatatatttcctggctgacctgctagtccccacaaaagccaggttccctgcatttgaactctgaaaggatagcatgccacctgcaactcactgcatgaccctttctgtatattcaaacccaagctaagtgcttccgttgctttccaaggaaacaaagagtcaaactgtggacttgattttgttagcttttttcagaatttatctttcattcagttcccttccattatcatttacttttacttagaagtatccaaggaagtcttttaactttaatttccatttcttcctaaagggagagtgagtgatatgtacagtgttttgagattgtatacatatattccagaacttggaggaaatcttatttaagtttatgaatataaccatctgttactgttctaaaaatgtttaaaagaaactcaatacagataaagataaatatgtgactattattgggtattacacttcacttctctttaatatttttcctccaactggagggcagacaattttctgacttgcttttctctaggtggttcattttgaaaggggacagaaatataactaaatgcttccaggagaaaaattccaagagttacaatctggacttggtacctaaatatcattttttaaattcttgatgcctatttggactagaggtaaacatactttcagattggcctgtttttgtcggtaaggcatacagccttcagaagccaacatttttaatcaaaaacttataaaacatgatgatcattgtgaaaattctgagttgaaggttagtttaagataagctaacaataacagtctgtgttttctctaaaataatctgagttttttggaactctttatttaaatatgtgtgtttttcagtattcaaataagatcaggaagccaattttctatgtatgaatatgctttaacctaggatttcagtccactctgactgactttctaaactttaacttgggtttttacagtgactatgcattagtgctgactctttggtataagccataaaatattttccttcctatcaatttatctgaactttggtcttttcactaaattgtacagtattctacttctgtttaaaaaggggagatgagaaagggaatactatctaaccaataacttgaacaaaaacactaaactaagcatttaatagaaatgctttttattgaggaggtattatccagagttcatgcttagaacaaatgcatctttgcgtatcctagacttaacaattcatcagtttctgagaccacagaatcaggttttccgtagtagataaagactctctggtgcttcaaattctgttcaagtgttttgactcatcagcttctactctttctattactgcctttgcctggcttgttttgtctctttgcaactgattttgcaaaaaaaaattgtagctttaaaataacagggtctaagtattttaaatgtgcctatttcacagctctcttggtcacaaaaacatgctatttttattggaacttcaaaccaaatccccactgagtgtgtactggttcctgcaggtagcagtctcctattatctcctgtttagcaccaaaagagctaatattattggaaactgaccttttaaaggccactggcagtaggatttaaaaagcagcccactgctcagtttccaggatcagcttcctccttctgtcacttgtgtaagttggcactaccttgtgcctctcagattgctgaagtgctgctggtaagcatgtgcatgctctgcctttcttgtgaaagttttcaatcagcgatatcagcacttacagtaagaagtaaaagtagtgcacagcaaagctaatttgcctttgcctggggtgttcagcttgaaagaataaagctcatttggtttagttaaatgtcttactctactgtgcctatgcttttagctgcgttactaagcaagggaaaaataacagtttctctgagccagagaagacttgatcacagttctccaagcatcgtgatagcaatgcttaaccccaggaagatttcaaggcagggagaagaacatttcaaataagattcttgttaacccatttatgcctagtgttccattattggaatgctaagcttgtgggagtcatttacatcctactgctcaaagtcattgccaaggtctgatttttcacacaaaaaattgcaacccccagcataaatgggttagctactgtcatcagttagcaaattcatccacacaaacacaattagagtttggtttttttttaagcttttcaaaacttactaaactggcacaattttatatgtatgctatttgttgtatttatgcttaagagcaaaaaagttttgatgggattttaaattcaggcaaagcctacaacgctgagacaatcccctaacaacatggtagtaactaaagaaacttttatactaggcttcttagttttaaaaggaagtggcatcattgtttcagttctagtttgtatttttctctcagatatttttcttctttaaaaatctttcccagaagttggttcctagaaaactcaataccatcatctcttatctctatacagggactaggtaataaaaccttcaaaggttgtcaaaggtcatcaagcagtgttcatttatcctgtcacatgtttctgtttctatagtaatttagaaattgcaaatagttaacttttcatcatgtaaaaagttaacattatcctatttccatagataccatggacggcggtgtggcctgagttgtcagtctttaatcctgagtcatgtggctctcttttcatctttgatgtcagttccaattatttggcatcaaaaaccttcatggtaggtagagttttaggtaaaagtggatctagggttactttctttattaacatttcctaaataactgaattgagagacatactctgctactatgtcctcaggttaatttttgtctgatcttacgatgccctgccttttactagctactttagaaatagaaaatgtgaagagtgactatttacatgtatactcctttggctgctagaactcatctgtagtcctttattatttacactgaattccaatttcatttctgcttccgctaagtaagagcacctcattcctgtgttttctctactattgagctgtagacgaactgtttctctaattataaagcaaactgtttgggatattcagggaaactaccccaatgttatgttgtcatttaatgggaaaggctgggatcatatgtatttctatgttctgtaaagtatttgacttactagttctcaataaaattttattaggactatata

SEQ ID NO: 15680 - DNA, 808 bp, Homo sapiens
  source 1..808: mol_type = unassigned DNA
agagtttgggatggcagcctcagaaggacaaacttaggccaaggagggagggagttggggtggagactgagcttctccagttggaggtctggagctaggactcttcattgaaaccggagagaaggaaaaggagagagtgaggctgactttttaactgaactccaaaattctctgagcaatagaatgggcctaatatgtaccaggcttgcttccggcgtcatggctcaaagggccttcccgaatccttatgctgattataacaaatccctggccgaaggctactttgatgctgccgggaggctgactcctgagttctcacaacgcttgaccaataagattcgggagcttcttcagcaaatggagagaggcctgaaatcagcagaccctcgggatggcaccggttacactggctgggcaggtattgctgtgctttacttacatctttatgatgtatttggggaccctgcctacctacagttagcacatggctatgtaaagcaaagtctgaactgcttaaccaagcgctccatcaccttcctttgtggggatgcaggccccctggcagtggccgctgtgctatatcacaagatgaacaatgagaagcaggcagaagattgcatcacacggctaattcacctaaataagattgatcctcatgctccaaatgaaatgctctatgggcgaataggctacatctatgctcttctttttgtcaataagaactttggagtggaaaagattcctcaaagccatattcagcagatttgtgaaacaattttaacctctggagaaaacctagctaggaaga

SEQ ID NO: 15681 - DNA, 4602 bp, Homo sapiens
  source 1..4602: mol_type = unassigned DNA
aactgggcggtaaaatagcccttctgttactgtccggggctgcggggtgagaggccagggccgagaagggcttcaggacgcgggaggcgcacttgcttcaagtcgcgggcgtgggaacggggttgcaaaacggggcctctttgtccgggcttgcttccggcgtcatggctcaaagggccttcccgaatccttatgctgattataacaaatccctggccgaaggctactttgatgctgccgggaggctgactcctgagttctcacaacgcttgaccaataagattcgggagcttcttcagcaaatggagagaggcctgaaatcagcagaccctcgggatggcaccggttacactggctgggcaggtattgctgtgctttacttacatctttatgatgtatttggggaccctgcctacctacagttagcacatggctatgtaaagcaaagtctgaactgcttaaccaagcgctccatcaccttcctttgtggggatgcaggccccctggcagtggccgctgtgctatatcacaagatgaacaatgagaagcaggcagaagattgcatcacacggctaattcacctaaataagattgatcctcatgctccaaatgaaatgctctatgggcgaataggctacatctatgctcttctttttgtcaataagaactttggagtggaaaagattcctcaaagccatattcagcagatttgtgaaacaattttaacctctggagaaaacctagctaggaagagaaacttcacggcaaagtctccactgatgtatgaatggtaccaggaatattatgtaggggctgctcatggcctggctggaatttattactacctgatgcagcccagccttcaagtgagccaagggaagttacatagtttggtcaagcccagtgtagactacgtctgccagctgaaattcccttctggcaattaccctccatgtataggtgataatcgagatctgcttgtccattggtgccatggcgcccctggggtaatctacatgctcatccaggcctataaggtattcagagaggaaaagtatctctgtgatgcctatcagtgtgctgatgtgatctggcaatatgggttgctgaagaagggatatgggctgtgccacggttctgcagggaatgcctatgccttcctgacactctacaacctcacacaggacatgaagtacctgtatagggcctgtaagtttgctgaatggtgcttagagtatggagaacatggatgcagaacaccagacacccctttctctctctttgaaggaatggctggaacaatatatttcctggctgacctgctagtccccacaaaagccaggttccctgcatttgaactctgaaaggatagcatgccacctgcaactcactgcatgaccctttctgtatattcaaacccaagctaagtgcttccgttgctttccaaggaaacaaagagtcaaactgtggacttgattttgttagcttttttcagaatttatctttcattcagttcccttccattatcatttacttttacttagaagtatccaaggaagtcttttaactttaatttccatttcttcctaaagggagagtgagtgatatgtacagtgttttgagattgtatacatatattccagaacttggaggaaatcttatttaagtttatgaatataaccatctgttactgttctaaaaatgtttaaaagaaactcaatacagataaagataaatatgtgactattattgggtattacacttcacttctctttaatatttttcctccaactggagggcagacaattttctgacttgcttttctctaggtggttcattttgaaaggggacagaaatataactaaatgcttccaggagaaaaattccaagagttacaatctggacttggtacctaaatatcattttttaaattcttgatgcctatttggactagaggtaaacatactttcagattggcctgtttttgtcggtaaggcatacagccttcagaagccaacatttttaatcaaaaacttataaaacatgatgatcattgtgaaaattctgagttgaaggttagtttaagataagctaacaataacagtctgtgttttctctaaaataatctgagttttttggaactctttatttaaatatgtgtgtttttcagtattcaaataagatcaggaagccaattttctatgtatgaatatgctttaacctaggatttcagtccactctgactgactttctaaactttaacttgggtttttacagtgactatgcattagtgctgactctttggtataagccataaaatattttccttcctatcaatttatctgaactttggtcttttcactaaattgtacagtattctacttctgtttaaaaaggggagatgagaaagggaatactatctaaccaataacttgaacaaaaacactaaactaagcatttaatagaaatgctttttattgaggaggtattatccagagttcatgcttagaacaaatgcatctttgcgtatcctagacttaacaattcatcagtttctgagaccacagaatcaggttttccgtagtagataaagactctctggtgcttcaaattctgttcaagtgttttgactcatcagcttctactctttctattactgcctttgcctggcttgttttgtctctttgcaactgattttgcaaaaaaaaattgtagctttaaaataacagggtctaagtattttaaatgtgcctatttcacagctctcttggtcacaaaaacatgctatttttattggaacttcaaaccaaatccccactgagtgtgtactggttcctgcaggtagcagtctcctattatctcctgtttagcaccaaaagagctaatattattggaaactgaccttttaaaggccactggcagtaggatttaaaaagcagcccactgctcagtttccaggatcagcttcctccttctgtcacttgtgtaagttggcactaccttgtgcctctcagattgctgaagtgctgctggtaagcatgtgcatgctctgcctttcttgtgaaagttttcaatcagcgatatcagcacttacagtaagaagtaaaagtagtgcacagcaaagctaatttgcctttgcctggggtgttcagcttgaaagaataaagctcatttggtttagttaaatgtcttactctactgtgcctatgcttttagctgcgttactaagcaagggaaaaataacagtttctctgagccagagaagacttgatcacagttctccaagcatcgtgatagcaatgcttaaccccaggaagatttcaaggcagggagaagaacatttcaaataagattcttgttaacccatttatgcctagtgttccattattggaatgctaagcttgtgggagtcatttacatcctactgctcaaagtcattgccaaggtctgatttttcacacaaaaaattgcaacccccagcataaatgggttagctactgtcatcagttagcaaattcatccacacaaacacaattagagtttggtttttttttaagcttttcaaaacttactaaactggcacaattttatatgtatgctatttgttgtatttatgcttaagagcaaaaaagttttgatgggattttaaattcaggcaaagcctacaacgctgagacaatcccctaacaacatggtagtaactaaagaaacttttatactaggcttcttagttttaaaaggaagtggcatcattgtttcagttctagtttgtatttttctctcagatatttttcttctttaaaaatctttcccagaagttggttcctagaaaactcaataccatcatctcttatctctatacagggactaggtaataaaaccttcaaaggttgtcaaaggtcatcaagcagtgttcatttatcctgtcacatgtttctgtttctatagtaatttagaaattgcaaatagttaacttttcatcatgtaaaaagttaacattatcctatttccatagataccatggacggcggtgtggcctgagttgtcagtctttaatcctgagtcatgtggctctcttttcatctttgatgtcagttccaattatttggcatcaaaaaccttcatggtaggtagagttttaggtaaaagtggatctagggttactttctttattaacatttcctaaataactgaattgagagacatactctgctactatgtcctcaggttaatttttgtctgatcttacgatgccctgccttttactagctactttagaaatagaaaatgtgaagagtgactatttacatgtatactcctttggctgctagaactcatctgtagtcctttattatttacactgaattccaatttcatttctgcttccgctaagtaagagcacctcattcctgtgttttctctactattgagctgtagacgaactgtttctctaattataaagcaaactgtttgggatattcagggaaactaccccaatgttatgttgtcatttaatgggaaaggctgggatcatatgtatttctatgttctgtaaagtatttgacttactagttctcaataaaattttattaggactatata

SEQ ID NO: 15682 - DNA, 4353 bp, Homo sapiens
  source 1..4353: mol_type = unassigned DNA
gggctggcgcagcaggggccggtgaaatgcaggctgacgacggcgcgccaggggctgagctcgccccggtcggcgacgcgcacacaccttgagtgacagcgacctcttctctacaggttttccccgcgggagcgtggccctagcgggcgttcggttttctttggaaatcgcggagggggctggccgggcgcagcgatccccaccccgggactccagccccggccgtgcgcgtcgccgcggacgggctctgcgggccacggggaaggtgcgaggaggcgcgagcaggctgtgagccgctgggcgctcccgcgagcccgctcctctccgtcgggagcagggcaaaggcgccaggaacagggcagaggcacagcgcccaccgcctctgcggccgcctgatgtgcgagcagcccgcgacgaggcagtgcacgctcagacgccccgctcctcccgccagcgcgcggcctcgctcctcctagaggacgctctctgcgcgggccctcggaggaggcggcggcggggcgagctgcagcgccgggacaggaggtttgtccccgcccgcgcgccgtaccgcggcggagatgggcgagaccatgtcaaagaggctgaagctccacctgggaggggaggcagaaatggaggaacgggcgttcgtcaaccccttcccggactacgaggccgccgccggggcgctgctcgcctccggagcggccgaagagacaggctgtgttcgtcccccggcgaccacggatgagcccggcctcccttttcatcaggacgggaagatcattcataatttcataagacggatccagaccaaaattaaagatcttctgcagcaaatggaagaagggctgaagacagctgatccccatgactgctctgcttatactggctggacaggcatagcccttttgtacctgcagttgtaccgggtcacatgtgaccaaacctacctgctccgatccctggattacgtaaaaagaacacttcggaatctgaatggccgcagggtcaccttcctctgtggggatgctggccccctggctgttggagctgtgatttatcacaaactcagaagtgactgtgagtcccaggaatgtgtcacaaaacttttgcagctccagagatcggttgtctgccaagaatcagaccttcctgatgagctgctttatggacgggcaggttatctgtatgccttactgtacctgaacacagagataggtccaggcaccgtgtgtgagtcagctattaaagaggtagtcaatgctattattgaatcgggtaagactttgtcaagggaagaaagaaaaacggagcgctgcccgctgttgtaccagtggcaccggaagcagtacgttggagcagcccatggcatggctggaatttactatatgttaatgcagccggcagcaaaagtggaccaagaaaccttgacagaaatggtgaaacccagtattgattatgtgcgccacaaaaaattccgatctgggaattacccatcatcattaagcaatgaaacagaccggctggtgcactggtgccacggcgccccgggggtcatccacatgctcatgcaggcgtacaaggtctttaaggaggagaagtacttgaaagaggccatggagtgtagcgatgtgatttggcagcgaggtttgctgcggaagggctacgggatatgccatgggactgctggcaacggctattccttcctgtccctttaccgtctcacgcaggataagaagtacctctaccgagcttgcaagtttgcagagtggtgtctagattacggagcacacgggtgccgcattcctgacagaccctattcgctctttgaaggcatggctggcgctattcactttctctctgatgtcctgggaccagagacatcacggtttccagcatttgaacttgactcttcgaagagggattaaaaggtgcaaaaagacaactaaaatacccatttggaccaaaagccaccagattgcttagtgcctgacacagaaacaactgggaatcctgaaagagaagcagacaccgtcacaggcccctctggttagactagcatgagtgaccgaagccatccatcaacattttctaacagcaccctcatcaatataaaatatgacttcttcacatacagattctctgtagtgtttgcatgtttcttggtgtttgttgtctccaggtgtaagctgttttaaatggaaggcccttctattcctgagggctcagagctgaccatgcatgaatgtatggcagtgtccacttttctgtataaaatgtataaagtggggtttcttccatattgacaaatgagggaacaggtggtgtctatcttgtatatcagaaagattatctagggtctatcctagtgataatacattgtcagccttttctgtggcaccttccagatgagaatgagggagcgaccactccaaggacggacaggaccagcagttctgcaggggcgtgctggggtggtttgggagtgcacagctgaacgcttcccgtttggattttacactcaccttcgtgttttaaagaagcctcagagtgcattgcagctctgtcagggccccattcccagcagaggcttcaggtgctttgtgtagagtccagggcagctggagctttgttggggagacttctggacccaaagggagctttcccaagaagcctttgatggccacactgtaggcagcagtgactaagcactggcagttccagaacatttacccaggtatatgttactaaaacaggctccacctcagtttatcaacattataagttactgttctaagaaaagtaaatacagttccagatgggttattgcagattaacagaaagacactcaactggactcatgtccctgcaattaaacttacttcaaccttttggaaagttatcaaaatctaaatttggaatgaatgcatttcctattttttgtctacttttgggtgataaaaagtactagcccttatttatagatatgagaaacataatgttctaaccaacaacattatggtatttgtgtgacttttatttgaaaaaatgtgagcagtaatttgggttagcctaccttcattaattctatcacatagatttcagtttttagaagggtttctgtcatcatggaagaggtggtctgggactaggtacttctcgtcttgtgagctaaggcttgtgtcatgaaagacaagaggcctctcttaacagcccagtccttgtctgcagggggaggcctgagcatttcccagccccagtgtccacacctctcagaaaagagaaaaaagaatgtcagtttaggagaaaagcttcctttttacttgtgtggttatgtgtggggctggcacccgaaatgtgtgacattcagcttctaaacgatgcctggagagtctgtttgctgcagacacccttgctcctgagtcattattttctttcatgttagattgatgacttctgtgaatagaaatcatcctgatcctattttacctggcctccagggcctgttgatgggctttgcaggcagtccagcagcccacacctgcaggcaggatgctgtcgtcaatgagctgagggtagctgctttgctgaagacctcacacgatgtccaatctcatccaaataacattgttcccatcctccccacccaccacatcaaaacataacacatcacagcactcagtagaggtcctgcctccccatttctcaagggaagccagtaggcaacacagccagcacggtgctctccagggcagcccctctcagacgaggaggcagcgggtgcagccaggtgtctgcagagcagccacaaaggtggcctaggatgcgggtgtctccccaggtgagtccatccacacacgtttgaaaaacactattagtctttctaacacactgagggaaagattaaaatctgtggaataaaggaggagattttatttacagatttttttaaaagccacctgggttgacaccttcctacttatccactagatgtcatcagaggtgctgttccgtggttctgcattaacccctgcctcatgtctgtaacatgtgacagtaattccagctcggtccctccaggcaaaggagaaacgggacttacttcacaggacagaggattgacagaagtcagtttaagataagtgtttgaatcagatttcagtacatctcattcatttcttagatttgtattcacaattgtgttctctaaaatgtgtctaaattttaaaaatatgtacatgcataatgtcattttaaaatctgaaggaaagaatttgaagtccacaaaaagtgtttgaggttctttggttttgttagtaaaagccagttctgtggtgatgacctatggaa

SEQ ID NO: 15683 - DNA, 2690 bp, Homo sapiens
  source 1..2690: mol_type = unassigned DNA
gggcggggctgggcggcaggtcccgggtgcggacatctggcagctggcagtgggcggcgtagagcactgcagcagcaatgacggagggcacgtgtctgcggcgccgagggggcccctacaagaccgagcccgccaccgacctcggccgctggcgactcaactgcgagaggggccggcagacgtggacctacctgcaggacgagcgcgccggccgcgagcagaccggcctggaagcctacgccctggggctggacaccaagaattactttaaggacttgcccaaagcccacaccgcctttgagggggctctgaacgggatgacattttacgtggggctgcaggctgaggatgggcactggacgggtgattatggtggcccacttttcctcctgccaggcctcctgatcacttgccacgtggcacgcatccctctgccagccggatacagagaagagattgtgcggtacctgcggtcagtgcagctccctgacggtggctggggcctgcacattgaggataagtccaccgtgtttgggactgcgctcaactatgtgtctctcagaattctgggtgttgggcctgacgatcctgacctggtacgagcccggaacattcttcacaagaaaggtggtgctgtggccatcccctcctgggggaagttctggctggctgtcctgaatgtttacagctgggaaggcctcaataccctgttcccagagatgtggctgtttcctgactgggcaccggcacacccctccacactctggtgccactgccggcaggtgtacctgcccatgagctactgctacgccgttcggctgagtgccgcggaagacccgctggtccagagcctccgccaggagctctatgtggaggacttcgccagcattgactggctggcgcagaggaacaacgtggcccccgacgagctgtacacgccgcacagctggctgctccgcgtggtatatgcgctcctcaacctgtatgagcaccaccacagtgcccacctgcggcagcgggccgtgcagaagctgtatgaacacattgtggccgacgaccgattcaccaagagcatcagcatcggcccgatctcgaaaaccatcaacatgcttgtgcgctggtatgtggacgggcccgcctccactgccttccaggagcatgtctccagaatcccggactatctctggatgggccttgacggcatgaaaatgcagggcaccaacggctcacagatctgggacaccgcattcgccatccaggctctgcttgaggcgggcgggcaccacaggcccgagttttcgtcctgcctgcagaaggctcatgagttcctgaggctctcacaggtcccagataaccctcccgactaccagaagtactaccgccagatgcgcaagggtggcttctccttcagtacgctggactgcggctggatcgtttctgactgcacggctgaggccttgaaggctgtgctgctcctgcaggagaagtgtccccatgtcaccgagcacatccccagagaacggctctgcgatgctgtggctgtgctgctgaacatgagaaatccagatggagggttcgccacctatgagaccaagcgtggggggcacttgctggagctgctgaacccctcggaggtcttcggggacatcatgattgactacacctatgtggagtgcacctcagccgtgatgcaggcgcttaagtatttccacaagcgtttcccggagcacagggcagcggagatccgggagaccctcacgcagggcttagagttctgtcggcggcagcagagggccgatggctcctgggaaggctcctggggagtttgcttcacctacggcacctggtttggcctggaggccttcgcctgtatggggcagacctaccgagatgggactgcctgtgcagaggtctcccgggcctgtgacttcctgctgtcccggcagatggcagacggaggctggggggaggactttgagtcctgcgaggagcggcgttatttgcagagtgcccagtcccagatccataacacatgctgggccatgatggggctgatggccgttcggcatcctgacatcgaggcccaggagagaggagtccggtgtctacttgagaaacagctccccaatggcgactggccgcaggaaaacattgctggggtcttcaacaagtcctgtgccatctcctacacgagctacaggaacatcttccccatctgggccctcggccgcttctcccagctgtaccctgagagagcccttgctggccacccctgagaacatgcctacctgctgggtgccgtctgtgcgttccatggccttcaagtcacaggacgcagcgattccctgccctcttcggtgttattacacaggcaggacttcagtgtcagtatccctgccttcagtcttctttagaaatcacatctgtgttcaatccattgtttagagggagtgtatttttcctgttccacgaagaggactttttgttcacaattggatcacaatgcagaggagtctgttcctcccccgtcggcttctcggtgctgggagggtgacctgtcccagatgactcatcaccctgacatgctcttgacaaaggacaccaccaagaggagatggcagctgtaccggtgcagcctctgtctgagggggatatttgcctcagtgtgattaaaaatcagtcatgaaaga

SEQ ID NO: 15684 - DNA, 4255 bp, Homo sapiens
  source 1..4255: mol_type = unassigned DNA
gggcggggctgggcggcaggtcccgggtgcggacatctggcagctggcagtgggcggcgtagagcactgcagcagcaatgacggagggcacgtgtctgcggcgccgagggggcccctacaagaccgagcccgccaccgacctcggccgctggcgactcaactgcgagaggggccggcagacgtggacctacctgcaggacgagcgcgccggccgcgagcagaccggcctggaagcctacgccctggggctggacaccaagaattactttaaggacttgcccaaagcccacaccgcctttgagggggctctgaacgggatgacattttacgtggggctgcaggctgaggatgggcactggacgggtgattatggtggcccacttttcctcctgccaggcctcctgatcacttgccacgtggcacgcatccctctgccagccggatacagagaagagattgtgcggtacctgcggtcagtgcagctccctgacggtggctggggcctgcacattgaggataagtccaccgtgtttgggactgcgctcaactatgtgtctctcagaattctgggtgttgggcctgacgatcctgacctggtacgagcccggaacattcttcacaagaaaggtggtgctgtggccatcccctcctgggggaagttctggctggctgtcctgaatgtttacagctgggaaggcctcaataccctgttcccagagatgtggctgtttcctgactgggcaccggcacacccctccacactctggtgccactgccggcaggtgtacctgcccatgagctactgctacgccgttcggctgagtgccgcggaagacccgctggtccagagcctccgccaggagctctatgtggaggacttcgccagcattgactggctggcgcagaggaacaacgtggcccccgacgagctgtacacgccgcacagctggctgctccgcgtggtatatgcgctcctcaacctgtatgagcaccaccacagtgcccacctgcggcagcgggccgtgcagaagctgtatgaacacattgtggccgacgaccgattcaccaagagcatcagcatcggcccgatctcgaaaaccatcaacatgcttgtgcgctggtatgtggacgggcccgcctccactgccttccaggagcatgtctccagaatcccggactatctctggatgggccttgacggcatgaaaatgcagggcaccaacggctcacagatctgggacaccgcattcgccatccaggctctgcttgaggcgggcgggcaccacaggcccgagttttcgtcctgcctgcagaaggctcatgagttcctgaggctctcacaggtcccagataaccctcccgactaccagaagtactaccgccagatgcgcaagggtggcttctccttcagtacgctggactgcggctggatcgtttctgactgcacggctgaggccttgaaggctgtgctgctcctgcaggagaagtgtccccatgtcaccgagcacatccccagagaacggctctgcgatgctgtggctgtgctgctgaacatgagaaatccagatggagggttcgccacctatgagaccaagcgtggggggcacttgctggagctgctgaacccctcggaggtcttcggggacatcatgattgactacacctatgtggagtgcacctcagccgtgatgcaggcgcttaagtatttccacaagcgtttcccggagcacagggcagcggagatccgggagaccctcacgcagggcttagagttctgtcggcggcagcagagggccgatggctcctgggaaggctcctggggagtttgcttcacctacggcacctggtttggcctggaggccttcgcctgtatggggcagacctaccgagatgggactgcctgtgcagaggtctcccgggcctgtgacttcctgctgtcccggcagatggcagacggaggctggggggaggactttgagtcctgcgaggagcggcgttatttgcagagtgcccagtcccagatccataacacatgctgggccatgatggggctgatggccgttcggcatcctgacatcgaggcccaggagagaggagtccggtgtctacttgagaaacagctccccaatggcgactggccgcaggaaaacattgctggggtcttcaacaagtcctgtgccatctcctacacgagctacaggaacatcttccccatctgggccctcggccgcttctcccagctgtaccctgagagagcccttgctggccacccctgagaacatgcctacctgctgggtgccgtctgtgcgttccagtgaggccaaggggtcctggccgggttggggagccctcccataaccctgtcttgggctccaacccctcaacctctatctcatagatgtgaatctgggggccaggctggaggcagggatggggacagggtgggtggcttagactcttgatttttactgtaggttcatttctgaaagtagcttgtcgggcttgggtgaggaagggggcacaggagccgtgacccctgaggaggcacagcgccttctgccacctctgggcacggcctcaaggtagtgaggctaggaggttttttctgaccaatagctgagttcttgggagaggagcagctgtgcctgtgtgattccttagtgtcgagtgggctctgggctggggtcggccctgggcaggcttctcctgcaccttttgtctgctgggctgagggacacgagggcaaccctgtgacaatggcaggtagtgtgcatccgtgaatagcccagtgcgggggttgctcatggagcatcctgaggccgtgcagcagggagccccatgcccctgggtcgtgagcttgcctgcgtatggggtggtgtcatggagcctcatgcccctgggtcgtgagctcgcctgagtatggggtggtgtcatggagccgcatacccctgggttgtgagctcgcctgcatatgcagggtctgtcatggaacatcccaagtctgtgcagcagggagccccatgcccctgggacatgaacccacctgcgtggaatgctgtttgtgaggtgtctacagggtttatagtagtcttgtggacacagaaatgcacaggggacacttacggacacagaaatgcacaggggaggccgagcataaccaggggtgaggggcaggcagcagttgtagttactgccgcggggcactgctatgtgcagggacagccagcacccagcccatcaccactccctgggctggctggcaggtatggcaccctgggagcccggcatatacccagggcacccctacggctgccgccagtctcatgcccaggtgggtgctctgggctggagcgagggccaggttttgggccgaggcttccccaggcaatcctgtgagctcccttctagcctctgacccagtctggtctggcttgcatggatgtagggcttggggtgggaagttcaggtcctggctttgcctttgcctgatgtggatgagcagctcacatgctcagggccacctgagactgtcactgctctcccctggctactgggaggagtcactgagagcttcgttacccctgctgccttgcccagggcacaccctatacctccttatctgctcttcccctccctgccgccttctgggcaggtagcagtccctggcctctccccctggctgatcactctccctcaggcagtggagatctgcgtctggacaccctcagatcctgtcattgcctgcccagagtccttcaggggcacccctctgccttggtgtgcagtccagggctctcacccaggtgccgcaccctctggggtcttctgtccagctcccttgccccatgtgctgtcactgactctccttgggactcgcctgcctgctcagagccctgcagggcttggtcagctgcctgttcagtgtcaacacttccctgcacatcttaaaactgggctttattttcgctgaaggaactgtgttgggacccttgacatctgtcaggtttgcacatgctgtttttttttctcagcccacgtgttctcccccacgtggggtagcagcaggacagacagtgaatcacagagtctgccctgagcagaggctgctgtccctgggactcctagccatggtcagactgtacaaaacggttttccagaaatgaaatgtaaatccatttttatactgaaaatgttactgaaagtcacttttatgagcatctgccttaataaacagacattgattcccttatcagaa

SEQ ID NO: 15685 - DNA, 4390 bp, Homo sapiens
  source 1..4390: mol_type = unassigned DNA
aggggcggggctgggcggcaggtcccgggtgcggacatctggcagctggcagtgggcggcgtagagcactgcagcagcaatgacggagggcacgtgagtcccctcgccccgggctcctgacgaatgcggggtggtcctaggtgctgaggagagcgcgactggggcagtgggccggcggccggcgttggggcggggcctgggtcgctgatggccggtggtcctcaggtgtctgcggcgccgagggggcccctacaagaccgagcccgccaccgacctcggccgctggcgactcaactgcgagaggggccggcagacgtggacctacctgcaggacgagcgcgccggccgcgagcagaccggcctggaagcctacgccctggggctggacaccaagaattactttaaggacttgcccaaagcccacaccgcctttgagggggctctgaacgggatgacattttacgtggggctgcaggctgaggatgggcactggacgggtgattatggtggcccacttttcctcctgccaggcctcctgatcacttgccacgtggcacgcatccctctgccagccggatacagagaagagattgtgcggtacctgcggtcagtgcagctccctgacggtggctggggcctgcacattgaggataagtccaccgtgtttgggactgcgctcaactatgtgtctctcagaattctgggtgttgggcctgacgatcctgacctggtacgagcccggaacattcttcacaagaaaggtggtgctgtggccatcccctcctgggggaagttctggctggctgtcctgaatgtttacagctgggaaggcctcaataccctgttcccagagatgtggctgtttcctgactgggcaccggcacacccctccacactctggtgccactgccggcaggtgtacctgcccatgagctactgctacgccgttcggctgagtgccgcggaagacccgctggtccagagcctccgccaggagctctatgtggaggacttcgccagcattgactggctggcgcagaggaacaacgtggcccccgacgagctgtacacgccgcacagctggctgctccgcgtggtatatgcgctcctcaacctgtatgagcaccaccacagtgcccacctgcggcagcgggccgtgcagaagctgtatgaacacattgtggccgacgaccgattcaccaagagcatcagcatcggcccgatctcgaaaaccatcaacatgcttgtgcgctggtatgtggacgggcccgcctccactgccttccaggagcatgtctccagaatcccggactatctctggatgggccttgacggcatgaaaatgcagggcaccaacggctcacagatctgggacaccgcattcgccatccaggctctgcttgaggcgggcgggcaccacaggcccgagttttcgtcctgcctgcagaaggctcatgagttcctgaggctctcacaggtcccagataaccctcccgactaccagaagtactaccgccagatgcgcaagggtggcttctccttcagtacgctggactgcggctggatcgtttctgactgcacggctgaggccttgaaggctgtgctgctcctgcaggagaagtgtccccatgtcaccgagcacatccccagagaacggctctgcgatgctgtggctgtgctgctgaacatgagaaatccagatggagggttcgccacctatgagaccaagcgtggggggcacttgctggagctgctgaacccctcggaggtcttcggggacatcatgattgactacacctatgtggagtgcacctcagccgtgatgcaggcgcttaagtatttccacaagcgtttcccggagcacagggcagcggagatccgggagaccctcacgcagggcttagagttctgtcggcggcagcagagggccgatggctcctgggaaggctcctggggagtttgcttcacctacggcacctggtttggcctggaggccttcgcctgtatggggcagacctaccgagatgggactgcctgtgcagaggtctcccgggcctgtgacttcctgctgtcccggcagatggcagacggaggctggggggaggactttgagtcctgcgaggagcggcgttatttgcagagtgcccagtcccagatccataacacatgctgggccatgatggggctgatggccgttcggcatcctgacatcgaggcccaggagagaggagtccggtgtctacttgagaaacagctccccaatggcgactggccgcaggaaaacattgctggggtcttcaacaagtcctgtgccatctcctacacgagctacaggaacatcttccccatctgggccctcggccgcttctcccagctgtaccctgagagagcccttgctggccacccctgagaacatgcctacctgctgggtgccgtctgtgcgttccagtgaggccaaggggtcctggccgggttggggagccctcccataaccctgtcttgggctccaacccctcaacctctatctcatagatgtgaatctgggggccaggctggaggcagggatggggacagggtgggtggcttagactcttgatttttactgtaggttcatttctgaaagtagcttgtcgggcttgggtgaggaagggggcacaggagccgtgacccctgaggaggcacagcgccttctgccacctctgggcacggcctcaaggtagtgaggctaggaggttttttctgaccaatagctgagttcttgggagaggagcagctgtgcctgtgtgattccttagtgtcgagtgggctctgggctggggtcggccctgggcaggcttctcctgcaccttttgtctgctgggctgagggacacgagggcaaccctgtgacaatggcaggtagtgtgcatccgtgaatagcccagtgcgggggttgctcatggagcatcctgaggccgtgcagcagggagccccatgcccctgggtcgtgagcttgcctgcgtatggggtggtgtcatggagcctcatgcccctgggtcgtgagctcgcctgagtatggggtggtgtcatggagccgcatacccctgggttgtgagctcgcctgcatatgcagggtctgtcatggaacatcccaagtctgtgcagcagggagccccatgcccctgggacatgaacccacctgcgtggaatgctgtttgtgaggtgtctacagggtttatagtagtcttgtggacacagaaatgcacaggggacacttacggacacagaaatgcacaggggaggccgagcataaccaggggtgaggggcaggcagcagttgtagttactgccgcggggcactgctatgtgcagggacagccagcacccagcccatcaccactccctgggctggctggcaggtatggcaccctgggagcccggcatatacccagggcacccctacggctgccgccagtctcatgcccaggtgggtgctctgggctggagcgagggccaggttttgggccgaggcttccccaggcaatcctgtgagctcccttctagcctctgacccagtctggtctggcttgcatggatgtagggcttggggtgggaagttcaggtcctggctttgcctttgcctgatgtggatgagcagctcacatgctcagggccacctgagactgtcactgctctcccctggctactgggaggagtcactgagagcttcgttacccctgctgccttgcccagggcacaccctatacctccttatctgctcttcccctccctgccgccttctgggcaggtagcagtccctggcctctccccctggctgatcactctccctcaggcagtggagatctgcgtctggacaccctcagatcctgtcattgcctgcccagagtccttcaggggcacccctctgccttggtgtgcagtccagggctctcacccaggtgccgcaccctctggggtcttctgtccagctcccttgccccatgtgctgtcactgactctccttgggactcgcctgcctgctcagagccctgcagggcttggtcagctgcctgttcagtgtcaacacttccctgcacatcttaaaactgggctttattttcgctgaaggaactgtgttgggacccttgacatctgtcaggtttgcacatgctgtttttttttctcagcccacgtgttctcccccacgtggggtagcagcaggacagacagtgaatcacagagtctgccctgagcagaggctgctgtccctgggactcctagccatggtcagactgtacaaaacggttttccagaaatgaaatgtaaatccatttttatactgaaaatgttactgaaagtcacttttatgagcatctgccttaataaacagacattgattcccttatcagaag

SEQ ID NO: 15686 - DNA, 2523 bp, Homo sapiens
  source 1..2523: mol_type = unassigned DNA
agctggcagtgggcggcgtagagcactgcagcagcaatgacggagggcacgtgtctgcggcgccgagggggcccctacaagaccgagcccgccaccgacctcggccgctggcgactcaactgcgagaggggccggcagacgtggacctacctgcaggacgagcgcgccggccgcgagcagaccggcctggaagcctacgccctggggctggacaccaagaattactttaaggacttgcccaaagcccacaccgcctttgagggggctctgaacgggatgacattttacgtggggctgcaggctgaggatgggcactggacgggtgattatggtggcccacttttcctcctgccaggcctcctgatcacttgccacgtggcacgcatccctctgccagccggatacagagaagagattgtgcggtacctgcggcacattgaggataagtccaccgtgtttgggactgcgctcaactatgtgtctctcagaattctgggtgttgggcctgacgatcctgacctggtacgagcccggaacattcttcacaagaaaggtggtgctgtggccatcccctcctgggggaagttctggctggctgtcctgaatgtttacagctgggaaggcctcaataccctgttcccagagatgtggctgtttcctgactgggcaccggcacacccctccacactctggtgccactgccggcaggtgtacctgcccatgagctactgctacgccgttcggctgagtgccgcggaagacccgctggtccagagcctccgccaggagctctatgtggaggacttcgccagcattgactggctggcgcagaggaacaacgtggcccccgacgagctgtacacgccgcacagctggctgctccgcgtggtatatgcgctcctcaacctgtatgagcaccaccacagtgcccacctgcggcagcgggccgtgcagaagctgtatgaacacattgtggccgacgaccgattcaccaagagcatcagcatcggcccgatctcgaaaaccatcaacatgcttgtgcgctggtatgtggacgggcccgcctccactgccttccaggagcatgtctccagaatcccggactatctctggatgggccttgacggcatgaaaatgcagggcaccaacggctcacagatctgggacaccgcattcgccatccaggctctgcttgaggcgggcgggcaccacaggcccgagttttcgtcctgcctgcagaaggctcatgagttcctgaggctctcacaggtcccagataaccctcccgactaccagaagtactaccgccagatgcgcaagggtggcttctccttcagtacgctggactgcggctggatcgtttctgactgcacggctgaggccttgaaggctgtgctgctcctgcaggagaagtgtccccatgtcaccgagcacatccccagagaacggctctgcgatgctgtggctgtgctgctgaacatgagaaatccagatggagggttcgccacctatgagaccaagcgtggggggcacttgctggagctgctgaacccctcggaggtcttcggggacatcatgattgactacacctatgtggagtgcacctcagccgtgatgcaggcgcttaagtatttccacaagcgtttcccggagcacagggcagcggagatccgggagaccctcacgcagggcttagagttctgtcggcggcagcagagggccgatggctcctgggaaggctcctggggagtttgcttcacctacggcacctggtttggcctggaggccttcgcctgtatggggcagacctaccgagatgggactgcctgtgcagaggtctcccgggcctgtgacttcctgctgtcccggcagatggcagacggaggctggggggaggactttgagtcctgcgaggagcggcgttatttgcagagtgcccagtcccagatccataacacatgctgggccatgatggggctgatggccgttcggcatcctgacatcgaggcccaggagagaggagtccggtgtctacttgagaaacagctccccaatggcgactggccgcaggaaaacattgctggggtcttcaacaagtcctgtgccatctcctacacgagctacaggaacatcttccccatctgggccctcggccgcttctcccagctgtaccctgagagagcccttgctggccacccctgagaacatgcctacctgctgggtgccgtctgtgcgttccagtgaggccaaggggtcctggccgggttggggagccctcccataaccctgtcttgggctccaacccctcaacctctatctcatagatgtgaatctgggggccaggctggaggcagggatggggacagggtgggtggcttagactcttgatttttactgtaggttcatttctgaaagtagcttgtcgggcttgggtgaggaagggggcacaggagccgtgacccctgaggaggcacagcgccttctgccacctctgggcacggcctcaaggtagtgaggctagga

SEQ ID NO: 15687 - DNA, 3572 bp, Homo sapiens
  source 1..3572: mol_type = unassigned DNA
tctcgccggacgctaaagaccgacgcacaaattaagaatggaccattcttttaactcagtcatttatccaaactcgagacattcgccaggaaatctatcgaaaatttcccagaaccattttttcacttatattctataatactggtaaaatcgagacgtaaaaggagaacttgagaacaagtcattctgctttcccctctcaagtttgagcctgaactacttgggctcgcttatcgtcacttccggggatcgaactgtgaatcccggaaactgcacgcgccgagccgggaagcttcgtccagcggtcgtgttgccatgggccggaggagagccccggccggtgggtcgctgggacgggcccttatgcgccatcagactcagcggagccgaagccatcgtcacactgactcctggttgcacacaagtgaactcaatgatggctatgattggggtcgtcttaatcttcagtcagtgactgaacagagctcccttgatgacttccttgctactgcagaacttgcaggaacagagtttgtagctgagaaacttaatattaagtttgtgcctgctgaggctagaactggactactgtctttcgaggagagccagagaattaagaagctccatgaagaaaacaaacagttcttgtgtataccgaggagaccaaactggaaccaaaatactaccccagaagaactcaaacaagcagagaaagataactttctagaatggagacgtcagcttgtccggctagaagaggaacagaagctgatattgactccatttgaacgaaatttggacttttggcgccagctctggagagtcattgagagaagtgatattgtggtccagatagtagatgctcgaaacccactcctgtttagatgtgaggatttggaatgttatgtgaaagaaatggatgccaataaggagaacgtcattctgatcaacaaggcagacttgctgactgctgagcagcggagtgcctgggccatgtacttcgaaaaagaagatgtgaaggttattttctggtcagctttggccggagccattcccctgaatggtgactctgaggaagaggcaaacagagatgatagacaaagcaacacaaccaagtttggacattccagtttcgaccaggctgaaatttcccacagtgaatccgaacatctcccagctagggattctccttcacttagtgaaaatcccacaacggatgaagatgacagtgagtatgaggactgtccagaggaggaggaagacgactggcagacgtgctcagaagaagacggtcccaaggaagaggactgcagccaggactggaaggaaagctctactgcagattctgaggctcggagcaggaaaaccccacagaagaggcagatacacaattttagccatctggtatccaagcaggagttactggagctctttaaggagctacacactgggagaaaggtgaaagatgggcaacttacggtcggactggtgggctaccctaatgttggtaagagttcaacaatcaacaccatcatgggcaacaagaaagtatctgtgtctgccacacctggtcacacaaagcactttcagactctctatgtggagcctggcctctgcctgtgtgactgtcctggcttggtgatgccatcttttgtgtctaccaaggcagaaatgacttgcagcggaatcctcccaattgatcagatgagagatcatgttcctcctgtatcactagtttgccagaatattccaagacatgttttagaagctacctatggcattaacatcataacgcctagagaggatgaagatccccaccgacctccaacatcggaagaactgttgacagcttatggatacatgcgaggattcatgacagcgcatggacagccagaccagcctcgatctgcgcgctacatcctgaaggactatgtcagtggtaagctgctgtactgccatcctcctcctggaagagatcctgtaacttttcagcatcaacaccagcgactcctagagaacaaaatgaacagtgatgaaataaaaatgcagctaggcagaaataaaaaagcaaagcagattgaaaatatcgttgacaaaacttttttccatcaagagaatgtgagggctttgaccaaaggagtccaggctgtgatgggttacaagcccgggagtggtgtagtgactgcatccactgcgagctctgagaacggggcggggaagccctggaaaaaacatggcaacagaaataaaaaagaaaaaagtcgtagactctacaagcacctggatatgtgaggttgggctgcaacagaaatgtcatctgcattgtgcagatggaaaagagcagaagctgcctgttgcctgtggaaccgtcccaagacactagcactgtagaacgggccctgctcttgcagagcacggctgcacccaacagtctccatgtcaagaccaagggcctcctggaaacaccaactctgacaaaaaggagtcatctgggagcccgagaatcctactcctggccgggcacagtggctcacgcaccaacatggagaaaccccgtctctactaaaaatacaaaaaaattagccaggcgtggtggcgcgcacctgtaatcccagctactcgggaggctgaggcaggagaatcacttgaaccagggaggcagagtttgcagtgaatggagattgcgccgctgcactccagcctgggcgacagagtgagactgcatcacaagaaaaaaaatttgcaagggatggttcacgagacacatttgggacgaaggtgaaagagaaattccccattctgagtgtcctagttgggttcctccgactctaaacaagggacttgggttcagttagtgtacagcgggggctcacgtccactaaggaacatgtagaatgtaaccaccgggtgacagggaagctgcggtatttactacctagcccccatcttcactggttattccacttatttaaaatgtccagaataagcaaatctccatatagaggaagtagattagtggttgcttcgggatgggaggaatgggaagattgaggtctttcttttgcagtgataaaaatgtcctaaaattgactgtagcgatggtcacacaactctgaatatgcttaagaccattgaattacacactttacgttggtgaattgtatggtatgtaaattatagttcaataacatagttacaaaagataatcaaaagcatgaaagcactgttgatgtggtttggatctgtgtcctcaccgagtctcatgttgaaatgtaagccccctggtgggaggcgatgggattatggggcagagtcctcacgaacggtttagcaccacccgctcagtgctgttctcctgatattgagtcctcatcacatctggttgcttcaaagtgtgtggtgcctcccctctgtctccctcctgctctggccatataagatgtgcctgcttctccttcgccttctaacatgattgtaagtttcctgaggcctccctagaagcaaaagctgctgtgcttcctgtaccatctacaggaccgtgagccaattaaacctcttttctttataaatta

SEQ ID NO: 15688 - DNA, 625 bp, Homo sapiens
  source 1..625: mol_type = unassigned DNA
atgtcctgccagcagagccagcagcagtgccagccccctcccaagtgcacccccaagtgccctcccaagtgccccactcctaagtgccccccaaagtgtccccctaagtgccctccagtctcttcctgctgcagtgtcagctccggaggctgctgtggctccagctctgggggcggctgcagctctgggggaggtggctgctgcctgagccaccacaggcgccacaggtcccaccgtcacagactccagagctctggctgctgcagccagccctcgggaggctccagctgctgtggaggggacagcggccagcactctggaggctgctgctgaagcggactctgcacctagaagagcagactcgggtgaaatgagtgatcaaacatttcctcctcacctgtctcctcctgggcctgcaagagtggctgagatgcccgcgtgaaggctctgagctctggcctagaggatccctctgccctgggatccagaaacttgattcttctcccacaaacctatctgctgcccctgacaccaactgtgttgtctactctgggatcccaagccacaaactcactctccagctcatttcctgcagcctcaagtgaaacaataaagcaaaagatct

SEQ ID NO: 15689 - DNA, 770 bp, Homo sapiens
  source 1..770: mol_type = unassigned DNA
gctgaaggaccctgtgctgcctgtgacctcgctcctgaacacccaccgccgagatgtcctgccagcagagccagcagcagtgccagccccctcccaagtgcacccccaagtgccctcccaagtgccccactcctaagtgccccccaaagtgtccccctaagtgccctccagtctcttcctgctgcagtgtcagctccggaggctgctgtggctccagctctgggggcggctgcagctctgggggaggtggctgctgcctgagccaccacaggcgccacaggtcccaccgtcacagactccagagctctggctgctgcagccagccctcgggaggctccagctgctgtggaggggacagcggccagcactctggaggctgctgctgaagcggactctgcacctagaagagcagactcgggtgaaatgagtgatcaaacatttcctcctcacctgtctcctcctgggcctgcaagagtggctgagatgcccgcgtgaaggctctgagctctggcctagaggatccctctgccctgggatccagaaacttgattcttctcccacaaacctatctgctgcccctgacaccaactgtgttgtctactctgggatcccaagccacaaactcactctccagctcatttcctgcagcctcaagtgaaacaataaagcaaaagatcttcttgccacttattgtggactgttccttgcctgtttgtgtctccaatatttttttcactgctctctactttcctgctgcctggaagctttgg

SEQ ID NO: 15690 - DNA, 1139 bp, Homo sapiens
  source 1..1139: mol_type = unassigned DNA
gttctgaacttctatgtccttacaacaaggtaatctagaaaattcttccaagagagaatgactgtttccccttgagaaacaattttatttccaaacccctttctagattgttttcatgattcaggtgtgtagttgaagcagaatgtctcctctacatactacatgcttgattttgagaatactttcttaatatcttttggcttcggttttctaattataaaatagttgaaaatgctttatgattttataagtatataaaaagcattaggttcaaaacagaggctataagtgtgtttagccaactattagacacaatgaaacttcccgtgattaattagctacaactacactaagcagttcatcaaaatgtagggattagaaatgatgctgaaagggcaagaataggccggggtggcctctacctgggtctaacttgctgtctgactctctctcagctcctgaacacccgcaccaagatgtcctgccagcagaaccagcagcagtgccagccccctcccaagtgcatccccaagtgccctcccaagtgcctcacccctagatgccccccaaagtgtccccctaagtgtcctccagtctcttcctgctgcagtgtcagctccggaggctgctgtggctccagctctgggggaagctgtggctccagctctgggggttgctgcagttctgggggaggtggctgctgcctgagccaccacaggcgccgtaggtcccactgccacagaccccagagctctggctgctgcagccagccctccgggggctccagctgctgtggaggagggagtggccagcactctggaggctgctgctaaagtggatcctgagcctagaagaacacaaatggccaaatatttcccttccgtcttccttctccttctgggcctgcccatgttgttgagaggtcttggtgagggctcaactcaagcatagaggattcttctgtcttggagttcagaggcccaaaacttctcccccaaagccaagccatttaatgacctcagtttgcgtatgtgtggttgctctgggaagcccaaagcacagacctatatccctttgcagcttgtctttttgcatagctcagcctgatgtgaaacaataaaaccagaaatatgcattcc

SEQ ID NO: 15691 - DNA, 333 bp, Homo sapiens
  source 1..333: mol_type = unassigned DNA
atgtcctgccagcagaaccagcagcagtgccagccccctcccaagtgcatccccaagtgccctcccaagtgcctcacccctagatgccccccaaagtgtccccctaagtgtcctccagtctcttcctgctgcagtgtcagctccggaggctgctgtggctccagctctgggggttgctgcagttctgggggaggtggctgctgcctgagccaccacaggcgccgtaggtcccactgccacagaccccagagctctggctgctgcagccagccctccgggggctccagctgctgtggaggagggagtggccagcactctggaggctgctgctaa

SEQ ID NO: 15692 - DNA, 695 bp, Homo sapiens
  source 1..695: mol_type = unassigned DNA
gctgaaggaccctgtgctgcctgtgaccccgctcctgaatccgccaccaagatgtcctgccagcagagccagcagcagtgccagccccctcccaagtgcacccccaagtgccctcccaagtgccccaccccaaagtgtcccccaaagtgtccccctaagtgccctcctgtctcttcctgctgcagtgtcagctccggaggctgctgtggctccagctctgggggcagctgtggctccagctctgggggatgctgcagttctgggggaggtggctgctgcctgagccaccacaggcgccgtaggtcccactgccacagaccccagagctctggctgctgcagccagccctcggggggctccagctgctgtggcggggggagtggccagcactctggaggctgctgctgaagtggaccctgagcctagaagagcagaatccaggaccgcaaactgccaaggacatcccccttctcctactaggcctgcctgagaggctcacaggtccaagggaaagctctgaacttgccaagagcatatcttttccctggagtccagaaactcagatcctctcctggatctccattcactggccttggacctcacctttgtggctaccctcccacgctctgtctaagcccctagcttactcaatgtcatttgcagcgtgcatctgctgattaaaggactaaaacaag

SEQ ID NO: 15693 - DNA, 1179 bp, Homo sapiens
  source 1..1179: mol_type = unassigned DNA
gctaaagaaccctgtgctgcctgtgactccgctcctgaacacccaccaccgagatgtcctgccagcagagccagcagcagtgccagccccctcccaagtgcactcccaagtgcactcccaagtgccccgcccctaaatgtccccctaagtgccctccagtctcttcctgctgcagtgtcagctccggaggctgctgtggctccagctctgggggcggctgtggctccaactctgggggctgctgcagctctgggggtggtggctgctgcctgagccaccacaggcgccacaggtcccaccgtcgcagaccccagagctctgactgctgcagccagccctcggggggctccagctgctgcggtgggggcagcagccagcactctggaggctgctgctgaagtggaccttgacttcctcttccttctgattctgcctgaatagctgagaggttccagcaaaagcttgaagtcttgcctggagaatccctctgctctggtgtcaggaaacccaaaatctttctccttaatggcatttagagactttcttctgcagatccatggctgccctgggaactccaaagcacacacctacttcctccccagctcacgctactgtattctgtgctgcctgaactgaagaaataaaatccagaatctgctccccaatttgctaccagcctgcttgattttcctgtttgtgtcatccttgttctgctcccctgtgtctgctggtggctgctgaggccttggtggacagaggatggggaaggggtcaggaggaaaaagcttgcatttctgtgtgttttgtgttttttcttctttctgtgttttccttttaaaccaagggactgaaatagcattgagaaatatttttctttcaaattctggttcctttcacctatgtaaccgcatccctcaggcatggccaggaggccgacttcatcctccttctcactgtcacctcttcactcttgtgttcctcgttccccactccttccactaacaatctccccggactcctccttcagattgtatgtacacgtagtagacatataaatatatgtgtgtgtacatgtatatatatacacacatatttatatatactcacattatatggaataaatctttagtttttaaacttaaatcacttttattgatctataactttcacacaataaaa

SEQ ID NO: 15694 - DNA, 1180 bp, Homo sapiens
  source 1..1180: mol_type = unassigned DNA
gccgaaggaccctgtgctgcctgtgactttgctcctaagtacctactgccgagatgtcctgccagcagagccagcagcagtgccagccccctcccaagtgcactcccaagtgccctcccaagtgtcccacccccaaatgccctccaaagtgtccccctaagtgccctccagtctcttcctgctgcagtgtcagctccggaggctgctgtggctccagctctgggggcagctgtggctccagctctgggggctgctgcagctctgggggaggtggctgctgcctgagccaccacaggcaccacaggtcccaccgtcacagaccccagagctctgactgctgcagccagccctcagggggctccagctgctgtggagggggcagcggccagcactctggaggctgctgctgaagtggaccttgacttcctcttccttctgattctgcctgaatagctgagaggttccagcaaaagcttgaagtcttgcctggagaatccctctgctctggtgtcaggaaacccaaaatctttctccttaatggcatttagagactttcttctgcagatccatggctgccctgggaactccaaagcacacacctacttcctccccagctcacgctgctgtattctgtgctgcctgaactgaagaaataaaatccagaatctgccccccaacttgctaccagcctgcttgattttcctgtttgtgtcatccttgttctgctcccctgtgtctgctggtggctgctgaggccttggtggacagaggatggggaaaggggtcaggaggaaaaagcttgcatttctgtgtgttttgtgttttttcttctttcggtgttttccttttaaaccaagggactgaaatagcattgagaaatatttttctttcaaattctggttcctttcacctatgtaaccgcatccctcaggcatggccaggaggccgacttcatcctccttcccactatcacctcttcattcttgtgttcctcgttccccactccttccactaacaatctccctggactcctcctccatactgtatgtgcatgcattcacacacacatatgtacatgcacatagatgagatgaatctgcattgtaaaaaaattaaatcacatttagtgctgtataatttgcatgcaataaaattcaataaaattaaatgtaaaattaaa

SEQ ID NO: 15695 - DNA, 575 bp, Homo sapiens
  source 1..575: mol_type = unassigned DNA
gaaacccaggctgggataaaagggctcagggccagagcaccccattcactcacttcctgaggtgccgaaggaccctgtgctgcctgtgactttggtatgtgtcctctgggaacagaagcaggggattccacagagggatgctcagatcagctcctaagtacctactgccgagatgtcctgccagcagagccagcagcagtgccagccccctcccaagtgcactcccaagtgccctcccaagtgtcccacccccaaatgccctccaaagtgtccccctaagtgccctccagtctcttcctgctgcagtgtcagctccggaggctgctgtggctccagctctgggggcagctgtggctccagctctgggggctgctgcagctctgggggaggtggctgctgcctgagccaccacaggcaccacaggtcccaccgtcacagaccccagagctctgactgctgcagccagccctcagggggctccagctgctgtggagggggcagcggccagcactctggaggctgctgctgaagtggaccttgacttcctcttccttctgattctgcctgaatagctg

SEQ ID NO: 15696 - DNA, 598 bp, Homo sapiens
  source 1..598: mol_type = unassigned DNA
atgtcttgccagcagagccagcagcagtgccagccccctcccaagtgcactcccaagtgccctcccaagtgccccacaccgaagtgccccccaaagtgtccccctaagtgccctcctgtctcttcctgctgcagcgtcagctccggaggctgctgtggctccagctctgggggctgctgcagctctgggggtggtggctgctgcagctctgggggaggcggctgttgcctgagccaccacagacggcgtaggtcccaccgccacagaccccagagctctgactgctgcagccagccctcagcgggctccagctgctgcggagggggcagtggccagcactctggaggctgctgctgaagtggaccctgtgcctaaaagagcagatttagaggcatgaaaggggcaacttcatcttccttgggactgactgtgttgctgggacattttagtaaagatttcaaactctgtcctggaagattcctccgacctagaatccagaaatctgccctctcacaagaattcctcttctgacctctgattccatctgtgcgcctggcctgggaataccaaatagaagtccttgcctcattcccctgat

SEQ ID NO: 15697 - DNA, 592 bp, Homo sapiens
  source 1..592: mol_type = unassigned DNA
ggacgtgtctgtgctcctgtgtgtgaccagggttgaaaaagtcgcactgagatgtcctgccagcaaaaccagcagcagtgccagccccctcccaagtgccccccaaaatgcccacccaagtgtcctccaaagtgccgacctcagtgcccagccccatgcccacctccagtctcttcctgctgtggtcccagctctgggggctgctgcggctccagctctgggggctgctgcagctctgggggtggcggctgctgcctgagccaccacaggccccgtctcttccaccggcaccggcaccagagccccgattgttgtgagtgtgaaccttctgggggctctggctgctgccacagctctggggactgctgctgaccagacctcgaacatcacagagcaacccttatggagaaacttgcaaccaggacctgtcccagagtgatgcttctcctgcccctttttctcctttccttgggctgacacaccttgtgaggtgttttgtctgttgtcatggcccaagagcccatcctggatcctgatcttaccttcccactttacctcatacaacaataaagctcttttgcctcttcgtgaa

SEQ ID NO: 15698 - DNA, 612 bp, Homo sapiens
  source 1..612: mol_type = unassigned DNA
cagggacgtgtctgtgctcctgcgtgtgaccagggttgactaaactctgccaggatgtcttgccagcaaaaccagcagcagtgccagccccctcccaagtgtcctcccaagtgtaccccaaaatgtccacctaagtgtccccctaaatgcctgccccagtgcccagctccatgttcccctgcagtctcttcttgctgtggtcccatctctgggggctgctgtggtcccagctctgggggctgctgcaactctggggctggtggctgctgcctgagccaccacaggccccgtctcttccaccggcgccggcaccagagccccgactgctgtgagagtgaaccttctgggggctctggctgctgccacagctctgggggctgctgctgacctgggctaagaagaactctttggacagaatgtttaagaacctcctacagcctgatgcttaaccctttccatttcctctcattccattcatgggtggacagcgaccacaaagactcatggggcttccctgggagaactttgcacttgatggagcacctcaattgcaggttttgttttcctcctttacctcatgttataataaagctctgatttctgactcacaaa

SEQ ID NO: 15699 - DNA, 607 bp, Homo sapiens
  source 1..607: mol_type = unassigned DNA
cagggacgtgtctgtgctcctgcgtgtgaccagggttgactaaactctgccaggatgtcttgccagcaaaaccagcagcagtgccagccccctcccaagtgtcctcccaagtgtaccccaaaatgtccacctaagtgtccccctaaatgcctgccccagtgcccagctccatgttcccctgcagtctcttcttgctgtggtcccatctctgggggctgctgtggtcccagctctgggggctgctgcaactctggggctggtggctgctgcctgagccaccacaggccccgtctcttccaccggcgccggcaccagagccccgactgctgtgagagtgaaccttctgggggctctggctgctgccacagctctgggggctgctgctgacctgggctaagaagaactctttggacagaatgtttaagaacctcctacagcctgatgcttaaccctttccatttcctctcattccattcatgggtggacagcgaccacaaagactcatggggcttccctgggagaactttgcacttgatggagcacctcaattgcaggttttgttttcctcctttacctcatgttataataaagctctgatttctgactc

SEQ ID NO: 15700 - DNA, 614 bp, Homo sapiens
  source 1..614: mol_type = unassigned DNA
cagggacgtgtctgtgctcctgcgtgtgaccagggttgactaaactcctgccagcatgtcttgccagcaaaaccagcagcagtgccagccccctcccaagtgtcctcccaagtgtaccccaaaatgtccacctaagtgtccccccaaatgcccaccacagtgcccagctccatgtttccctgcagtctcttcttgctgtggtcccagctctgggagctgctgtggtcccagctctgggggctgctgcagctctggggctggtggctgctccctgagccaccacaggccccgtctcttccaccggcgccggcaccagagccccgactgctgtgagagtgaaccttctgggggctctggctgctgccacagctctgggggctgctgctgacctgggctacagaagagctcttgggactgaatggccaagaacctgctacggcctgatggatactctttccacttcctctcattccattcattggttggcagagaccacaaagactcatggggctttcctggaagaacttcgtgcttgatgtaacaccccaattgcaagtcttcttttcctcctttacctcatgttataataaagctctgatctctgactcactaaa

SEQ ID NO: 15701 - DNA, 609 bp, Homo sapiens
  source 1..609: mol_type = unassigned DNA
cagggacgtgtctgtgcttttgcatgtgaccagggttgactaaactcctgccaggatgtcttgccagcaaaaccagcagcagtgccagccccctcccaaatgtcctcccaagtgtaccccaaaatgtccacctaagtgtccccccaaatgcccaccacagtgcccagctccatgttcccctgcagtctcttcctgctgtggtcccagctctgggagctgctgtggtcccagctctgggggctgctgcagctctgggggtggtggctgctgcctgagccaccacaggccccgtctcttccaccggcgccggcaccagagccccgattgctgtgagagtgaaccttctggggcctctggctgctgccacagctctgggggctgctgctgacctgggctgcagaagagctctggtactgaatggtcaaaaacctgctacagcctgatgcttaactatttccccttcctttcattccactcatgggtggacagggaccacaaagactcatggggcttccccagaactttgtgcttgatggagcaccccagatggaagccttctttttctcctttacctcatattgtaataaagctctgatttctgactcttta

SEQ ID NO: 15702 - DNA, 270 bp, Homo sapiens
  source 1..270: mol_type = unassigned DNA
atgtcctgccagcagaaccagcagcagtgccagcctccgcccaagtgccctgcaaagagcccagcacagtgtctgcctccagcttcctccagctgtgccccaagctctgggggctgtgggcccagctccgagcgcagctgctgcctgagtcaccacagatgccgcaggtctcaccgttgccgttgccagagctccaactcctgtgacaggggaagtggtcagcaaggcgggagctccagctgtggccacagttctgcgggctgctgctga

SEQ ID NO: 15703 - DNA, 288 bp, Homo sapiens
  source 1..288: mol_type = unassigned DNA
atgtcctgccagcagaaccagcagcagtgccagcctctgcccaagtgcccctcacccaagtgccccccaaagagctcagcacagtgtctgcctccagcctcctcctgctgtgctccaagacctgggtgctgtggtggccccagctctgagggcggctgctgcctgagccaccacaggtgctgcaggtcccaccgatgccggcgccagagctccaactcctgtgacagaggcagtggtcagcaagatggtgcctccgactgtggctatggctctggaggctgctgctga

SEQ ID NO: 15704 - DNA, 425 bp, Homo sapiens
  source 1..425: mol_type = unassigned DNA
ggtctgagggttctgtgctcaaatgtttctattattctgttcaaggtaaaattcctgcattcctgcaaagatgtcctgccagcaaaaccagcagcagtgccagccccctcccagttgtccctcacccaagtgtcccccaaagagcccagcacagtgtctgcctccaccctcttctgactgtgctctaagctccgggggctgtggccccagttctgaaagtggctgctgcctgagccaccacaggcacttcaggtcccatcaatgccggcgccagagatccaactcctgtgacaggggcagtggtcagcaaggcgggggctcctgccgtggccatggctctgggggctgctgctgacctggatcctgatgatgagacaagtgatctttggaggaaacaaggatcccaaaggcccaggaaaagctcc

SEQ ID NO: 15705 - DNA, 613 bp, Homo sapiens
  source 1..613: mol_type = unassigned DNA
ctcaggaacagccttctcctgcctcctctgcacctggacaactcaactcctgccaagatgtcctgccagcagaaccagcagcagtgccaacccccacccaagtgtccctcacccaagtgtcccccaaagagcccagtacagtgtctgcctccagcttcctctggctgtgccccaagctctgggggctgtggccctagctccgagggcggctgcttcctgaaccaccacaggcgccaccaccgatgccggcgccagaggcccaactcctgtgacaggggcagtggtcagcaaggcgggggctctggctgcggccatggctctggaggctgctgctgacctggatcctgatgctgagacaagcgattttggaggaaacaagaatcccaagggcccaggaaaaccccatcttgatgcatgagttcccagataccctcttctggctttcacaggctgagctaggggttttcctgtggaaggtctgagctctccccagaaggcacttcctgtctgatgtccaggatgtcacatgttcccttacccctgtacctgtgaaggattggcagtgcttgtgcctgacctcatcaaaaaataaagctccttgtcctcattacca

SEQ ID NO: 15706 - DNA, 611 bp, Homo sapiens
  source 1..611: mol_type = unassigned DNA
ctcaggaacagccttctcctgcctctctgcacctggacatctcaactcctgccaagatgtcctgccagcagaaccagaagcagtgccaacccccacccaagtgcccctcacccaagtgtcccccaaagaacccagtacagtgtctgcctccagcttcctctggctgtgccccaagctctgggggctgtggccctagctccgagggcggctgcttcctgaaccaccacaggcgccaccaccgatgccggcgccagaggtccaactcctgtgacaggggcagtggtcagcaaggcgggggctctggctgctgccacggttctgggggctgctgctgatccagatcctgatgctgagacaagcgatctttggaggaaacaagaatcccaagaggccaagaacagccccatctgacgcatgccttcccatataccctcttctgactttcacaggctgagctggaggttttcctgtgggggatctgagctctccccagaaggcacttcttgttttatgtacaggatgtcatatgtccccctacccctgtacctgccaaggattggcagtgcttgtgcccaacctcgtaaaaaagataaagttccttgtcctcatta

SEQ ID NO: 15707 - DNA, 388 bp, Homo sapiens
  source 1..388: mol_type = unassigned DNA
tcattcaggtttatcgaaattccaccaagatgtcctgccagcagaaccaacagcagtgccagccccctcccaagtgtcctatccccaagtatcccccaaaatgtccctcaaagtgtgcatcctcatgcccacctccaatctcttcctgctgtggctccagctctgggggctgtggttgctgcagctctgagggaggtggctgctgcctgagccaccacagacaccataggtcccactgccacagacccaagagctccaattgctatggcagtggcagtggccagcagtctgggggttctggctgctgctctggagggggctgttgctgacctggaccaggagcagcaccaaaggaattagtgggcgaaggacccattgcagcctggtg

SEQ ID NO: 15708 - DNA, 672 bp, Homo sapiens
  source 1..672: mol_type = unassigned DNA
tgccgaagaggctatctgggaagctcatcatccagctcaggaagagatgaaaccaggaggcaggagaatgtcaggcatgaccccacacttgtgcaacagccacgtcctgctcctgccattagcatggctcatccgaggcccagccccaggatccatacaaagtgtgttcctgctgctggcttctcatctgctctgcttcctaagggacgtatctgttgctgcgtctgaacccacggtttatcgaaattccaccaagatgtcctgccagcagaaccaacagcagtgccagccccctcccaagtgtcctatccccaagtatcccccaaaatgtccctcaaagtgtgcatcctcatgcccacctccaatctcttcctgctgtggctccagctctgggggctgtggttgctgcagctctgagggaggtggctgctgcctgagccaccacagacaccataggtcccactgccacagacccaagagctccaattgctatggcagtggcagtggccagcagtctgggggttctggctgctgctctggagggggctgttgctgacctggaccaggagcagcaccaaaggaattagtgggcgaaggacccattgcagcctggtgttttacctccttcactctcttgcctttcctttctgtagccccatcaattgaataaac

SEQ ID NO: 15709 - DNA, 819 bp, Homo sapiens
  source 1..819: mol_type = unassigned DNA
caggtagagtgcttctcaggaccaggatgaactcttggtgctggtgttttgggcagaaagagcccctgggtggaggttgaggccattcttgaagaaagacaaggataaagaaggattttggaggggaaggttcttctggaaggggagggtggaagctttattcagcttctacagagatgtcctgccagcagagccagcagcagtgccagcctcctcccaaatgtacccctaaatgccctcccaagtgtactcctaagtgtcctcccaagtgtcccccaaaatgccctccccagtgttcagccccatgcccacctccagtctcttcctgctgtggttccagctctgggggctgctgcagctctgagggtggtggctgctgcctgagccaccacaggccccgccagtccctccgacgccgacctcagagttccagctgctgtggcagtggcagtggccagcagtctgggggctccagctgctgccacagctctgggggctctggctgctgccacagctctggaggctgctgctgacctgggccatgaggagcacggaggagaaggactggcagatcccaggtgctgaagatgtgtgtcagcctgaggcttcttttctctcatttcccatggaaggacttcggaaatgccttaagttcccctctttatcctgcccatgttcactccattgtagggttgaagtctagcttgtgatattttctggcctggctttccctctcagacatagctctttggagaactaggtgttgtaattcagttatgaagctattttctctgtaacaataaagctttttattcctga

SEQ ID NO: 15710 - DNA, 523 bp, Homo sapiens
  source 1..523: mol_type = unassigned DNA
ggaaccaaagggaaaagccaccttcccaggcacagccataacatccacctcactcaactgcttgtcaagttcaccaccaacacagagggggctcagataatcaagaaacaatgtcgagtgatgataaaagtaaatcaaatgaccccaagactgagcccaagaactgcgatcccaagtgtgaacaaaagtgtgagtccaaatgccagcccagctgtttaaagaagctgctgcaacgctgtttcgaaaagtgcccatgggaaaagtgtccagcaccacccaagtgcctgccctgcccctcgcagtctccttcatcctgccctccccagccctgcaccaagccctgtcctcctaaatgcccttcatcctgcccacatgcttgcccacctccctgccctcccccagagtgaggcactgtgggcactacccaaccccaccaccactgccacctccaccatgtacaacgctgtggggctggagactgaaaccatgaactgacaagtaaacgtgttcctctgctgtgcaa

SEQ ID NO: 15711 - DNA, 2211 bp, Homo sapiens
  source 1..2211: mol_type = unassigned DNA
attttgtgaaagcaacgcagagcacctaggcagtgccatttccttggctcttctcagtatgtgcagggaacacacccgtgtgcacactcacagatacgtgtttgccacattttagtacaactccgtttctgcattccactatgtggacgagtgcctggaaccaaacgtctgcgcaaatggtgattgttccaaccttgaaggctcctacatgtgttcatgccacaaaggctatacccggactccggaccacaagcactgtagagatattgatgaatgtcagcaagggaatctatgtgtaaacgggcagtgcaaaaataccgagggctccttcaggtgcacctgtggacaggggtaccagctgtcggcagctaaagaccagtgtgaagacattgatgaatgccagcaccgtcatctctgtgctcatgggcagtgcaggaacactgagggctcttttcaatgtgtgtgtgaccagggttacagagcatctgggcttggagaccactgtgaagatatcaatgaatgcttggaggacaagagtgtttgccagagaggagactgcattaatactgcagggtcctatgattgtacttgtccggatggatttcagctagatgacaataaaacatgtcaagatattaatgaatgtgaacatccagggctctgtggtccgcaaggggagtgcctaaacacagagggttctttccattgtgtctgccagcagggtttctcaatctctgcagatggccgtacgtgtgaagatgtgaatgaatgtgaactgctcagtggggtgtgtggtgaagccttctgtgaaaacgtggaagggtccttcctgtgcgtgtgtgctgatgaaaaccaagagtacagccccatgactgggcagtgccgctcccggacctccacagatttagatgtagatgtagatcaacccaaagaagaaaagaaagaatgctactataatctcaatgacgccagtctctgtgataatgtgttggcccccaatgtcacgaaacaagaatgctgctgtacatcaggcgtgggatggggagataactgcgaaatcttcccctgcccggtcttgggaactgctgagttcactgaaatgtgtcccaaagggaaaggttttgtgcctgctggagaatcatcttctgaagctggtggtgagaactataaagatgcagatgaatgcctactttttggacaagaaatctgcaaaaatggtttctgtttgaacactcggcctgggtatgaatgctactgtaagcaagggacgtactatgatcctgtgaaactgcagtgctttgatatggatgaatgtcaagaccccagtagttgtattgatggccagtgtgttaatacagagggctcttacaactgcttctgtactcaccccatggtcctggatgcgtcagaaaaaagatgtatacgaccggctgagtcaaacgaacaaatagaagaaactgatgtctaccaagatttgtgctgggaacatctgagtgatgaatacgtgtgtagccggcctcttgtgggcaagcagacaacgtacactgagtgctgctgtctgtatggagaggcctggggcatgcagtgtgccctctgccccctgaaggattcagatgactatgctcagctgtgtaacatccccgtgacgggacgccggcagccatatggacgggacgccttggttgacttcagtgaacagtatactccagaagccgatccctacttcatccaagaccgttttctaaatagctttgaggagttacaggctgaggaatgcggcatcctcaatggatgtgaaaatggtcgctgtgtgagggtccaggaaggttacacctgcgattgctttgatgggtatcacttggatacggccaagatgacctgtgtcgatgtaaatgaatgcgatgagttgaacaaccggatgtctctctgcaagaatgccaagtgcattaacaccgatggttcctacaagtgtttgtgtctgccaggctacgtgccttctgacaagccaaactactgcactccgttgaataccgccttgaatttagagaaagacagtgacctggagtgaaacagaatctacataacctaagcccatatactctgcactgtgtaaaggaaaagggagaaatgtattatacttgagacattgcacctaccccggaaggctggaaatacagaaacagcatggaattgcaagtcctctgaagacaa

SEQ ID NO: 15712 - DNA, 6153 bp, Homo sapiens
  source 1..6153: mol_type = unassigned DNA
ggtcgcgcccgctggggcccgcgatggcgggggcctggctcaggtgggggctcctgctctgggcagggctcctcgcgtcctcggcgcacggccggctgcggaggatcacctacgtggtgcacccgggccccggcctggcagccggcgccttgcccctgagcgggcccccgcgttcgcggacattcaacgtcgcgctcaacgccaggtacagccgcagctcggcggctgccggcgcccccagccgtgcctcccccggggtcccctcggagaggacccggcgcacgagcaagccgggcggcgcggccctgcaggggctcagaccgccgccgccgccgccgccggagcctgcgcgtcccgcggtccccggcgggcagctccaccccaatcccggcggccacccggcagccgccccgttcaccaaacaaggcaggcaagttgtgcgctccaaggtgccgcaggagacccagagcggcggaggctctaggctgcaggttcaccagaagcagcagctgcagggggtcaatgtctgtggagggcggtgctgtcatggctggagtaaggcccctggctcccagaggtgcaccaaacctagctgtgttccgccatgtcagaatggagggatgtgtctccggccacaactctgtgtgtgtaaaccagggaccaagggcaaagcctgtgaaacaatagctgcccaggacacctcgtcaccagtctttggagggcagagtcctggggctgcttcctcgtggggccctcctgagcaagcagcaaagcatacttcatctaagaaggcagacactctaccaagagtcagccctgtggcccagatgaccttaaccctcaagccgaagccttcagtgggactcccccagcagatacattctcaagtgactcctctttcttcccagagtgtggtgattcaccatggccagacccaggaatacgtgctcaagcccaagtactttccagcccagaaggggatttcaggagagcagtccactgaaggttctttccctttaagatatgtgcaggatcaagttgcggcaccttttcagctgagtaaccacactggccgcatcaaggtggtctttactccgagcatctgtaaagtgacctgcaccaagggcagctgtcagaacagctgtgagaaggggaacaccaccactctcattagtgagaatggtcatgctgccgacaccctgacggccacgaacttccgagtggtaatttgccatcttccatgtatgaatggtggccagtgcagttcaagggacaaatgtcagtgccctccaaatttcacaggaaaactttgtcagatcccagtccatggtgccagcgtgcctaaactttatcagcattcccagcagccaggcaaggcgttggggacgcatgtcatccattcaacacataccttgcctctgaccgtgactagccagcaaggagtcaaagtgaaatttcctcctaacatagtcaatatccatgtgaaacatcctcctgaagcttccgtccagatacatcaggtttcaagaattgatggcccaacaggccagaagacaaaagaagctcaaccaggccaatcccaagtctcgtaccaagggcttcctgtccagaagacccagaccatacattccacatactcccaccagcaggtcattcctcacgtctaccccgtggctgctaagacacagcttggccggtgcttccaggaaaccattgggtcacagtgtggcaaagcgctccctggcctttcaaagcaagaggactgctgtggaactgtgggtacctcctggggctttaacaaatgccagaaatgccccaagaaaccatcttatcatggatacaaccaaatgatggaatgcctaccgggttataagcgggttaacaacaccttttgccaagatattaatgaatgtcagctacaaggtgtatgccctaatggtgagtgtttgaataccatgggcagctatcgatgtacctgcaaaataggatttgggccggatcctaccttttcaagttgtgttcctgatccccctgtgatctcggaagagaaagggccctgttaccgacttgtcagttctggaagacagtgtatgcaccctctgtctgttcacctcaccaagcagctctgctgttgtagtgtgggcaaggcctggggcccacactgtgagaaatgtccccttccaggcacagctgcttttaaggaaatctgtcctggtggaatgggttatacggtttctggcgttcatagacgcaggccaatccatcaccatgtaggtaaaggacctgtatttgtcaagccaaagaacactcaacctgttgctaaaagtactcatcctccacctctcccagccaaggaagagccagtggaggccctgaccttctcccgggaacacgggccaggagtggcggagccagaagtggcaactgcaccccctgaaaaggaaataccttcattggatcaagagaaaaccaaacttgagcctggtcaaccccagctgtctccaggcatttccactattcatctgcatccacagtttccaggtatagtgattgaaaaaacatcacctcctgtgcctgttgaagtagctcctgaagcttctacgtctagtgccagccaagtgattgctcctactcaagtgacagaaatcaatgaatgtactgtgaaccctgatatctgtggagcaggacactgcattaacctaccagtgagatatacctgtatatgctacgagggctacaggttcagtgaacaacagaggaaatgtgtggatattgatgagtgtactcaggtccaacacctctgctcccagggccgctgtgaaaacaccgagggaagtttcttgtgcatttgcccagcaggatttatggccagtgaggagggtactaactgcatagatgttgacgaatgcctgaggccggacgtctgtggggaggggcactgtgtcaatactgtgggggccttccggtgtgaatactgtgacagcgggtaccgcatgactcagagaggccgttgtgaggatattgatgaatgtttgaatccaagcacttgtccagatgagcagtgtgtgaattctcctggatcttaccagtgcgttccctgcacagaaggattccgaggctggaatggacagtgccttgatgtggacgagtgcctggaaccaaacgtctgcgcaaatggtgattgttccaaccttgaaggctcctacatgtgttcatgccacaaaggctatacccggactccggaccacaagcactgtagagatattgatgaatgtcagcaagggaatctatgtgtaaacgggcagtgcaaaaataccgagggctccttcaggtgcacctgtggacaggggtaccagctgtcggcagctaaagaccagtgtgaagacattgatgaatgccagcaccgtcatctctgtgctcatgggcagtgcaggaacactgagggctcttttcaatgtgtgtgtgaccagggttacagagcatctgggcttggagaccactgtgaagatatcaatgaatgcttggaggacaagagtgtttgccagagaggagactgcattaatactgcagggtcctatgattgtacttgtccggatggatttcagctagatgacaataaaacatgtcaagatattaatgaatgtgaacatccagggctctgtggtccgcaaggggagtgcctaaacacagagggttctttccattgtgtctgccagcagggtttctcaatctctgcagatggccgtacgtgtgaagatattgatgaatgtgtaaacaacactgtttgtgacagtcacgggttttgtgacaatacagctggctccttccgctgcctctgttatcagggctttcaagccccacaggatgggcaagggtgtgtggatgtgaatgaatgtgaactgctcagtggggtgtgtggtgaagccttctgtgaaaacgtggaagggtccttcctgtgcgtgtgtgctgatgaaaaccaagagtacagccccatgactgggcagtgccgctcccggacctccacagatttagatgtagatgtagatcaacccaaagaagaaaagaaagaatgctactataatctcaatgacgccagtctctgtgataatgtgttggcccccaatgtcacgaaacaagaatgctgctgtacatcaggcgtgggatggggagataactgcgaaatcttcccctgcccggtcttgggaactgctgagttcactgaaatgtgtcccaaagggaaaggttttgtgcctgctggagaatcatcttctgaagctggtggtgagaactataaagatgcagatgaatgcctactttttggacaagaaatctgcaaaaatggtttctgtttgaacactcggcctgggtatgaatgctactgtaagcaagggacgtactatgatcctgtgaaactgcagtgctttgatatggatgaatgtcaagaccccagtagttgtattgatggccagtgtgttaatacagagggctcttacaactgcttctgtactcaccccatggtcctggatgcgtcagaaaaaagatgtatacgaccggctgagtcaaacgaacaaatagaagaaactgatgtctaccaagatttgtgctgggaacatctgagtgatgaatacgtgtgtagccggcctcttgtgggcaagcagacaacgtacactgagtgctgctgtctgtatggagaggcctggggcatgcagtgtgccctctgccccctgaaggattcagatgactatgctcagctgtgtaacatccccgtgacgggacgccggcagccatatggacgggacgccttggttgacttcagtgaacagtatactccagaagccgatccctacttcatccaagaccgttttctaaatagctttgaggagttacaggctgaggaatgcggcatcctcaatggatgtgaaaatggtcgctgtgtgagggtccaggaaggttacacctgcgattgctttgatgggtatcacttggatacggccaagatgacctgtgtcgatgtaaatgaatgcgatgagttgaacaaccggatgtctctctgcaagaatgccaagtgcattaacaccgatggttcctacaagtgtttgtgtctgccaggctacgtgccttctgacaagccaaactactgcactccgttgaataccgccttgaatttagagaaagacagtgacctggagtgaaacagaatctacataacctaagcccatatactctgcactgtgtaaaggaaaagggagaaatgtattatacttgagacattgcacctaccccggaaggctggaaatacagaaacagcatggaattgcaagtcctctgaagacaatgagaggatttaggatgagcccgataggtgtggcagaccaaatggacatttctctaaaaaaccagtatatatagtctgttcatatgtaaaattcaatggaagagaggtggaacagtgctgttattttaaacagaaggttgtattattatgttgttttgtttttttactattgcttgattaaatttggcatttaaatagtggtggaaatattttatataattttcattttttggttgtgcagttccttggctactgtttttcttttacttcagttttttaaaaatctcaaatgaaaaagtcttcgatacaatattgttaagctgtattataagtattgttacacagggttatgcaattcccggcctggagcatttttgaaattcaaattgtctgtcctgtggagcaggcagtgattttgttccaaaactttgtatacacatttggagaaaagtactttatattttcagtgttttgtctgattttaatgtccgttcttagccaagctgctagcaggtgttaattggatccctttccttcactgaaatggaagagtttataagcttacgttagtattgtaatatgtaaagtaagcccaacaaaaatttttaaaaatttgatgatccccaatatatctaccattgtatgttaaataaatcaccatttttgtagaaaaaattctacctgagagtaattgtcaatgagtacatgtgtataagttgtatcccactctccccacttttatcttttccagtggtcttctgttaatgtagtgtcttttacaagttaatcattaaatttgttagatcttgttatgggct

SEQ ID NO: 15713 - DNA, 5293 bp, Homo sapiens
  source 1..5293: mol_type = unassigned DNA
gagacaccactgaatacagagcagcgagcactgaaggcttccctctttccttaaacctgtcgggttgtgggctctctcttttcccctcttgctcctttcttttctttttttctgtttttttaaaccttccaaggcaagttcatggatactaagctgatgtgtttgttgttctttttctccctgcctccgctcctagtgagtaaccacactggccgcatcaaggtggtctttactccgagcatctgtaaagtgacctgcaccaagggcagctgtcagaacagctgtgagaaggggaacaccaccactctcattagtgagaatggtcatgctgccgacaccctgacggccacgaacttccgagtggtaatttgccatcttccatgtatgaatggtggccagtgcagttcaagggacaaatgtcagtgccctccaaatttcacaggaaaactttgtcagatcccagtccatggtgccagcgtgcctaaactttatcagcattcccagcagccaggcaaggcgttggggacgcatgtcatccattcaacacataccttgcctctgaccgtgactagccagcaaggagtcaaagtgaaatttcctcctaacatagtcaatatccatgtgaaacatcctcctgaagcttccgtccagatacatcaggtttcaagaattgatggcccaacaggccagaagacaaaagaagctcaaccaggccaatcccaagtctcgtaccaagggcttcctgtccagaagacccagaccatacattccacatactcccaccagcaggtcattcctcacgtctaccccgtggctgctaagacacagcttggccggtgcttccaggaaaccattgggtcacagtgtggcaaagcgctccctggcctttcaaagcaagaggactgctgtggaactgtgggtacctcctggggctttaacaaatgccagaaatgccccaagaaaccatcttatcatggatacaaccaaatgatggaatgcctaccgggttataagcgggttaacaacaccttttgccaagatattaatgaatgtcagctacaaggtgtatgccctaatggtgagtgtttgaataccatgggcagctatcgatgtacctgcaaaataggatttgggccggatcctaccttttcaagttgtgttcctgatccccctgtgatctcggaagagaaagggccctgttaccgacttgtcagttctggaagacagtgtatgcaccctctgtctgttcacctcaccaagcagctctgctgttgtagtgtgggcaaggcctggggcccacactgtgagaaatgtccccttccaggcacagctgcttttaaggaaatctgtcctggtggaatgggttatacggtttctggcgttcatagacgcaggccaatccatcaccatgtaggtaaaggacctgtatttgtcaagccaaagaacactcaacctgttgctaaaagtactcatcctccacctctcccagccaaggaagagccagtggaggccctgaccttctcccgggaacacgggccaggagtggcggagccagaagtggcaactgcaccccctgaaaaggaaataccttcattggatcaagagaaaaccaaacttgagcctggtcaaccccagctgtctccaggcatttccactattcatctgcatccacagtttccaggtatagtgattgaaaaaacatcacctcctgtgcctgttgaagtagctcctgaagcttctacgtctagtgccagccaagtgattgctcctactcaagtgacagaaatcaatgaatgtactgtgaaccctgatatctgtggagcaggacactgcattaacctaccagtgagatatacctgtatatgctacgagggctacaggttcagtgaacaacagaggaaatgtgtggatattgatgagtgtactcaggtccaacacctctgctcccagggccgctgtgaaaacaccgagggaagtttcttgtgcatttgcccagcaggatttatggccagtgaggagggtactaactgcatagatgttgacgaatgcctgaggccggacgtctgtggggaggggcactgtgtcaatactgtgggggccttccggtgtgaatactgtgacagcgggtaccgcatgactcagagaggccgttgtgaggatattgatgaatgtttgaatccaagcacttgtccagatgagcagtgtgtgaattctcctggatcttaccagtgcgttccctgcacagaaggattccgaggctggaatggacagtgccttgatgtggacgagtgcctggaaccaaacgtctgcgcaaatggtgattgttccaaccttgaaggctcctacatgtgttcatgccacaaaggctatacccggactccggaccacaagcactgtagagatattgatgaatgtcagcaagggaatctatgtgtaaacgggcagtgcaaaaataccgagggctccttcaggtgcacctgtggacaggggtaccagctgtcggcagctaaagaccagtgtgaagacattgatgaatgccagcaccgtcatctctgtgctcatgggcagtgcaggaacactgagggctcttttcaatgtgtgtgtgaccagggttacagagcatctgggcttggagaccactgtgaagatatcaatgaatgcttggaggacaagagtgtttgccagagaggagactgcattaatactgcagggtcctatgattgtacttgtccggatggatttcagctagatgacaataaaacatgtcaagatattaatgaatgtgaacatccagggctctgtggtccgcaaggggagtgcctaaacacagagggttctttccattgtgtctgccagcagggtttctcaatctctgcagatggccgtacgtgtgaagatattgatgaatgtgtaaacaacactgtttgtgacagtcacgggttttgtgacaatacagctggctccttccgctgcctctgttatcagggctttcaagccccacaggatgggcaagggtgtgtggatgtgaatgaatgtgaactgctcagtggggtgtgtggtgaagccttctgtgaaaacgtggaagggtccttcctgtgcgtgtgtgctgatgaaaaccaagagtacagccccatgactgggcagtgccgctcccggacctccacagatttagatgtagatgtagatcaacccaaagaagaaaagaaagaatgctactataatctcaatgacgccagtctctgtgataatgtgttggcccccaatgtcacgaaacaagaatgctgctgtacatcaggcgtgggatggggagataactgcgaaatcttcccctgcccggtcttgggaactgctgagttcactgaaatgtgtcccaaagggaaaggttttgtgcctgctggagaatcatcttctgaagctggtggtgagaactataaagatgcagatgaatgcctactttttggacaagaaatctgcaaaaatggtttctgtttgaacactcggcctgggtatgaatgctactgtaagcaagggacgtactatgatcctgtgaaactgcagtgctttgatatggatgaatgtcaagaccccagtagttgtattgatggccagtgtgttaatacagagggctcttacaactgcttctgtactcaccccatggtcctggatgcgtcagaaaaaagatgtatacgaccggctgagtcaaacgaacaaatagaagaaactgatgtctaccaagatttgtgctgggaacatctgagtgatgaatacgtgtgtagccggcctcttgtgggcaagcagacaacgtacactgagtgctgctgtctgtatggagaggcctggggcatgcagtgtgccctctgccccctgaaggattcagatgactatgctcagctgtgtaacatccccgtgacgggacgccggcagccatatggacgggacgccttggttgacttcagtgaacagtatactccagaagccgatccctacttcatccaagaccgttttctaaatagctttgaggagttacaggctgaggaatgcggcatcctcaatggatgtgaaaatggtcgctgtgtgagggtccaggaaggttacacctgcgattgctttgatgggtatcacttggatacggccaagatgacctgtgtcgatgtaaatgaatgcgatgagttgaacaaccggatgtctctctgcaagaatgccaagtgcattaacaccgatggttcctacaagtgtttgtgtctgccaggctacgtgccttctgacaagccaaactactgcactccgttgaataccgccttgaatttagagaaagacagtgacctggagtgaaacagaatctacataacctaagcccatatactctgcactgtgtaaaggaaaagggagaaatgtattatacttgagacattgcacctaccccggaaggctggaaatacagaaacagcatggaattgcaagtcctctgaagacaatgagaggatttaggatgagcccgataggtgtggcagaccaaatggacatttctctaaaaaaccagtatatatagtctgttcatatgtaaaattcaatggaagagaggtggaacagtgctgttattttaaacagaaggttgtattattatgttgttttgtttttttactattgcttgattaaatttggcatttaaatagtggtggaaatattttatataattttcattttttggttgtgcagttccttggctactgtttttcttttacttcagttttttaaaaatctcaaatgaaaaagtcttcgatacaatattgttaagctgtattataagtattgttacacagggttatgcaattcccggcctggagcatttttgaaattcaaattgtctgtcctgtggagcaggcagtgattttgttccaaaactttgtatacacatttggagaaaagtactttatattttcagtgttttgtctgattttaatgtccgttcttagccaagctgctagcaggtgttaattggatccctttccttcactgaaatggaagagtttataagcttacgttagtattgtaatatgtaaagtaagcccaacaaaaatttttaaaaatttgatgatccccaatatatctaccattgtatgttaaataaatcaccatttttgtagaaaaaattctacctgagagtaattgtcaatgagtacatgtgtataagttgtatcccactctccccacttttatcttttccagtggtcttctgttaatgtagtgtcttttacaagttaatcattaaatttgttagatcttgttatgggct

SEQ ID NO: 15714 - DNA, 6333 bp, Homo sapiens
  source 1..6333: mol_type = unassigned DNA
cgctcgctctcggccaccctcgccgggccccgctgcggcgcgcgctgcaacccccggccggacgcgcggaccctcaccttgcgcggcccgctcccctcgcccctccccgctccccgggctccgcgctccccacccccacgccctcctcctgctcccagccacaatcggccggggtctggggccgctcagctgcccgcagagcctcctccctcgccaccgacttggtctcctcccgcctttcccgggctctcggcagctctcgggggagcccgaacgcgcggggaaaggcgagccgcacggccgggggagggggccggaccgcgcgcgaccggtcgcgcccgctggggcccgcgatggcgggggcctggctcaggtgggggctcctgctctgggcagggctcctcgcgtcctcggcgcacggccggctgcggaggatcacctacgtggtgcacccgggccccggcctggcagccggcgccttgcccctgagcgggcccccgcgttcgcggacattcaacgtcgcgctcaacgccaggtacagccgcagctcggcggctgccggcgcccccagccgtgcctcccccggggtcccctcggagaggacccggcgcacgagcaagccgggcggcgcggccctgcaggggctcagaccgccgccgccgccgccgccggagcctgcgcgtcccgcggtccccggcgggcagctccaccccaatcccggcggccacccggcagccgccccgttcaccaaacaaggcaggcaagttgtgcgctccaaggtgccgcaggagacccagagcggcggaggctctaggctgcaggttcaccagaagcagcagctgcagggggtcaatgtctgtggagggcggtgctgtcatggctggagtaaggcccctggctcccagaggtgcaccaaacctagctgtgttccgccatgtcagaatggagggatgtgtctccggccacaactctgtgtgtgtaaaccagggaccaagggcaaagcctgtgaaacaatagctgcccaggacacctcgtcaccagtctttggagggcagagtcctggggctgcttcctcgtggggccctcctgagcaagcagcaaagcatacttcatctaagaaggcagacactctaccaagagtcagccctgtggcccagatgaccttaaccctcaagccgaagccttcagtgggactcccccagcagatacattctcaagtgactcctctttcttcccagagtgtggtgattcaccatggccagacccaggaatacgtgctcaagcccaagtactttccagcccagaaggggatttcaggagagcagtccactgaaggttctttccctttaagatatgtgcaggatcaagttgcggcaccttttcagctgagtaaccacactggccgcatcaaggtggtctttactccgagcatctgtaaagtgacctgcaccaagggcagctgtcagaacagctgtgagaaggggaacaccaccactctcattagtgagaatggtcatgctgccgacaccctgacggccacgaacttccgagtggtaatttgccatcttccatgtatgaatggtggccagtgcagttcaagggacaaatgtcagtgccctccaaatttcacaggaaaactttgtcagatcccagtccatggtgccagcgtgcctaaactttatcagcattcccagcagccaggcaaggcgttggggacgcatgtcatccattcaacacataccttgcctctgaccgtgactagccagcaaggagtcaaagtgaaatttcctcctaacatagtcaatatccatgtgaaacatcctcctgaagcttccgtccagatacatcaggtttcaagaattgatggcccaacaggccagaagacaaaagaagctcaaccaggccaatcccaagtctcgtaccaagggcttcctgtccagaagacccagaccatacattccacatactcccaccagcaggtcattcctcacgtctaccccgtggctgctaagacacagcttggccggtgcttccaggaaaccattgggtcacagtgtggcaaagcgctccctggcctttcaaagcaagaggactgctgtggaactgtgggtacctcctggggctttaacaaatgccagaaatgccccaagaaaccatcttatcatggatacaaccaaatgatggaatgcctaccgggttataagcgggttaacaacaccttttgccaagatattaatgaatgtcagctacaaggtgtatgccctaatggtgagtgtttgaataccatgggcagctatcgatgtacctgcaaaataggatttgggccggatcctaccttttcaagttgtgttcctgatccccctgtgatctcggaagagaaagggccctgttaccgacttgtcagttctggaagacagtgtatgcaccctctgtctgttcacctcaccaagcagctctgctgttgtagtgtgggcaaggcctggggcccacactgtgagaaatgtccccttccaggcacagctgcttttaaggaaatctgtcctggtggaatgggttatacggtttctggcgttcatagacgcaggccaatccatcaccatgtaggtaaaggacctgtatttgtcaagccaaagaacactcaacctgttgctaaaagtactcatcctccacctctcccagccaaggaagagccagtggaggccctgaccttctcccgggaacacgggccaggagtggcggagccagaagtggcaactgcaccccctgaaaaggaaataccttcattggatcaagagaaaaccaaacttgagcctggtcaaccccagctgtctccaggcatttccactattcatctgcatccacagtttccagtagtgattgaaaaaacatcacctcctgtgcctgttgaagtagctcctgaagcttctacgtctagtgccagccaagtgattgctcctactcaagtgacagaaatcaatgaatgtactgtgaaccctgatatctgtggagcaggacactgcattaacctaccagtgagatatacctgtatatgctacgagggctacaggttcagtgaacaacagaggaaatgtgtggatattgatgagtgtactcaggtccaacacctctgctcccagggccgctgtgaaaacaccgagggaagtttcttgtgcatttgcccagcaggatttatggccagtgaggagggtactaactgcatagatgttgacgaatgcctgaggccggacgtctgtggggaggggcactgtgtcaatactgtgggggccttccggtgtgaatactgtgacagcgggtaccgcatgactcagagaggccgttgtgaggatattgatgaatgtttgaatccaagcacttgtccagatgagcagtgtgtgaattctcctggatcttaccagtgcgttccctgcacagaaggattccgaggctggaatggacagtgccttgatgtggacgagtgcctggaaccaaacgtctgcgcaaatggtgattgttccaaccttgaaggctcctacatgtgttcatgccacaaaggctatacccggactccggaccacaagcactgtagagatattgatgaatgtcagcaagggaatctatgtgtaaacgggcagtgcaaaaataccgagggctccttcaggtgcacctgtggacaggggtaccagctgtcggcagctaaagaccagtgtgaagacattgatgaatgccagcaccgtcatctctgtgctcatgggcagtgcaggaacactgagggctcttttcaatgtgtgtgtgaccagggttacagagcatctgggcttggagaccactgtgaagatatcaatgaatgcttggaggacaagagtgtttgccagagaggagactgcattaatactgcagggtcctatgattgtacttgtccggatggatttcagctagatgacaataaaacatgtcaagatattaatgaatgtgaacatccagggctctgtggtccgcaaggggagtgcctaaacacagagggttctttccattgtgtctgccagcagggtttctcaatctctgcagatggccgtacgtgtgaagatattgatgaatgtgtaaacaacactgtttgtgacagtcacgggttttgtgacaatacagctggctccttccgctgcctctgttatcagggctttcaagccccacaggatgggcaagggtgtgtggatgtgaatgaatgtgaactgctcagtggggtgtgtggtgaagccttctgtgaaaacgtggaagggtccttcctgtgcgtgtgtgctgatgaaaaccaagagtacagccccatgactgggcagtgccgctcccggacctccacagatttagatgtagatgtagatcaacccaaagaagaaaagaaagaatgctactataatctcaatgacgccagtctctgtgataatgtgttggcccccaatgtcacgaaacaagaatgctgctgtacatcaggcgtgggatggggagataactgcgaaatcttcccctgcccggtcttgggaactgctgagttcactgaaatgtgtcccaaagggaaaggttttgtgcctgctggagaatcatcttctgaagctggtggtgagaactataaagatgcagatgaatgcctactttttggacaagaaatctgcaaaaatggtttctgtttgaacactcggcctgggtatgaatgctactgtaagcaagggacgtactatgatcctgtgaaactgcagtgctttgatatggatgaatgtcaagaccccagtagttgtattgatggccagtgtgttaatacagagggctcttacaactgcttctgtactcaccccatggtcctggatgcgtcagaaaaaagatgtatacgaccggctgagtcaaacgaacaaatagaagaaactgatgtctaccaagatttgtgctgggaacatctgagtgatgaatacgtgtgtagccggcctcttgtgggcaagcagacaacgtacactgagtgctgctgtctgtatggagaggcctggggcatgcagtgtgccctctgccccctgaaggattcagatgactatgctcagctgtgtaacatccccgtgacgggacgccggcagccatatggacgggacgccttggttgacttcagtgaacagtatactccagaagccgatccctacttcatccaagaccgttttctaaatagctttgaggagttacaggctgaggaatgcggcatcctcaatggatgtgaaaatggtcgctgtgtgagggtccaggaaggttacacctgcgattgctttgatgggtatcacttggatacggccaagatgacctgtgtcgatgtaaatgaatgcgatgagttgaacaaccggatgtctctctgcaagaatgccaagtgcattaacaccgatggttcctacaagtgtttgtgtctgccaggctacgtgccttctgacaagccaaactactgcactccgttgaataccgccttgaatttagagaaagacagtgacctggagtgaaacagaatctacataacctaagcccatatactctgcactgtgtaaaggaaaagggagaaatgtattatacttgagacattgcacctaccccggaaggctggaaatacagaaacagcatggaattgcaagtcctctgaagacaatgagaggatttaggatgagcccgataggtgtggcagaccaaatggacatttctctaaaaaaccagtatatatagtctgttcatatgtaaaattcaatggaagagaggtggaacagtgctgttattttaaacagaaggttgtattattatgttgttttgtttttttactattgcttgattaaatttggcatttaaatagtggtggaaatattttatataattttcattttttggttgtgcagttccttggctactgtttttcttttacttcagttttttaaaaatctcaaatgaaaaagtcttcgatacaatattgttaagctgtattataagtattgttacacagggttatgcaattcccggcctggagcatttttgaaattcaaattgtctgtcctgtggagcaggcagtgattttgttccaaaactttgtatacacatttggagaaaagtactttatattttcagtgttttgtctgattttaatgtccgttcttagccaagctgctagcaggtgttaattggatccctttccttcactgaaatggaagagtttataagcttacgttagtattgtaatatgtaaagtaagcccaacaaaaatttttaaaaatttgatgatccccaatatatctaccattgtatgttaaataaatcaccatttttgtagaa

SEQ ID NO: 15715 - DNA, 5087 bp, Homo sapiens
  source 1..5087: mol_type = unassigned DNA
cgggttgtgggctctctcttttcccctcttgctcctttcttttctttttttctgtttttttaaaccttccaaggcaagttcatggatactaagctgatgtgtttgttgttctttttctccctgcctccgctcctagtgagtaaccacactggccgcatcaaggtggtctttactccgagcatctgtaaagtgacctgcaccaagggcagctgtcagaacagctgtgagaaggggaacaccaccactctcattagtgagaatggtcatgctgccgacaccctgacggccacgaacttccgagtggtaatttgccatcttccatgtatgaatggtggccagtgcagttcaagggacaaatgtcagtgccctccaaatttcacaggaaaactttgtcagatcccagtccatggtgccagcgtgcctaaactttatcagcattcccagcagccaggcaaggcgttggggacgcatgtcatccattcaacacataccttgcctctgaccgtgactagccagcaaggagtcaaagtgaaatttcctcctaacatagtcaatatccatgtgaaacatcctcctgaagcttccgtccagatacatcaggtttcaagaattgatggcccaacaggccagaagacaaaagaagctcaaccaggccaatcccaagtctcgtaccaagggcttcctgtccagaagacccagaccatacattccacatactcccaccagcaggtcattcctcacgtctaccccgtggctgctaagacacagcttggccggtgcttccaggaaaccattgggtcacagtgtggcaaagcgctccctggcctttcaaagcaagaggactgctgtggaactgtgggtacctcctggggctttaacaaatgccagaaatgccccaagaaaccatcttatcatggatacaaccaaatgatggaatgcctaccgggttataagcgggttaacaacaccttttgccaagatattaatgaatgtcagctacaaggtgtatgccctaatggtgagtgtttgaataccatgggcagctatcgatgtacctgcaaaataggatttgggccggatcctaccttttcaagttgtgttcctgatccccctgtgatctcggaagagaaagggccctgttaccgacttgtcagttctggaagacagtgtatgcaccctctgtctgttcacctcaccaagcagctctgctgttgtagtgtgggcaaggcctggggcccacactgtgagaaatgtccccttccaggcacagctgcttttaaggaaatctgtcctggtggaatgggttatacggtttctggcgttcatagacgcaggccaatccatcaccatgtaggtaaaggacctgtatttgtcaagccaaagaacactcaacctgttgctaaaagtactcatcctccacctctcccagccaaggaagagccagtggaggccctgaccttctcccgggaacacgggccaggagtggcggagccagaagtggcaactgcaccccctgaaaaggaaataccttcattggatcaagagaaaaccaaacttgagcctggtcaaccccagctgtctccaggcatttccactattcatctgcatccacagtttccagtagtgattgaaaaaacatcacctcctgtgcctgttgaagtagctcctgaagcttctacgtctagtgccagccaagtgattgctcctactcaagtgacagaaatcaatgaatgtactgtgaaccctgatatctgtggagcaggacactgcattaacctaccagtgagatatacctgtatatgctacgagggctacaggttcagtgaacaacagaggaaatgtgtggatattgatgagtgtactcaggtccaacacctctgctcccagggccgctgtgaaaacaccgagggaagtttcttgtgcatttgcccagcaggatttatggccagtgaggagggtactaactgcatagatgttgacgaatgcctgaggccggacgtctgtggggaggggcactgtgtcaatactgtgggggccttccggtgtgaatactgtgacagcgggtaccgcatgactcagagaggccgttgtgaggatattgatgaatgtttgaatccaagcacttgtccagatgagcagtgtgtgaattctcctggatcttaccagtgcgttccctgcacagaaggattccgaggctggaatggacagtgccttgatgtggacgagtgcctggaaccaaacgtctgcgcaaatggtgattgttccaaccttgaaggctcctacatgtgttcatgccacaaaggctatacccggactccggaccacaagcactgtagagatattgatgaatgtcagcaagggaatctatgtgtaaacgggcagtgcaaaaataccgagggctccttcaggtgcacctgtggacaggggtaccagctgtcggcagctaaagaccagtgtgaagacattgatgaatgccagcaccgtcatctctgtgctcatgggcagtgcaggaacactgagggctcttttcaatgtgtgtgtgaccagggttacagagcatctgggcttggagaccactgtgaagatatcaatgaatgcttggaggacaagagtgtttgccagagaggagactgcattaatactgcagggtcctatgattgtacttgtccggatggatttcagctagatgacaataaaacatgtcaagatattaatgaatgtgaacatccagggctctgtggtccgcaaggggagtgcctaaacacagagggttctttccattgtgtctgccagcagggtttctcaatctctgcagatggccgtacgtgtgaagatattgatgaatgtgtaaacaacactgtttgtgacagtcacgggttttgtgacaatacagctggctccttccgctgcctctgttatcagggctttcaagccccacaggatgggcaagggtgtgtggatgtgaatgaatgtgaactgctcagtggggtgtgtggtgaagccttctgtgaaaacgtggaagggtccttcctgtgcgtgtgtgctgatgaaaaccaagagtacagccccatgactgggcagtgccgctcccggacctccacagatttagatgtagatgtagatcaacccaaagaagaaaagaaagaatgctactataatctcaatgacgccagtctctgtgataatgtgttggcccccaatgtcacgaaacaagaatgctgctgtacatcaggcgtgggatggggagataactgcgaaatcttcccctgcccggtcttgggaactgctgagttcactgaaatgtgtcccaaagggaaaggttttgtgcctgctggagaatcatcttctgaagctggtggtgagaactataaagatgcagatgaatgcctactttttggacaagaaatctgcaaaaatggtttctgtttgaacactcggcctgggtatgaatgctactgtaagcaagggacgtactatgatcctgtgaaactgcagtgctttgatatggatgaatgtcaagaccccagtagttgtattgatggccagtgtgttaatacagagggctcttacaactgcttctgtactcaccccatggtcctggatgcgtcagaaaaaagatgtatacgaccggctgagtcaaacgaacaaatagaagaaactgatgtctaccaagatttgtgctgggaacatctgagtgatgaatacgtgtgtagccggcctcttgtgggcaagcagacaacgtacactgagtgctgctgtctgtatggagaggcctggggcatgcagtgtgccctctgccccctgaaggattcagatgactatgctcagctgtgtaacatccccgtgacgggacgccggcagccatatggacgggacgccttggttgacttcagtgaacagtatactccagaagccgatccctacttcatccaagaccgttttctaaatagctttgaggagttacaggctgaggaatgcggcatcctcaatggatgtgaaaatggtcgctgtgtgagggtccaggaaggttacacctgcgattgctttgatgggtatcacttggatacggccaagatgacctgtgtcgatgtaaatgaatgcgatgagttgaacaaccggatgtctctctgcaagaatgccaagtgcattaacaccgatggttcctacaagtgtttgtgtctgccaggctacgtgccttctgacaagccaaactactgcactccgttgaataccgccttgaatttagagaaagacagtgacctggagtgaaacagaatctacataacctaagcccatatactctgcactgtgtaaaggaaaagggagaaatgtattatacttgagacattgcacctaccccggaaggctggaaatacagaaacagcatggaattgcaagtcctctgaagacaatgagaggatttaggatgagcccgataggtgtggcagaccaaatggacatttctctaaaaaaccagtatatatagtctgttcatatgtaaaattcaatggaagagaggtggaacagtgctgttattttaaacagaaggttgtattattatgttgttttgtttttttactattgcttgattaaatttggcatttaaatagtggtggaaatattttatataattttcattttttggttgtgcagttccttggctactgtttttcttttacttcagttttttaaaaatctcaaatgaaaaagtcttcgatacaatattgttaagctgtattataagtattgttacacagggttatgcaattcccggcctggagcatttttgaaattcaaattgtctgtcctgtggagcaggcagtgattttgttccaaaactttgtatacacatttggagaaaagtactttatattttcagtgttttgtctgattttaatgtccgttcttagccaagctgctagcaggtgttaattggatccctttccttcactgaaatggaagagtttataagcttacgttagtattgtaatatgtaaagtaagcccaacaaaaatttttaaaaatttgatgatccccaatatatctaccattgtatgttaaataaatcaccatttttgtagaaaaaa

SEQ ID NO: 15716 - DNA, 5164 bp, Homo sapiens
  source 1..5164: mol_type = unassigned DNA
gagacaccactgaatacagagcagcgagcactgaaggcttccctctttccttaaacctgtcgggttgtgggctctctcttttcccctcttgctcctttcttttctttttttctgtttttttaaaccttccaaggcaagttcatggatactaagctgatgtgtttgttgttctttttctccctgcctccgctcctagtgagtaaccacactggccgcatcaaggtggtctttactccgagcatctgtaaagtgacctgcaccaagggcagctgtcagaacagctgtgagaaggggaacaccaccactctcattagtgagaatggtcatgctgccgacaccctgacggccacgaacttccgagtggtaatttgccatcttccatgtatgaatggtggccagtgcagttcaagggacaaatgtcagtgccctccaaatttcacaggaaaactttgtcagatcccagtccatggtgccagcgtgcctaaactttatcagcattcccagcagccaggcaaggcgttggggacgcatgtcatccattcaacacataccttgcctctgaccgtgactagccagcaaggagtcaaagtgaaatttcctcctaacatagtcaatatccatgtgaaacatcctcctgaagcttccgtccagatacatcaggtttcaagaattgatggcccaacaggccagaagacaaaagaagctcaaccaggccaatcccaagtctcgtaccaagggcttcctgtccagaagacccagaccatacattccacatactcccaccagcaggtcattcctcacgtctaccccgtggctgctaagacacagcttggccggtgcttccaggaaaccattgggtcacagtgtggcaaagcgctccctggcctttcaaagcaagaggactgctgtggaactgtgggtacctcctggggctttaacaaatgccagaaatgccccaagaaaccatcttatcatggatacaaccaaatgatggaatgcctaccgggttataagcgggttaacaacaccttttgccaagatattaatgaatgtcagctacaaggtgtatgccctaatggtgagtgtttgaataccatgggcagctatcgatgtacctgcaaaataggatttgggccggatcctaccttttcaagttgtgttcctgatccccctgtgatctcggaagagaaagggccctgttaccgacttgtcagttctggaagacagtgtatgcaccctctgtctgttcacctcaccaagcagctctgctgttgtagtgtgggcaaggcctggggcccacactgtgagaaatgtccccttccaggcacagctgcttttaaggaaatctgtcctggtggaatgggttatacggtttctggcgttcatagacgcaggccaatccatcaccatgtaggtaaaggacctgtatttgtcaagccaaagaacactcaacctgttgctaaaagtactcatcctccacctctcccagccaaggaagagccagtggaggccctgaccttctcccgggaacacgggccaggagtggcggagccagaagtggcaactgcaccccctgaaaaggaaataccttcattggatcaagagaaaaccaaacttgagcctggtcaaccccagctgtctccaggcatttccactattcatctgcatccacagtttccagtagtgattgaaaaaacatcacctcctgtgcctgttgaagtagctcctgaagcttctacgtctagtgccagccaagtgattgctcctactcaagtgacagaaatcaatgaatgtactgtgaaccctgatatctgtggagcaggacactgcattaacctaccagtgagatatacctgtatatgctacgagggctacaggttcagtgaacaacagaggaaatgtgtggatattgatgagtgtactcaggtccaacacctctgctcccagggccgctgtgaaaacaccgagggaagtttcttgtgcatttgcccagcaggatttatggccagtgaggagggtactaactgcatagatgttgacgaatgcctgaggccggacgtctgtggggaggggcactgtgtcaatactgtgggggccttccggtgtgaatactgtgacagcgggtaccgcatgactcagagaggccgttgtgaggatattgatgaatgtttgaatccaagcacttgtccagatgagcagtgtgtgaattctcctggatcttaccagtgcgttccctgcacagaaggattccgaggctggaatggacagtgccttgatgtggacgagtgcctggaaccaaacgtctgcgcaaatggtgattgttccaaccttgaaggctcctacatgtgttcatgccacaaaggctatacccggactccggaccacaagcactgtagagatattgatgaatgtcagcaagggaatctatgtgtaaacgggcagtgcaaaaataccgagggctccttcaggtgcacctgtggacaggggtaccagctgtcggcagctaaagaccagtgtgaagacattgatgaatgccagcaccgtcatctctgtgctcatgggcagtgcaggaacactgagggctcttttcaatgtgtgtgtgaccagggttacagagcatctgggcttggagaccactgtgaagatatcaatgaatgcttggaggacaagagtgtttgccagagaggagactgcattaatactgcagggtcctatgattgtacttgtccggatggatttcagctagatgacaataaaacatgtcaagatattaatgaatgtgaacatccagggctctgtggtccgcaaggggagtgcctaaacacagagggttctttccattgtgtctgccagcagggtttctcaatctctgcagatggccgtacgtgtgaagatgtgaatgaatgtgaactgctcagtggggtgtgtggtgaagccttctgtgaaaacgtggaagggtccttcctgtgcgtgtgtgctgatgaaaaccaagagtacagccccatgactgggcagtgccgctcccggacctccacagatttagatgtagatgtagatcaacccaaagaagaaaagaaagaatgctactataatctcaatgacgccagtctctgtgataatgtgttggcccccaatgtcacgaaacaagaatgctgctgtacatcaggcgtgggatggggagataactgcgaaatcttcccctgcccggtcttgggaactgctgagttcactgaaatgtgtcccaaagggaaaggttttgtgcctgctggagaatcatcttctgaagctggtggtgagaactataaagatgcagatgaatgcctactttttggacaagaaatctgcaaaaatggtttctgtttgaacactcggcctgggtatgaatgctactgtaagcaagggacgtactatgatcctgtgaaactgcagtgctttgatatggatgaatgtcaagaccccagtagttgtattgatggccagtgtgttaatacagagggctcttacaactgcttctgtactcaccccatggtcctggatgcgtcagaaaaaagatgtatacgaccggctgagtcaaacgaacaaatagaagaaactgatgtctaccaagatttgtgctgggaacatctgagtgatgaatacgtgtgtagccggcctcttgtgggcaagcagacaacgtacactgagtgctgctgtctgtatggagaggcctggggcatgcagtgtgccctctgccccctgaaggattcagatgactatgctcagctgtgtaacatccccgtgacgggacgccggcagccatatggacgggacgccttggttgacttcagtgaacagtatactccagaagccgatccctacttcatccaagaccgttttctaaatagctttgaggagttacaggctgaggaatgcggcatcctcaatggatgtgaaaatggtcgctgtgtgagggtccaggaaggttacacctgcgattgctttgatgggtatcacttggatacggccaagatgacctgtgtcgatgtaaatgaatgcgatgagttgaacaaccggatgtctctctgcaagaatgccaagtgcattaacaccgatggttcctacaagtgtttgtgtctgccaggctacgtgccttctgacaagccaaactactgcactccgttgaataccgccttgaatttagagaaagacagtgacctggagtgaaacagaatctacataacctaagcccatatactctgcactgtgtaaaggaaaagggagaaatgtattatacttgagacattgcacctaccccggaaggctggaaatacagaaacagcatggaattgcaagtcctctgaagacaatgagaggatttaggatgagcccgataggtgtggcagaccaaatggacatttctctaaaaaaccagtatatatagtctgttcatatgtaaaattcaatggaagagaggtggaacagtgctgttattttaaacagaaggttgtattattatgttgttttgtttttttactattgcttgattaaatttggcatttaaatagtggtggaaatattttatataattttcattttttggttgtgcagttccttggctactgtttttcttttacttcagttttttaaaaatctcaaatgaaaaagtcttcgatacaatattgttaagctgtattataagtattgttacacagggttatgcaattcccggcctggagcatttttgaaattcaaattgtctgtcctgtggagcaggcagtgattttgttccaaaactttgtatacacatttggagaaaagtactttatattttcagtgttttgtctgattttaatgtccgttcttagccaagctgctagcaggtgttaattggatccctttccttcactgaaatggaagagtttataagcttacgttagtattgtaatatgtaaagtaagcccaacaaaaatttttaaaaatttgatgatccccaatatatctaccattgtatgttaaataaatcaccatttttgtagaaaaaattctacctgagagtaattgtcaatgagtacatgtgtataagttgtatcccactctccccacttttatcttttccagtggtcttctgttaatgtagtgtcttttacaagttaatcattaaatttgttagatcttgttatgggct

SEQ ID NO: 15717 - DNA, 5092 bp, Homo sapiens
  source 1..5092: mol_type = unassigned DNA
ctctttccttaaacctgtcgggttgtgggctctctcttttcccctcttgctcctttcttttctttttttctgtttttttaaaccttccaaggcaagttcatggatactaagctgatgtgtttgttgttctttttctccctgcctccgctcctagtgagtaaccacactggccgcatcaaggtggtctttactccgagcatctgtaaagtgacctgcaccaagggcagctgtcagaacagctgtgagaaggggaacaccaccactctcattagtgagaatggtcatgctgccgacaccctgacggccacgaacttccgagtggtaatttgccatcttccatgtatgaatggtggccagtgcagttcaagggacaaatgtcagtgccctccaaatttcacaggaaaactttgtcagatcccagtccatggtgccagcgtgcctaaactttatcagcattcccagcagccaggcaaggcgttggggacgcatgtcatccattcaacacataccttgcctctgaccgtgactagccagcaaggagtcaaagtgaaatttcctcctaacatagtcaatatccatgtgaaacatcctcctgaagcttccgtccagatacatcaggtttcaagaattgatggcccaacaggccagaagacaaaagaagctcaaccaggccaatcccaagtctcgtaccaagggcttcctgtccagaagacccagaccatacattccacatactcccaccagcaggtcattcctcacgtctaccccgtggctgctaagacacagcttggccggtgcttccaggaaaccattgggtcacagtgtggcaaagcgctccctggcctttcaaagcaagaggactgctgtggaactgtgggtacctcctggggctttaacaaatgccagaaatgccccaagaaaccatcttatcatggatacaaccaaatgatggaatgcctaccgggttataagcgggttaacaacaccttttgccaagatattaatgaatgtcagctacaaggtgtatgccctaatggtgagtgtttgaataccatgggcagctatcgatgtacctgcaaaataggatttgggccggatcctaccttttcaagttgtgttcctgatccccctgtgatctcggaagagaaagggccctgttaccgacttgtcagttctggaagacagtgtatgcaccctctgtctgttcacctcaccaagcagctctgctgttgtagtgtgggcaaggcctggggcccacactgtgagaaatgtccccttccaggcacagccaaggaagagccagtggaggccctgaccttctcccgggaacacgggccaggagtggcggagccagaagtggcaactgcaccccctgaaaaggaaataccttcattggatcaagagaaaaccaaacttgagcctggtcaaccccagctgtctccaggcatttccactattcatctgcatccacagtttccagtagtgattgaaaaaacatcacctcctgtgcctgttgaagtagctcctgaagcttctacgtctagtgccagccaagtgattgctcctactcaagtgacagaaatcaatgaatgtactgtgaaccctgatatctgtggagcaggacactgcattaacctaccagtgagatatacctgtatatgctacgagggctacaggttcagtgaacaacagaggaaatgtgtggatattgatgagtgtactcaggtccaacacctctgctcccagggccgctgtgaaaacaccgagggaagtttcttgtgcatttgcccagcaggatttatggccagtgaggagggtactaactgcatagatgttgacgaatgcctgaggccggacgtctgtggggaggggcactgtgtcaatactgtgggggccttccggtgtgaatactgtgacagcgggtaccgcatgactcagagaggccgttgtgaggatattgatgaatgtttgaatccaagcacttgtccagatgagcagtgtgtgaattctcctggatcttaccagtgcgttccctgcacagaaggattccgaggctggaatggacagtgccttgatgtggacgagtgcctggaaccaaacgtctgcgcaaatggtgattgttccaaccttgaaggctcctacatgtgttcatgccacaaaggctatacccggactccggaccacaagcactgtagagatattgatgaatgtcagcaagggaatctatgtgtaaacgggcagtgcaaaaataccgagggctccttcaggtgcacctgtggacaggggtaccagctgtcggcagctaaagaccagtgtgaagacattgatgaatgccagcaccgtcatctctgtgctcatgggcagtgcaggaacactgagggctcttttcaatgtgtgtgtgaccagggttacagagcatctgggcttggagaccactgtgaagatatcaatgaatgcttggaggacaagagtgtttgccagagaggagactgcattaatactgcagggtcctatgattgtacttgtccggatggatttcagctagatgacaataaaacatgtcaagatattaatgaatgtgaacatccagggctctgtggtccgcaaggggagtgcctaaacacagagggttctttccattgtgtctgccagcagggtttctcaatctctgcagatggccgtacgtgtgaagatattgatgaatgtgtaaacaacactgtttgtgacagtcacgggttttgtgacaatacagctggctccttccgctgcctctgttatcagggctttcaagccccacaggatgggcaagggtgtgtggatgtgaatgaatgtgaactgctcagtggggtgtgtggtgaagccttctgtgaaaacgtggaagggtccttcctgtgcgtgtgtgctgatgaaaaccaagagtacagccccatgactgggcagtgccgctcccggacctccacagatttagatgtagatgtagatcaacccaaagaagaaaagaaagaatgctactataatctcaatgacgccagtctctgtgataatgtgttggcccccaatgtcacgaaacaagaatgctgctgtacatcaggcgtgggatggggagataactgcgaaatcttcccctgcccggtcttgggaactgctgagttcactgaaatgtgtcccaaagggaaaggttttgtgcctgctggagaatcatcttctgaagctggtggtgagaactataaagatgcagatgaatgcctactttttggacaagaaatctgcaaaaatggtttctgtttgaacactcggcctgggtatgaatgctactgtaagcaagggacgtactatgatcctgtgaaactgcagtgctttgatatggatgaatgtcaagaccccagtagttgtattgatggccagtgtgttaatacagagggctcttacaactgcttctgtactcaccccatggtcctggatgcgtcagaaaaaagatgtatacgaccggctgagtcaaacgaacaaatagaagaaactgatgtctaccaagatttgtgctgggaacatctgagtgatgaatacgtgtgtagccggcctcttgtgggcaagcagacaacgtacactgagtgctgctgtctgtatggagaggcctggggcatgcagtgtgccctctgccccctgaaggattcagatgactatgctcagctgtgtaacatccccgtgacgggacgccggcagccatatggacgggacgccttggttgacttcagtgaacagtatactccagaagccgatccctacttcatccaagaccgttttctaaatagctttgaggagttacaggctgaggaatgcggcatcctcaatggatgtgaaaatggtcgctgtgtgagggtccaggaaggttacacctgcgattgctttgatgggtatcacttggatacggccaagatgacctgtgtcgatgtaaatgaatgcgatgagttgaacaaccggatgtctctctgcaagaatgccaagtgcattaacaccgatggttcctacaagtgtttgtgtctgccaggctacgtgccttctgacaagccaaactactgcactccgttgaataccgccttgaatttagagaaagacagtgacctggagtgaaacagaatctacataacctaagcccatatactctgcactgtgtaaaggaaaagggagaaatgtattatacttgagacattgcacctaccccggaaggctggaaatacagaaacagcatggaattgcaagtcctctgaagacaatgagaggatttaggatgagcccgataggtgtggcagaccaaatggacatttctctaaaaaaccagtatatatagtctgttcatatgtaaaattcaatggaagagaggtggaacagtgctgttattttaaacagaaggttgtattattatgttgttttgtttttttactattgcttgattaaatttggcatttaaatagtggtggaaatattttatataattttcattttttggttgtgcagttccttggctactgtttttcttttacttcagttttttaaaaatctcaaatgaaaaagtcttcgatacaatattgttaagctgtattataagtattgttacacagggttatgcaattcccggcctggagcatttttgaaattcaaattgtctgtcctgtggagcaggcagtgattttgttccaaaactttgtatacacatttggagaaaagtactttatattttcagtgttttgtctgattttaatgtccgttcttagccaagctgctagcaggtgttaattggatccctttccttcactgaaatggaagagtttataagcttacgttagtattgtaatatgtaaagtaagcccaacaaaaatttttaaaaatttgatgatccccaatatatctaccattgtatgttaaataaatcaccatttttgtagaaaaaattctacctgagagtaattgtcaatgagtacatgtgtataagttgtatcccactctccccacttttatcttttccagtggtcttctgttaatgtagtgtcttttacaagttaatcattaaatttgttagatcttgttatgggctaaa

SEQ ID NO: 15718 - DNA, 8567 bp, Homo sapiens
  source 1..8567: mol_type = unassigned DNA
cctcgctccctctccggtaatgagggggctgagctgtccctccgaggagggggcctggtgtggataaaagagacgaaaaagccgggggaggtttccaaaaataaaaccgtccgggtccccttcagacggctgcaggcacagggaggaggcgcgaaggtgcagcagccgtgcgagcccagctggagtaggagcgcggactcgaggctcggggcgcgcagccctcgttccgccgagagccgggcccccagtcggccgcttcagggccccctagactcagagaagctggccgccgggcggggccgggagaacagcccgcgggcgtccagcgtgccgaccacaaagctcttcgcggtgcccgcgcgcaccactctccagccgccccgcgccatgaggccgcggaccaaagcccgcagcccggggcgcgccctgcggaacccctggagaggcttcctgccgctcaccctggctctcttcgtgggcgcgggtcatgcccaaagggaccccgtagggagatacgagccggctggtggagacgcgaatcgactgcggcgccctgggggcagctacccggcagcggctgcagccaaggtgtacagtctgttccgggagcaggacgcgcctgtcgcgggcttgcagcccgtggagcgggcccagccgggctgggggagccccaggaggcccaccgaggcggaggccaggaggccgtcccgcgcgcagcagtcgcggcgtgtccagccacctgcgcagacccggagaagcactcccctgggccagcagcaaccagcaccccggacccgggccgcgccggctctcccacgcctggggaccccacagcggtctggggctgcgcccccaaccccgccgcgagggcggctcacggggaggaacgtctgcgggggacagtgctgcccaggatggacaacagcaaacagcaccaaccactgtatcaaacccgtttgcgagccgccgtgccagaaccggggctcctgcagccgcccgcagctctgtgtctgccgctctggtttccgtggagcccgctgcgaggaggtcattcccgatgaggaatttgacccccagaactccaggctggcacctcgacgctgggccgagcgttcacccaacctgcgcaggagcagtgcggctggagagggcaccttggccagagcacagccgccagcaccacagtcgccgcccgcaccacagtcgccaccagctgggaccctgagtggcctcagccagacccacccttcccagcagcacgtggggttgtcccgcactgtccgacttcacccgactgccacggccagtagccagctctcttccaacgccctgcccccgggaccaggccttgagcagagagatggcacccaacaggcggtacctctggagcacccctcatccccctgggggctgaacctcacggagaaaatcaagaagatcaagatcgtcttcactcccaccatctgcaagcagacctgtgcccgtggacactgtgccaacagctgtgagaggggcgacaccaccaccctgtacagccagggcggccatgggcacgatcccaagtctggcttccgcatctatttctgccagatcccctgcctgaacggaggccgctgcatcggcagggacgaatgctggtgccccgccaactccaccgggaagttctgccacctgcctatcccgcagccggacagggagcctccagggagggggtcccgccccagggccttgctggaagccccactgaagcagtccactttcacactgccgctctccaaccagctggcctccgtgaacccctccctggtgaaggtgcacattcaccacccacccgaggcctcagtgcagatccaccaggtggcccaggtgcggggcggggtggaggaggccctagtggagaacagcgtggagaccagacccccgccctggctgcctgccagccctggccacagcctctgggacagcaacaacatccctgctcggtctggagagccccctcggccactgcccccagcagcacccaggcctcgaggactgctgggccggtgttacctgaacactgtgaacggacagtgtgccaaccctctgctggagctgactacccaggaggactgctgtggcagtgtgggagccttctggggggtgactttgtgtgccccatgcccacccagaccagcctccccggtgattgagaatggccagctggagtgtcctcaggggtacaagagactgaacctcactcactgccaagatatcaacgagtgcttgaccctgggcctgtgcaaggacgcggagtgtgtgaataccaggggcagctacctgtgcacatgcagacctggcctcatgctggatccatcgcggagccgctgtgtgtcggacaaggcaatctccatgctgcagggactgtgctaccggtcgctggggcccggcacctgcaccctgcctttggcccagcggatcaccaagcagatatgctgctgcagccgcgtgggcaaagcatggggcagcgagtgtgagaaatgccctctgcctggcacagaggccttcagagagatctgccctgccggccacggctacacctacgcgagctccgacatccgcctgtccatgaggaaagccgaggaggaggaactggcaaggcccccaagggagcaagggcagaggagcagcggggcactgcccgggccagcagagaggcagcccctccgggtcgtcacggacacctggcttgaggccgggaccatccctgacaagggtgactctcaggctggccaggtcacgaccagtgtcactcatgcacctgcctgggtcacagggaatgccacaaccccaccaatgcctgaacaggggattgcagagatacaggaagaacaagtgaccccctccactgatgtgctggtgaccctgagcaccccaggcattgacagatgcgctgctggagccaccaacgtctgtggccctggaacctgcgtgaacctccccgatggatacagatgtgtctgcagccctggctaccagctgcaccccagccaggcctactgcacagatgacaacgagtgtctgagggacccctgcaagggaaaagggcgctgcatcaaccgcgtggggtcctactcctgcttctgctaccctggctacactctggccacctcaggggcgacacaggagtgtcaagatatcaatgagtgtgagcagccaggggtgtgcagcggggggcagtgcaccaacaccgagggctcgtaccactgcgagtgtgatcagggctacatcatggtcaggaaaggacactgccaagatatcaacgaatgccgtcaccccggtacctgccctgatgggagatgcgtcaattcccctggctcctacacttgtctggcctgtgaggagggctaccggggccagagtgggagctgtgtagatgtgaatgagtgtctgactcccggggtctgtgcccatggaaagtgcaccaacctagaaggctccttcagatgctcttgtgagcagggctatgaggtcacctcagatgagaagggctgccaagatgtggatgagtgtgccagccgggcctcatgccccacaggcctctgcctcaacacggagggctccttcgcctgctctgcctgtgagaacgggtactgggtgaatgaagacggcactgcctgtgaagacctagatgagtgtgccttcccgggagtctgcccctccggagtctgcaccaacacggctggctccttctcctgcaaggactgcgatgggggctaccggcccagccccctgggtgactcctgtgaagatgtggatgaatgtgaagacccccagagcagctgcctgggaggcgagtgcaagaacactgtgggctcctaccagtgcctctgtccccagggcttccagctggccaatggcaccgtgtgtgaggatgtgaatgagtgcatgggggaggagcactgcgcaccccacggcgagtgcctcaacagccacgggtctttcttctgtctgtgcgcgcctggcttcgtcagcgcagaggggggcaccagctgccaggatgtggacgagtgtgccaccacagacccgtgtgtgggagggcactgtgtcaacaccgagggctccttcaactgtctatgtgagactggcttccagccctccccagagagtggagagtgtgtggatattgacgagtgtgaggactatggagacccggtgtgtggcacctggaagtgtgaaaacagccctggctcctaccgctgtgttctgggctgccagcctggcttccacatggccccgaacggagactgcattgacatagacgagtgcgccaacgacaccatgtgtggcagccacggcttctgtgacaacactgatggctccttccgctgcctctgtgaccagggcttcgagatctctccctcaggctgggactgtgtggatgtgaacgagtgtgagcttatgctggcggtatgtggggccgcgctctgtgagaacgtggagggctccttcctgtgcctctgtgccagtgacctggaggagtacgatgcccaggaggggcactgccgcccacggggggctggaggtcagagtatgtctgaggccccaacgggggaccatgccccggcccccacccgcatggactgctactccgggcagaagggccatgcgccctgctccagtgtcctgggccggaacaccacacaggctgaatgctgctgcacccagggcgctagctggggagatgcctgtgacctctgcccgtctgaggactcagctgaattcagcgagatctgccctagtggaaaaggctacattcctgtggaaggagcctggacgtttggacagaccatgtacacagatgcggatgagtgtgtgatattcgggcctggtctctgcccgaacggccggtgcctcaacaccgtgcctggttatgtctgcctgtgcaatcccggcttccactacgatgcttcccacaagaagtgtgaggatcacgatgagtgccaggacctggcctgtgagaatggcgagtgcgtcaacacggagggctccttccactgcttctgcagccccccgctcaccctggacctcagccagcagcgctgcatgaacagcaccagcagcacggaggacctccctgaccacgacatccacatggacatctgctggaaaaaagtcaccaatgatgtgtgcagcgaacccctgcgtgggcaccgcaccacctacacggaatgctgctgccaggacggcgaggcctggagccagcagtgtgctctgtgtcccccgaggagctctgaggtctatgctcagctgtgcaacgtggctcgcattgaggcagagcgggaggccggggtccacttccggccaggctatgagtatggccccgggcccgatgacctgcactacagcatctatggcccagatggggcccccttctacaactacctgggccccgaggacaccgtccctgagcctgccttccccaacacagccggtcactcagcggaccgcacacccatccttgagtctcctttgcagccctcagaactccagccccactacgtggccagccatccagagcccccagccggcttcgaagggcttcaggcggaggagtgcggcatcctgaacggctgtgagaatggccgctgtgtgcgcgtgcgggagggctacacctgtgactgttttgagggcttccagctggatgcggcccacatggcctgcgtagatgtgaatgagtgtgatgacttgaacgggcctgctgtgctctgtgtccatggttactgcgagaacacagagggctcctaccgctgccactgctccccgggatatgtggctgaggcagggcccccccactgcactgccaaggagtagcagtcaggggtcagtgtggcaactacctggaaatggcctccagtcacaggcaggggccttgaggatgatttcctagctgggaagacaccgtgacatcaggccagaggtttccaatcagccttgcctgctttcatctctcccagcttagcctctggctgtaagcttcggtcattgcctccatgcccttgcttggctcaagcaccaccaatcgctttaatgcttcagccaccgcatgaggccctgtccaccacctttcctggccttgctatgggatgcttaccaaaggatggccctcatccaccctcccaagctgtgcgagcatgcaaggccccatggcctcacactgcagacacccctttccagccacaatccaccatcatcctgacgatcccacaactgggacagaggctacatctgccctagggaggtccttcagaatctgtggagcaagaaaggatttggggaagcttggggactgactccagagccccctcctaagaaccatcaccaccactcagccaatctgttctgggccctgattttgccacacctccatcctgtagcccattctctgaccccaaggagtggcagaagatcccttcactcagagaagcaaggctgatattagcttgttgaatgtaagagacacaaatgaagaagaacaaagagcctgagaaagcagcaagaggacatgatgaaaaatacgtggagttgatgagaaaggggagccaaggctttatacgtctaaagaaaatattcagtagctgaatccgcccagtgatagcctgtgggcaccagcagcaagggctgccatgggatacagcacccatctacaaagacctctattacataaacactgcttcttacaggaaacaaacctcttctgggatctccttttgtgaaaaccagtttgatgtgctaaaagtaaaaagtctattttccagtgtggtcttgttcagaagcagccagatttccaatgttgtttttcccctccactcagaaacccctgccctttcccttcagaaaacgatggcaggcattcctctgagtttacaagcagagactcactccaacccaaactagctgggagttcagaaccatggtggaataaagaaatgtgcatctggtctcttctgttgtttttatttcatatcagattaaatttctttaccatgttggctaagtctaaatattagagatgaggctgtgcctactccctggccagctctgctgatagcctatgatgggttccaatgggaaatgactctttactattaaaagacaaggaaagctctgacttcgtacttctctgatgaatggcaatgtaaatgaacaaggctccatgtgactggagcatggaagtgaatgctactttcttaatttaatctgccctgtcctacctgctcctctgattgttagccatcacataacttattgaatgcttgccatgtgccaggcactgtgctgagtgccatacatacatttcatttaattatccaataatcctacttactattgtttattctcaatttacaggtgaggaaactgagacatagaaagcttaaataatttgctctaggtccctatactaattgagatgttttcagcagacaaaaataagtcactcttacgcatgtaaaaatattctttcactcataataaaagaaatgcaacttaaaaccatactgagatcctttttaaaactgtcagattggcaaagatcaaaaagcttgttaagactcctagctggcaagcatgtgggaaataggtactctcataacagctgacagaagtacatattgaagaggacaatatggcaatgtccttcaaaattataaaagcactaactctttgatccagtagtttccacttctaggaacttaaccttcagatatattttcaccagatataaaatgacatacgtaagaagttattactgcatcatttgtaatagctaaagattagaaacaattaattgctatggaacccttaaaaaaggtggctctaaattccttaagaaagatatccaaaacaaattaaggggaaaagggagggttgcataacagcatgtaacataacactatttgtctaaagaatggggaaagagaagcggttgtctgttcacctcatccttgccactccgccttatacctcaccatcggagaacttaccatcccccaaatatatcctgctggcactacaccttcgtaactgctgttcccactgcccccacaacactccaatctccaccttcctgccaaccttgagatattgtatgcatatatacatatttcctttgtttaaaatacaaatagcatactatgcatgctgttctgcactttgctttttttttatacttgcaattagagctgcctcatttcattttacagctgtatactattccattgaatggataaaccataatttatttaatcagtccctcactgacagacgtttccattgtttcctgtcttttgctataaataatgctgtaatgaatattcttgtgcatatttcacattaatttatgggattacatctgcaggataaattcttagaaccaatggtggtttgtggggagggtgacagggtggataggtacaggattgggagacttttcactgtatctccttttgtatttttttgaattttgtaccatatgtatcacctattcaaaaaaaataaaatatttttaaatacagttgctggccaaa

SEQ ID NO: 15719 - DNA, 4443 bp, Homo sapiens
  source 1..4443: mol_type = unassigned DNA
cttgctccggcctcctcgctcctgcctgagttcggggcctggtctgggcttcgtcctggggctgggaagtttctgcgctccccgctgtccagtctgcatctccgcgcctcccgccgggcccccgcggtcccctcccgcccgcttcccccgctgccctccctcgctgccccctaccctctcccggggctcccggccctctactcccttcgggcgcgggcccctcgccccgcccgggcgcgccccccctcccccgggtcctgcggccccggatgcccgggccccgaggggctgctggcggcctggcccctgagatgcgcggggcgggggcggcggggctgctggcgctgctgctgctgctgctgctgctgctgctgggcctgggcggcagggtcgagggggggccggccggcgagcggggcgcaggcgggggcggggcgctggcccgcgagcgcttcaaggtggtctttgcgccggtgatctgcaagcggacctgtctcaagggccagtgtcgggacagttgtcagcagggctccaacatgacgctcatcggagagaacggccacagcacagacacgctcacgggctccggcttccgcgtggtggtgtgccctctcccctgcatgaatggcggccagtgctcctcgcgaaaccagtgcctgtgtcccccggacttcactgggcgcttctgccaggtgcccgcaggaggagccggtgggggtaccggcggctcaggccccggcctgagcaggacaggggccctgtccacaggggcgctgccgcccctggctccggagggcgactctgtggccagcaagcacgccatctacgccgtccaggtgatcgctgaccctcctgggcccggggaggggcctcctgcccagcacgcagccttcctggtgcccctaggcccgggacagatctcagcagaagtgcaggccccgccccccgtggtgaatgtgcgcgtccatcacccgcccgaggcctcagtccaggtgcaccgcattgagagctcgaacgccgagagcgcagccccctcccagcacctgctgccgcaccccaagccctcgcacccccggccgcccacccagaagcccctgggccgctgctttcaggacactctgcccaagcagccgtgtggcagcaaccccctccccggcctcaccaagcaggaagactgctgcggtagcatcggcactgcctggggccagagcaagtgccacaagtgtccccagctgcagtacacaggagtgcagaagccagggcctgtacgtggggaagtgggcgctgactgtccccagggctacaagaggcttaacagcacccactgccaggacatcaacgagtgcgcaatgccgggcgtgtgtcgccatggtgactgcctcaacaaccctggctcctatcgctgtgtctgcccacctggccatagtttaggcccctcccgtacacagtgcattgcagacaaaccggaggagaagagcctgtgtttccgcctggtgagccctgagcaccagtgccagcacccactgaccacccgcctgacccgccagctctgctgctgcagtgtcggcaaggcctggggcgcgcggtgtcagcgctgcccaacagatggcaccgctgcgttcaaggagatctgcccagctgggaagggataccacattctcacctcccaccagacgctcaccattcagggcgagagtgacttttcccttttcctgcaccctgacgggccacccaagccccagcagcttccggagagccctagccaggctccaccacctgaggacacagaggaagagagaggggtgaccacggactcaccggtgagtgaggagaggtcagtgcagcagagccacccaactgccaccacgactcctgcccggccctaccccgagctgatctcccgtccctcgcccccgaccatgcgctggttcctgccggacttgcctccttcccgcagcgccgtagagatcgctcccactcaggtcacagagactgatgagtgccgactgaaccagaacatctgtggccacggagagtgcgtgccgggcccccctgactactcctgccactgcaaccccggctaccggtcacatccccagcaccgctactgcgtggatgtgaacgagtgcgaggcagagccctgtggcccggggaggggcatctgcatgaacaccggcggctcctacaattgccactgcaaccgcggctaccgcctgcacgtgggcgccggggggcgctcgtgcgtggacctgaacgaatgcgccaagccccacctgtgcggcgacggcggcttctgcatcaactttcccggtcactacaagtgcaactgctaccccggctaccggctcaaagcctcccggcctcctgtgtgcgaagacatcgacgagtgccgggacccaagctcttgcccggatggcaaatgcgagaacaagcccgggagcttcaagtgcatcgcctgtcagcctggctaccgcagccaggggggcggggcctgtcgcgacgtgaacgagtgcgccgagggcagcccctgctcgcctggctggtgcgagaacctcccgggctccttccgctgcacctgtgcccagggctacgcgcccgcgcccgacggccgcagttgcttggatgtggacgagtgtgaggctggggacgtgtgtgacaatggcatctgcagcaacacgccaggatctttccagtgtcagtgcctctctggctaccatctgtccagggaccggagccactgcgaggacattgatgagtgtgacttccctgcagcctgcattgggggtgactgcatcaataccaatggctcctacagatgtctttgcccccaggggcatcggctggtgggtggcaggaaatgccaagacatagatgagtgcagccaggacccgagcctgtgccttccccatggggcctgcaagaaccttcagggctcctatgtgtgtgtctgcgatgagggcttcactcccacccaggaccagcacggttgtgaggaggtggagcagccccaccacaagaaggagtgctacctgaacttcgatgacacagtgttctgcgacagcgtattggccaccaacgtgacccagcaggagtgctgctgctctctgggggccggctggggcgaccactgcgaaatctacccctgcccagtctacagctcagccgagttccacagcctctgcccagacggaaagggctacacccaggacaacaacatcgtcaactacggcatcccagcccaccgtgacatcgacgagtgcatgttgttcgggtcggagatttgcaaggagggcaagtgcgtgaacacgcagcctggctacgagtgctactgcaagcagggcttctactacgacgggaacctgctggaatgcgtggacgtggacgagtgcctggacgagtccaactgccggaacggagtgtgtgagaacacgcgcggcggctaccgctgtgcctgcacgccccctgccgagtacagtcccgcgcagcgccagtgcctgagcccggaagagatggacgtggacgagtgccaggacccggcagcctgccgccctggccgctgcgtcaacctgccgggctcctaccgctgcgagtgtcgcccgccctgggtgcccgggccctccggccgcgattgccagctccccgagagcccggccgagcgtgccccggagcggcgcgacgtgtgctggagccagcgcggagaggacggcatgtgcgctggccccctggccgggcctgccctcaccttcgacgactgctgctgccgccagggccgcggctggggcgcccaatgccgaccgtgcccgccgcgcggcgcggggtcccattgcccgacatcgcagagcgagagcaattccttctgggacacaagccccctgctgttggggaagcccccaagagatgaggacagttcagaggaggattcagacgagtgtcgctgcgtgagtggccgctgcgtgccgcggccgggcggcgccgtgtgcgagtgtcccggcggcttccagctcgacgcctcccgcgcccgctgcgtggatatcgacgagtgccgagagctgaaccagcgcgggctgctgtgcaagagcgagcgctgcgtgaacaccagcggctccttccgctgcgtctgcaaagccggcttcgcgcgcagccgcccgcacggggcctgcgttccccagcgccgccgctgacgccgccgacgccgccctcggcccagacctcggtgatcactgagggatttccgcgagctcggcctcacttctgccccgacttgtggctcggacccagggaccttcagggcccgcagaccctcccggcgccttgagacccgaggcgcccctaccggcccccctccccggttagcgggcggttgtaaggtctccggcgggcgctgcctgccttcctcccagagggtgtttcctagaaactgataaatcagatcgtgcctcttta

SEQ ID NO: 15720 - DNA, 3730 bp, Homo sapiens
  source 1..3730: mol_type = unassigned DNA
cccgcccgaggcctcagtccaggtgcaccgcattgagagctcgaacgccgagagcgcagccccctcccagcacctgctgccgcaccccaagccctcgcacccccggccgcccacccagaagcccctgggccgctgctttcaggacactctgcccaagcagccgtgtggcagcaaccccctccccggcctcaccaagcaggaagactgctgcggtagcatcggcactgcctggggccagagcaagtgccacaagtgtccccagctgcagtacacaggagtgcagaagccagggcctgtacgtggggaagtgggcgctgactgtccccagggctacaagaggcttaacagcacccactgccaggacatcaacgagtgcgcaatgccgggcgtgtgtcgccatggtgactgcctcaacaaccctggctcctatcgctgtgtctgcccacctggccatagtttaggcccctcccgtacacagtgcattgcagacaaaccggaggagaagagcctgtgtttccgcctggtgagccctgagcaccagtgccagcacccactgaccacccgcctgacccgccagctctgctgctgcagtgtcggcaaggcctggggcgcgcggtgtcagcgctgcccaacagatggcaccgctgcgttcaaggagatctgcccagctgggaagggataccacattctcacctcccaccagacgctcaccattcagggcgagagtgacttttcccttttcctgcaccctgacgggccacccaagccccagcagcttccggagagccctagccaggctccaccacctgaggacacagaggaagagagaggggtgaccacggactcaccggtgagtgaggagaggtcagtgcagcagagccacccaactgccaccacgactcctgcccggccctaccccgagctgatctcccgtccctcgcccccgaccatgcgctggttcctgccggacttgcctccttcccgcagcgccgtagagatcgctcccactcaggtcacagagactgatgagtgccgactgaaccagaacatctgtggccacggagagtgcgtgccgggcccccctgactactcctgccactgcaaccccggctaccggtcacatccccagcaccgctactgcgtggatgtgaacgagtgcgaggcagagccctgtggcccggggaggggcatctgcatgaacaccggcggctcctacaattgccactgcaaccgcggctaccgcctgcacgtgggcgccggggggcgctcgtgcgtggacctgaacgaatgcgccaagccccacctgtgcggcgacggcggcttctgcatcaactttcccggtcactacaagtgcaactgctaccccggctaccggctcaaagcctcccggcctcctgtgtgcgaagacatcgacgagtgccgggacccaagctcttgcccggatggcaaatgcgagaacaagcccgggagcttcaagtgcatcgcctgtcagcctggctaccgcagccaggggggcggggcctgtcgcgacgtgaacgagtgcgccgagggcagcccctgctcgcctggctggtgcgagaacctcccgggctccttccgctgcacctgtgcccagggctacgcgcccgcgcccgacggccgcagttgcttggatgtggacgagtgtgaggctggggacgtgtgtgacaatggcatctgcagcaacacgccaggatctttccagtgtcagtgcctctctggctaccatctgtccagggaccggagccactgcgaggacattgatgagtgtgacttccctgcagcctgcattgggggtgactgcatcaataccaatggctcctacagatgtctttgcccccaggggcatcggctggtgggtggcaggaaatgccaagacatagatgagtgcagccaggacccgagcctgtgccttccccatggggcctgcaagaaccttcagggctcctatgtgtgtgtctgcgatgagggcttcactcccacccaggaccagcacggttgtgaggaggtggagcagccccaccacaagaaggagtgctacctgaacttcgatgacacagtgttctgcgacagcgtattggccaccaacgtgacccagcaggagtgctgctgctctctgggggccggctggggcgaccactgcgaaatctacccctgcccagtctacagctcagccgagttccacagcctctgcccagacggaaagggctacacccaggacaacaacatcgtcaactacggcatcccagcccaccgtgacatcgacgagtgcatgttgttcgggtcggagatttgcaaggagggcaagtgcgtgaacacgcagcctggctacgagtgctactgcaagcagggcttctactacgacgggaacctgctggaatgcgtggacgtggacgagtgcctggacgagtccaactgccggaacggagtgtgtgagaacacgcgcggcggctaccgctgtgcctgcacgccccctgccgagtacagtcccgcgcagcgccagtgcctgagcccggaagagatggacgtggacgagtgccaggacccggcagcctgccgccctggccgctgcgtcaacctgccgggctcctaccgctgcgagtgtcgcccgccctgggtgcccgggccctccggccgcgattgccagctccccgagagcccggccgagcgtgccccggagcggcgcgacgtgtgctggagccagcgcggagaggacggcatgtgcgctggccccctggccgggcctgccctcaccttcgacgactgctgctgccgccagggccgcggctggggcgcccaatgccgaccgtgcccgccgcgcggcgcggggtcccattgcccgacatcgcagagcgagagcaattccttctgggacacaagccccctgctgttggggaagcccccaagagatgaggacagttcagaggaggattcagacgagtgtcgctgcgtgagtgccgctgcgtgccgcggccgggcggcgccgtgtgcgagtgtcccggcggcttccagctcgacgcctcccgcgcccgctgcgtggatatcgacgagtgccgagagctgaaccagcgcgggctgctgtgcaagagcgagcgctgcgtgaacaccagcggctccttccgctgcgtctgcaaagccggcttcgcgcgcagccgcccgcacggggcctgcgttccccagcgccgccgctgacgccgccgacgccgccctcggcccagacctcggtgatcactgagggatttccgcgagctcggcctcacttctgccccgacttgtggctcggacccagggaccttcagggcccgcagaccctcccggcgccttgagacccgaggcgcccctaccggcccccctccccggttagcgggcggttgtaaggtctccggcgggcgctgcctgccttcctcccagagggtgtttcctagaaactgataaatcagatcgtgcctctttacccttggctttcgaagcaaattgatgttcacgtctgacgtgggcgcgggctgcgcagggcggcgccagaccccagccgcctcccaggggctagactgagcccggcacaaggggtgtgaaatagaatttattgtggctctgattatgtacacgtgagatggcctggctgggccggccgggctcacatggtttgtacaataaatacatctgtggggcgggctctccgcagccgggaagggccaccgccacggttcagtcc

SEQ ID NO: 15721 - DNA, 4046 bp, Homo sapiens
  source 1..4046: mol_type = unassigned DNA
atgcccgggccccgaggggctgctggcggcctggcccctgagatgcgcggggcgggggcggcggggctgctggcgctgctgctgctgctgctgctgctgctgctgggcctgggcggcagggtcgagggggggccggccggcgagcggggcgcaggcgggggcggggcgctggcccgcgagcgcttcaaggtggtctttgcgccggtgatctgcaagcggacctgtctcaagggccagtgtcgggacagttgtcagcagggctccaacatgacgctcatcggagagaacggccacagcacagacacgctcacgggctccggcttccgcgtggtggtgtgccctctcccctgcatgaatggcggccagtgctcctcgcgaaaccagtgcctgtgtcccccggacttcactgggcgcttctgccaggtgcccgcaggaggagccggtgggggtaccggcggctcaggccccggcctgagcaggacaggggccctgtccacaggggcgctgccgcccctggctccggagggcgactctgtggccagcaagcacgccatctacgccgtccaggtgatcgctgaccctcctgggcccggggaggggcctcctgcccagcacgcagccttcctggtgcccctaggcccgggacagatctcagcagaagtgcaggccccgccccccgtggtgaatgtgcgcgtccatcacccgcccgaggcctcagtccaggtgcaccgcattgagagctcgaacgccgagagcgcagccccctcccagcacctgctgccgcaccccaagccctcgcacccccggccgcccacccagaagcccctgggccgctgctttcaggacactctgcccaagcagccgtgtggcagcaaccccctccccggcctcaccaagcaggaagactgctgcggtagcatcggcactgcctggggccagagcaagtgccacaagtgtccccagctgcagtacacaggagtgcagaagccagggcctgtacgtggggaagtgggcgctgactgtccccagggctacaagaggcttaacagcacccactgccaggacatcaacgagtgcgcaatgccgggcgtgtgtcgccatggtgactgcctcaacaaccctggctcctatcgctgtgtctgcccacctggccatagtttaggcccctcccgtacacagtgcattgcagacaaaccggaggagaagagcctgtgtttccgcctggtgagccctgagcaccagtgccagcacccactgaccacccgcctgacccgccagctctgctgctgcagtgtcggcaaggcctggggcgcgcggtgtcagcgctgcccaacagatggcaccgctgcgttcaaggagatctgcccagctgggaagggataccacattctcacctcccaccagacgctcaccattcagggcgagagtgacttttcccttttcctgcaccctgacgggccacccaagccccagcagcttccggagagccctagccaggctccaccacctgaggacacagaggaagagagaggggtgaccacggactcaccggtgagtgaggagaggtcagtgcagcagagccacccaactgccaccacgactcctgcccggccctaccccgagctgatctcccgtccctcgcccccgaccatgcgctggttcctgccggacttgcctccttcccgcagcgccgtagagatcgctcccactcaggtcacagagactgatgagtgccgactgaaccagaacatctgtggccacggagagtgcgtgccgggcccccctgactactcctgccactgcaaccccggctaccggtcacatccccagcaccgctactgcgtggatgtgaacgagtgcgaggcagagccctgtggcccggggaggggcatctgcatgaacaccggcggctcctacaattgccactgcaaccgcggctaccgcctgcacgtgggcgccggggggcgctcgtgcgtggacctgaacgaatgcgccaagccccacctgtgcggcgacggcggcttctgcatcaactttcccggtcactacaagtgcaactgctaccccggctaccggctcaaagcctcccggcctcctgtgtgcgaagacatcgacgagtgccgggacccaagctcttgcccggatggcaaatgcgagaacaagcccgggagcttcaagtgcatcgcctgtcagcctggctaccgcagccaggggggcggggcctgtcgcgacgtgaacgagtgcgccgagggcagcccctgctcgcctggctggtgcgagaacctcccgggctccttccgctgcacctgtgcccagggctacgcgcccgcgcccgacggccgcagttgcttggatgtggacgagtgtgaggctggggacgtgtgtgacaatggcatctgcagcaacacgccaggatctttccagtgtcagtgcctctctggctaccatctgtccagggaccggagccactgcgaggacattgatgagtgtgacttccctgcagcctgcattgggggtgactgcatcaataccaatggctcctacagatgtctttgcccccaggggcatcggctggtgggtggcaggaaatgccaagacatagatgagtgcagccaggacccgagcctgtgccttccccatggggcctgcaagaaccttcagggctcctatgtgtgtgtctgcgatgagggcttcactcccacccaggaccagcacggttgtgaggaggtggagcagccccaccacaagaaggagtgctacctgaacttcgatgacacagtgttctgcgacagcgtattggccaccaacgtgacccagcaggagtgctgctgctctctgggggccggctggggcgaccactgcgaaatctacccctgcccagtctacagctcagccgagttccacagcctctgcccagacggaaagggctacacccaggacaacaacatcgtcaactacggcatcccagcccaccgtgacatcgacgagtgcatgttgttcgggtcggagatttgcaaggagggcaagtgcgtgaacacgcagcctggctacgagtgctactgcaagcagggcttctactacgacgggaacctgctggaatgcgtggacgtggacgagtgcctggacgagtccaactgccggaacggagtgtgtgagaacacgcgcggcggctaccgctgtgcctgcacgccccctgccgagtacagtcccgcgcagcgccagtgcctgagcccggaagagatggagcgtgccccggagcggcgcgacgtgtgctggagccagcgcggagaggacggcatgtgcgctggccccctggccgggcctgccctcaccttcgacgactgctgctgccgccagggccgcggctggggcgcccaatgccgaccgtgcccgccgcgcggcgcggggtcccattgcccgacatcgcagagcgagagcaattccttctgggacacaagccccctgctgttggggaagcccccaagagatgaggacagttcagaggaggattcagacgagtgtcgctgcgtgagtggccgctgcgtgccgcggccgggcggcgccgtgtgcgagtgtcccggcggcttccagctcgacgcctcccgcgcccgctgcgtggatatcgacgagtgccgagagctgaaccagcgcgggctgctgtgcaagagcgagcgctgcgtgaacaccagcggctccttccgctgcgtctgcaaagccggcttcgcgcgcagccgcccgcacggggcctgcgttccccagcgccgccgctgacgccgccgacgccgccctcggcccagacctcggtgatcactgagggatttccgcgagctcggcctcacttctgccccgacttgtggctcggacccagggaccttcagggcccgcagaccctcccggcgccttgagacccgaggcgcccctaccggcccccctccccggttagcgggcggttgtaaggtctccggcgggcgctgcctgccttcctcccagagggtgtttcctagaaactgataaatcagatcgtgcctctttacccttggctttcg

SEQ ID NO: 15722 - DNA, 2461 bp, Homo sapiens
  source 1..2461: mol_type = unassigned DNA
gtgaagggcctgggttgagtaggggactcaggagaacagtggcggtttggaagtatcccagggcatggggctgcctaggggctttatggaagtcaaagctttagaggagtcagagagggaggtgccagccacacgaggctctgttggactgaggctgaagcctgtgggtatgttccagcatgctcagcttggtggctgctccagtcccactccgcacccaggatccacaggccacagctctgaccagagactgggcattgccagacagtgaggaggaaggagaggtgtttatggatcagggacgggagtcctagggatgataagccctgggctccagctgggaactatcagagtctgggggtgtcaggcaagctcggaggactgagagggaggccaccaagccctgtgagagagaaggtggaggtgaggacttgagaacagtggaaagaaggcagcctctgagggccccagggtggagcagatctgagtgatgaaaatccccttgggaccctgagagtgaggggaaggtcacggaagccgagagatccaggaatgtgaggtcagaggctgacctggttgtccacgcggatgttcgaaactcccaggatggagagaaaaacagagcaggaggaatgaggaagatgtggacgagtgtgaggctggggacgtgtgtgacaatggcatctgcagcaacacgccaggatctttccagtgtcagtgcctctctggctaccatctgtccagggaccggagccactgcgaggacattgatgagtgtgacttccctgcagcctgcattgggggtgactgcatcaataccaatggctcctacagatgtctttgcccccaggggcatcggctggtgggtggcaggaaatgccaagacatagatgagtgcagccaggacccgagcctgtgccttccccatggggcctgcaagaaccttcagggctcctatgtgtgtgtctgcgatgagggcttcactcccacccaggaccagcacggttgtgaggaggtggagcagccccaccacaagaaggagtgctacctgaacttcgatgacacagtgttctgcgacagcgtattggccaccaacgtgacccagcaggagtgctgctgctctctgggggccggctggggcgaccactgcgaaatctacccctgcccagtctacagctcagccgagttccacagcctctgcccagacggaaagggctacacccaggacaacaacatcgtcaactacggcatcccagcccaccgtgacatcgacgagtgcatgttgttcgggtcggagatttgcaaggagggcaagtgcgtgaacacgcagcctggctacgagtgctactgcaagcagggcttctactacgacgggaacctgctggaatgcgtggacgtggacgagtgcctggacgagtccaactgccggaacggagtgtgtgagaacacgcgcggcggctaccgctgtgcctgcacgccccctgccgagtacagtcccgcgcagcgccagtgcctgagcccggaagagatggacgtggacgagtgccaggacccggcagcctgccgccctggccgctgcgtcaacctgccgggctcctaccgctgcgagtgtcgcccgccctgggtgcccgggccctccggccgcgattgccagctccccgagagcccggccgagcgtgccccggagcggcgcgacgtgtgctggagccagcgcggagaggacggcatgtgcgctggccccctggccgggcctgccctcaccttcgacgactgctgctgccgccagggccgcggctggggcgcccaatgccgaccgtgcccgccgcgcggcgcggggtcccattgcccgacatcgcagagcgagagcaattccttctgggacacaagccccctgctgttggggaagcccccaagagatgaggacagttcagaggaggattcagacgagtgtcgctgcgtgagtggccgctgcgtgccgcggccgggcggcgccgtgtgcgagtgtcccggcggcttccagctcgacgcctcccgcgcccgctgcgtggatatcgacgagtgccgagagctgaaccagcgcgggctgctgtgcaagagcgagcgctgcgtgaacaccagcggctccttccgctgcgtctgcaaagccggcttcgcgcgcagccgcccgcacggggcctgcgttccccagcgccgccgctgacgccgccgacgccgccctcggcccagacctcggtgatcactgagggatttccgcgagctcggcctcacttctgccccgacttgtggctcggacccagggaccttcagggcccgcagaccctcccggcgccttgagacccgaggcgcccctaccggcccccctccccggttagcgggcggttgtaaggtctccggcgggcgctgcctgccttcctcccagagggtgtttcctagaaactgataaatcagatcgtgcctcttt

SEQ ID NO: 15723 - DNA, 3756 bp, Homo sapiens
  source 1..3756: mol_type = unassigned DNA
ttctttctgctcctcttctggaccccacagacttcctcctgggacctccgtgagccctggccaaaggctgtccccaccctttagccctttcctcagaggggattggaccagcactaacgagaagttactttggggccctgagacccccacgtttgcaagggaggctgggaaagagctggaaggcctgggctccggctccacccggcctccatcgtcagtgtgacccggcagggccacctctctccctcagcctcggtatctcgctctacgcaggcctccccgccccgccccgcccggaggaatccgcggccggccagacggtcccagttgtcagcagggctccaacatgacgctcatcggagagaacggccacagcacagacacgctcacgggctccggcttccgcgtggtggtgtgccctctcccctgcatgaatggcggccagtgctcctcgcgaaaccagtgcctgtgtcccccggacttcactgggcgcttctgccaggtgcccgcaggaggagccggtgggggtaccggcggctcaggccccggcctgagcaggacaggggccctgtccacaggggcgctgccgcccctggctccggagggcgactctgtggccagcaagcacgccatctacgccgtccaggtgatcgctgaccctcctgggcccggggaggggcctcctgcccagcacgcagccttcctggtgcccctaggcccgggacagatctcagcagaagtgcaggccccgccccccgtggtgaatgtgcgcgtccatcacccgcccgaggcctcagtccaggtgcaccgcattgagagctcgaacgccgagagcgcagccccctcccagcacctgctgccgcaccccaagccctcgcacccccggccgcccacccagaagcccctgggccgctgctttcaggacactctgcccaagcagccgtgtggcagcaaccccctccccggcctcaccaagcaggaagactgctgcggtagcatcggcactgcctggggccagagcaagtgccacaagtgtccccagctgcagtacacaggagtgcagaagccagggcctgtacgtggggaagtgggcgctgactgtccccagggctacaagaggcttaacagcacccactgccaggacatcaacgagtgcgcaatgccgggcgtgtgtcgccatggtgactgcctcaacaaccctggctcctatcgctgtgtctgcccacctggccatagtttaggcccctcccgtacacagtgcattgcagacaaaccggaggagaagagcctgtgtttccgcctggtgagccctgagcaccagtgccagcacccactgaccacccgcctgacccgccagctctgctgctgcagtgtcggcaaggcctggggcgcgcggtgtcagcgctgcccaacagatggcaccgctgcgttcaaggagatctgcccagctgggaagggataccacattctcacctcccaccagacgctcaccattcagggcgagagtgacttttcccttttcctgcaccctgacgggccacccaagccccagcagcttccggagagccctagccaggctccaccacctgaggacacagaggaagagagaggggtgaccacggactcaccggtgagtgaggagaggtcagtgcagcagagccacccaactgccaccacgactcctgcccggccctaccccgagctgatctcccgtccctcgcccccgaccatgcgctggttcctgccggacttgcctccttcccgcagcgccgtagagatcgctcccactcaggtcacagagactgatgagtgccgactgaaccagaacatctgtggccacggagagtgcgtgccgggcccccctgactactcctgccactgcaaccccggctaccggtcacatccccagcaccgctactgcgtggatgtgaacgagtgcgaggcagagccctgtggcccggggaggggcatctgcatgaacaccggcggctcctacaattgccactgcaaccgcggctaccgcctgcacgtgggcgccggggggcgctcgtgcgtggacctgaacgaatgcgccaagccccacctgtgcggcgacggcggcttctgcatcaactttcccggtcactacaagtgcaactgctaccccggctaccggctcaaagcctcccggcctcctgtgtgcgaagacatcgacgagtgccgggacccaagctcttgcccggatggcaaatgcgagaacaagcccgggagcttcaagtgcatcgcctgtcagcctggctaccgcagccaggggggcggggcctgtcgcgacgtgaacgagtgcgccgagggcagcccctgctcgcctggctggtgcgagaacctcccgggctccttccgctgcacctgtgcccagggctacgcgcccgcgcccgacggccgcagttgcttggatgtggacgagtgtgaggctggggacgtgtgtgacaatggcatctgcagcaacacgccaggatctttccagtgtcagtgcctctctggctaccatctgtccagggaccggagccactgcgaggacattgatgagtgtgacttccctgcagcctgcattgggggtgactgcatcaataccaatggctcctacagatgtctttgcccccaggggcatcggctggtgggtggcaggaaatgccaagacatagatgagtgcagccaggacccgagcctgtgccttccccatggggcctgcaagaaccttcagggctcctatgtgtgtgtctgcgatgagggcttcactcccacccaggaccagcacggttgtgaggaggtggagcagccccaccacaagaaggagtgctacctgaacttcgatgacacagtgttctgcgacagcgtattggccaccaacgtgacccagcaggagtgctgctgctctctgggggccggctggggcgaccactgcgaaatctacccctgcccagtctacagctcagccgagttccacagcctctgcccagacggaaagggctacacccaggacaacaacatcgtcaactacggcatcccagcccaccgtgacatcgacgagtgcatgttgttcgggtcggagatttgcaaggagggcaagtgcgtgaacacgcagcctggctacgagtgctactgcaagcagggcttctactacgacgggaacctgctggaatgcgtggacgtggacgagtgcctggacgagtccaactgccggaacggagtgtgtgagaacacgcgcggcggctaccgctgtgcctgcacgccccctgccgagtacagtcccgcgcagcgccagtgcctgagcccggaagagatggacgtggacgagtgccaggacccggcagcctgccgccctggccgctgcgtcaacctgccgggctcctaccgctgcgagtgtcgcccgccctgggtgcccgggccctccggccgcgattgccagctccccgagagcccggccgagcgtgccccggagcggcgcgacgtgtgctggagccagcgcggagaggacggcatgtgcgctggccccctggccgggcctgccctcaccttcgacgactgctgctgccgccagggccgcggctggggcgcccaatgccgaccgtgcccgccgcgcggcgcggggtcccattgcccgacatcgcagagcgagagcaattccttctgggacacaagccccctgctgttggggaagcccccaagagatgaggacagttcagaggaggattcagacgagtgtcgctgcgtgagtgg

SEQ ID NO: 15724 - DNA, 3327 bp, Homo sapiens
  source 1..3327: mol_type = unassigned DNA
gagctcctagggttagggctcaggtgggagatggctgttcttgggggctttgggaatgtggacaaggcccctcaaaggaggggctgttaaggaagcctaaggagaggtactccaggcaaagagaacagcctgcaaagcccactggccaggtgagtttggggcagagcagagttcactgttatggcccaggctgcatggcaggagtgagggggaaggggtgtgggaaatgaaactggtgagcagtgaggatccaaaggaggggagaggctggaggcagggagtcctgggcttggtgacaaagagagtgaggggggtggttcctggatctgactgcctgtgcacagctttggcactagttaggattcccaggaaaccagctcctgctagtcttgggagggggtaatcaacccttctggaatagggggtcgggtccctggggcaagggcttatggagtcactgggctagaggacactggtgtgaccgaggctatagagtttaaggtattgaggcgactggggagaaaggagttttagtcccttgggtgggagtactgggacgactgaggggccctgaggggatgtggtttggtttgaggtgagtggggtcagggtcttggagtgaaccgggaatggaagtatccgggcctgggtgtggggtgatacggctgtcaggggcctggagtcctagtttggagctttctggggtcttgatattggggttatctaaaagagagaaataggacatcctggagttggagtatgggcgtacaggaacctgaggtcatggtgtgactggggtgttgaggtctgccctggggatatggcagaaggtgagcgctccctgctctgccgcttgacctggccatgcccgcagagactgatgagtgccgactgaaccagaacatctgtggccacggagagtgcgtgccgggcccccctgactactcctgccactgcaaccccggctaccggtcacatccccagcaccgctactgcgtggatgtgaacgagtgcgaggcagagccctgtggcccggggaggggcatctgcatgaacaccggcggctcctacaattgccactgcaaccgcggctaccgcctgcacgtgggcgccggggggcgctcgtgcgtggacctgaacgaatgcgccaagccccacctgtgcggcgacggcggcttctgcatcaactttcccggtcactacaagtgcaactgctaccccggctaccggctcaaagcctcccggcctcctgtgtgcgaagacatcgacgagtgccgggacccaagctcttgcccggatggcaaatgcgagaacaagcccgggagcttcaagtgcatcgcctgtcagcctggctaccgcagccaggggggcggggcctgtcgcgacgtgaacgagtgcgccgagggcagcccctgctcgcctggctggtgcgagaacctcccgggctccttccgctgcacctgtgcccagggctacgcgcccgcgcccgacggccgcagttgcttggatgtggacgagtgtgaggctggggacgtgtgtgacaatggcatctgcagcaacacgccaggatctttccagtgtcagtgcctctctggctaccatctgtccagggaccggagccactgcgaggacattgatgagtgtgacttccctgcagcctgcattgggggtgactgcatcaataccaatggctcctacagatgtctttgcccccaggggcatcggctggtgggtggcaggaaatgccaagacatagatgagtgcagccaggacccgagcctgtgccttccccatggggcctgcaagaaccttcagggctcctatgtgtgtgtctgcgatgagggcttcactcccacccaggaccagcacggttgtgaggaggtggagcagccccaccacaagaaggagtgctacctgaacttcgatgacacagtgttctgcgacagcgtattggccaccaacgtgacccagcaggagtgctgctgctctctgggggccggctggggcgaccactgcgaaatctacccctgcccagtctacagctcagccgagttccacagcctctgcccagacggaaagggctacacccaggacaacaacatcgtcaactacggcatcccagcccaccgtgacatcgacgagtgcatgttgttcgggtcggagatttgcaaggagggcaagtgcgtgaacacgcagcctggctacgagtgctactgcaagcagggcttctactacgacgggaacctgctggaatgcgtggacgtggacgagtgcctggacgagtccaactgccggaacggagtgtgtgagaacacgcgcggcggctaccgctgtgcctgcacgccccctgccgagtacagtcccgcgcagcgccagtgcctgagcccggaagagatggacgtggacgagtgccaggacccggcagcctgccgccctggccgctgcgtcaacctgccgggctcctaccgctgcgagtgtcgcccgccctgggtgcccgggccctccggccgcgattgccagctccccgagagcccggccgagcgtgccccggagcggcgcgacgtgtgctggagccagcgcggagaggacggcatgtgcgctggccccctggccgggcctgccctcaccttcgacgactgctgctgccgccagggccgcggctggggcgcccaatgccgaccgtgcccgccgcgcggcgcggggtcccattgcccgacatcgcagagcgagagcaattccttctgggacacaagccccctgctgttggggaagcccccaagagatgaggacagttcagaggaggattcagacgagtgtcgctgcgtgagtggccgctgcgtgccgcggccgggcggcgccgtgtgcgagtgtcccggcggcttccagctcgacgcctcccgcgcccgctgcgtggatatcgacgagtgccgagagctgaaccagcgcgggctgctgtgcaagagcgagcgctgcgtgaacaccagcggctccttccgctgcgtctgcaaagccggcttcgcgcgcagccgcccgcacggggcctgcgttccccagcgccgccgctgacgccgccgacgccgccctcggcccagacctcggtgatcactgagggatttccgcgagctcggcctcacttctgccccgacttgtggctcggacccagggaccttcagggcccgcagaccctcccggcgccttgagacccgaggcgcccctaccggcccccctccccggttagcgggcggttgtaaggtctccggcgggcgctgcctgccttcctcccagagggtgtttcctagaaactgataaatcagatcgtgcctcttt

SEQ ID NO: 15725 - DNA, 2750 bp, Homo sapiens
  source 1..2750: mol_type = unassigned DNA
ctttgcgccggtgatctgcaagcggacctgtctcaagggccagtgtcgggacagttgtcagcagggctccaacatgacgctcatcggagagaacggccacagcacagacacgctcacgggctccggcttccgcgtggcagacaaaccggaggagaagagcctgtgtttccgcctggtgagccctgagcaccagtgccagcacccactgaccacccgcctgacccgccagctctgctgctgcagtgtcggcaaggcctggggcgcgcggtgtcagcgctgcccaacagatggcaccgctgcgttcaaggagatctgcccagctgggaagggataccacattctcacctcccaccagacgctcaccattcagggcgagagtgacttttcccttttcctgcaccctgacgggccacccaagccccagcagcttccggagagccctagccaggctccaccacctgaggacacagaggaagagagaggggtgaccacggactcaccggtgagtgaggagaggtcagtgcagcagagccacccaactgccaccacgactcctgcccggccctaccccgagctgatctcccgtccctcgcccccgaccatgcgctggttcctgccggacttgcctccttcccgcagcgccgtagagatcgctcccactcaggtcacagagactgatgagtgccgactgaaccagaacatctgtggccacggagagtgcgtgccgggcccccctgactactcctgccactgcaaccccggctaccggtcacatccccagcaccgctactgcgtggatgtgaacgagtgcgaggcagagccctgtggcccggggaggggcatctgcatgaacaccggcggctcctacaattgccactgcaaccgcggctaccgcctgcacgtgggcgccggggggcgctcgtgcgtggacctgaacgaatgcgccaagccccacctgtgcggcgacggcggcttctgcatcaactttcccggtcactacaagtgcaactgctaccccggctaccggctcaaagcctcccggcctcctgtgtgcgaagacatcgacgagtgccgggacccaagctcttgcccggatggcaaatgcgagaacaagcccgggagcttcaagtgcatcgcctgtcagcctggctaccgcagccaggggggcggggcctgtcgcgacgtgaacgagtgcgccgagggcagcccctgctcgcctggctggtgcgagaacctcccgggctccttccgctgcacctgtgcccagggctacgcgcccgcgcccgacggccgcagttgcttggatgtggacgagtgtgaggctggggacgtgtgtgacaatggcatctgcagcaacacgccaggatctttccagtgtcagtgcctctctggctaccatctgtccagggaccggagccactgcgaggacattgatgagtgtgacttccctgcagcctgcattgggggtgactgcatcaataccaatggctcctacagatgtctttgcccccaggggcatcggctggtgggtggcaggaaatgccaagacatagatgagtgcagccaggacccgagcctgtgccttccccatggggcctgcaagaaccttcagggctcctatgtgtgtgtctgcgatgagggcttcactcccacccaggaccagcacggttgtgaggaggtggagcagccccaccacaagaaggagtgctacctgaacttcgatgacacagtgttctgcgacagcgtattggccaccaacgtgacccagcaggagtgctgctgctctctgggggccggctggggcgaccactgcgaaatctacccctgcccagtctacagctcagccgagttccacagcctctgcccagacggaaagggctacacccaggacaacaacatcgtcaactacggcatcccagcccaccgtgacatcgacgagtgcatgttgttcgggtcggagatttgcaaggagggcaagtgcgtgaacacgcagcctggctacgagtgctactgcaagcagggcttctactacgacgggaacctgctggaatgcgtggacgtggacgagtgcctggacgagtccaactgccggaacggagtgtgtgagaacacgcgcggcggctaccgctgtgcctgcacgccccctgccgagtacagtcccgcgcagcgccagtgcctgagcccggaagagatggagcgtgccccggagcggcgcgacgtgtgctggagccagcgcggagaggacggcatgtgcgctggccccctggccgggcctgccctcaccttcgacgactgctgctgccgccagggccgcggctggggcgcccaatgccgaccgtgcccgccgcgcggcgcggggtcccattgcccgacatcgcagagcgagagcaattccttctgggacacaagccccctgctgttggggaagcccccaagagatgaggacagttcagaggaggattcagacgagtgtcgctgcgtgagtggccgctgcgtgccgcggccgggcggcgccgtgtgcgagtgtcccggcggcttccagctcgacgcctcccgcgcccgctgcgtggatatcgacgagtgccgagagctgaaccagcgcgggctgctgtgcaagagcgagcgctgcgtgaacaccagcggctccttccgctgcgtctgcaaagccggcttcgcgcgcagccgcccgcacggggcctgcgttccccagcgccgccgctgacgccgccgacgccgccctcggcccagac

SEQ ID NO: 15726 - DNA, 5031 bp, Homo sapiens
  source 1..5031: mol_type = unassigned DNA
atgggagacgtaaaagcgttgctgtttgtcgctgctgcccgggccagacgtctaggaggagccgctgcatccgagtccctggctgtctccgaagccttctgcagggtccgaagctgccagcccaaaaagtgtgcaggcccccagcggtgcctgaacccagtgcctgcagtgcccagtcccagccccagcgtgaggaagagacaggtgtccctcaactggcagccactgacgctccaggaggccagagctctactgaagcggcggcggccccgggggccagggggccggggactactgagaaggaggcccccacagcgtgcccccgctggcaaggccccggtcctgtgtcccttgatctgtcacaatggcggtgtgtgcgtgaagcctgaccgctgcctctgtcccccggacttcgctggcaagttctgccagttgcactcctcgggcgcccggcccccggccccggctgtaccaggcctcacccgctccgtgtacactatgccactggccaaccaccgcgacgacgagcacggcgtggcatctatggtgagcgtccacgtggagcacccgcaggaggcgtcggtggtggtgcaccaggtggagcgtgtgtctggcccttgggaggaggcggacgctgaggcggtggcgcgggcggaagcggcggcgcgggcggaggcggcagcgccctacacggtgttggcacagagcgcgccgcgggaggacggctactcagatgcctcgggcttcggttactgctttcgggagctgcgcggaggcgaatgcgcgtccccgctgcccgggctccggacgcaggaggtctgctgccgaggggccggcttggcctggggcgttcacgactgtcagctgtgctccgagcgcctggggaactccgaaagagtgagcgccccagatggaccttgtccaaccggctttgaaagagttaatgggtcctgcgaagatgtggatgagtgcgcgactggcgggcgctgccagcacggcgagtgtgcaaacacgcgcggcgggtacacgtgtgtgtgccccgacggctttctgctcgactcgtcccgcagcagctgcatctcccaacacgtgatctcagaggccaaagggccctgcttccgcgtgctccgcgacggcggctgttcgctgcccattctgcggaacatcactaaacagatctgctgctgcagccgcgtaggcaaggcctggggccggggctgccagctctgcccacccttcggctcagagggtttccgggagatctgcccggctggtcctggttaccactactcggcctccgacctccgctacaacaccagacccctgggccaggagccaccccgagtgtcactcagccagcctcgtaccctgccagccacctctcggccatctgcaggctttctgcccacccatcgcctggagccccggcctgaaccccggcccgatccccggcccggccctgagcttcccttgcccagcatccctgcctggactggtcctgagattcctgaatcaggtccctcctccggcatgtgtcagcgcaacccccaggtctgcggcccaggacgctgcatttcccggcccagcggctacacctgcgcttgcgactctggcttccggctcagcccccagggcacccgatgcattgatgtggacgaatgtcgccgcgtgcccccgccctgtgctcccgggcgctgcgagaactcaccaggcagcttccgctgcgtgtgcggcccgggcttccgagccggcccacgggctgcggaatgcctggatgtggacgagtgccaccgcgtgccgccgccgtgtgacctcgggcgctgcgagaacacgccaggcagcttcctgtgcgtgtgccccgccgggtaccaggctgcaccgcacggagccagctgccaggatgtggatgaatgcacccagagcccaggcctgtgtggccgaggggcctgcaagaacctgcctggctctttccgctgtgtttgcccggctggcttccggggctcggcgtgtgaagaggatgtggatgagtgtgcccaggagccgccgccctgtgggcccggccgctgtgacaacacggcaggctcctttcactgtgcctgccctgctggcttccgctcccgagggcccggggccccctgccaagatgtggatgagtgtgcccgaagccccccaccctgcacctacggccggtgtgagaacacagaaggcagcttccagtgtgtctgccccatgggcttccaacccaacactgctggctccgagtgcgaggatgtggatgagtgtgagaaccacctcgcatgccctgggcaggagtgtgtgaactcgcccggctccttccagtgcaggacctgtccttctggccaccacctgcaccgtggcagatgcactgatgtggacgaatgcagttcgggtgcccctccctgtggtccccacggccactgcactaacaccgaaggctccttccgctgcagctgcgcgccaggctaccgggcgccgtcgggtcggcccgggccctgcgcagacgtgaacgagtgcctggagggcgatttctgcttccctcacggcgagtgcctcaacactgacggctcctttgcctgtacttgtgcccctggctaccgacccggaccccgcggagcctcttgcctcgacgttgacgagtgcagcgaggaggacctttgccagagcggcatctgtaccaacaccgacggctccttcgagtgcatctgtcctccgggacaccgcgctggcccggacctcgcctcctgcctcgacgtggacgaatgtcgcgagcgaggcccagccctgtgcgggtcgcagcgctgtgagaactctcccggctcctaccgctgtgtccgggactgcgatcctgggtaccacgcgggccccgagggcacctgtgacgatgtggatgagtgccaagaatatggtcccgagatttgtggagcccagcgttgtgagaacacccctggctcctaccgctgcacaccagcctgtgaccctggctatcagcccacgccagggggcggatgccaggatgtggacgaatgccggaaccggtccttctgcggtgcccacgccgtgtgccagaacctgcccggctccttccagtgcctctgtgaccagtacgagggggcacgggatgggcgtcactgcgtggatgtgaacgagtgtgaaacactacagggtgtatgtggagctgccctgtgtgaaaatgtcgaaggctccttcctctgtgtctgccccaacagcccggaagagtttgaccccatgactggacgctgtgttcccccacgaacttctgctggcacgttcccaggctcgcagccccaggcacctgctagccccgttctgcccgccaggccacctccgccacccctgccccgccgacccagcacacctaggcagggccctgtggggagtgggcgccgggagtgctactttgacacagcggccccggatgcatgtgacaacatcctggctcggaatgtgacatggcaggagtgctgctgtactgtgggtgagggctggggcagcggctgccgcatccagcagtgcccgggcaccgagacagctgagtaccagtcattgtgccctcacggccggggctacctggcgcccagtggagacctgagcctccggagagacgtggacgaatgtcagctcttccgagaccaggtgtgcaagagtggcgtgtgtgtgaacacggccccgggctactcatgctattgcagcaacggctactactaccacacacagcggctggagtgcatcgacaatgacgagtgcgccgatgaggaaccggcctgtgagggcggccgctgtgtcaacactgtgggctcttatcactgtacctgcgagcccccactggtgctggatggctcgcagcgccgctgcgtctccaacgagagccagagcctcgatgacaatctgggagtgtgctggcaggaagtgggggctgacctcgtgtgcagccaccctcggctggaccgtcaggccacctacacagagtgctgctgcctgtatggagaggcctggggcatggactgcgccctctgccctgcgcaggactcagatgacttcgaggccctgtgcaatgtgctacgcccccccgcatatagccccccgcgaccaggtggctttggactcccctacgagtacggcccagacttaggtccaccttaccagggcctcccatatgggcctgagttgtacccaccacctgcgctaccctacgacccctacccaccgccacctgggcccttcgcccgccgggaggctccttatggggcaccccgcttcgacatgccagactttgaggacgatggtggcccctatggcgaatctgaggctcctgcgccacctggcccgggcacccgctggccctatcggtcccgggacacccgccgctccttcccagagcccgaggagcctcctgaaggtggaagctatgctggttccctggctgagccctacgaggagctggaggcggaggagtgcgggatcctggacggctgcaccaacggccgctgcgtgcgcgtccccgaaggcttcacctgccgttgcttcgacggctaccgcctggacatgacccgcatggcctgcgttgacatcaacgagtgtgatgaggccgaggctgcctccccgctgtgcgtcaacgcgcgttgcctcaacacggatggctccttccgctgcatctgccgcccgggattcgcacccacgcaccagccgcaccactgtgcgcccgcacggccccgggcctgagccctggcacccgctggccgcccacccgcgcccgccactcggggcccctgccgcgcatcctgcagcccgcttatgcgtatgtgcacggggccgcccgcctggacctggagaagggacctacggacgcctggaagctgcgacgccctgcactgctcccgcctccaccagcgcctcccactgatgtcgtggtcccgggcctggcccaggggcccctttacatgccctctcccttttataaaattttccattaaaaaccacctattttctatc

SEQ ID NO: 15727 - DNA, 2569 bp, Homo sapiens
  source 1..2569: mol_type = unassigned DNA
agaagagggcgaaaaggggaaaacgagtttttagccggggtattccagcaggatcagggggcagctggtgggagtctcgaggcagtgagggggggcggggcgtggagatgaaagggccgagtctgggtatttggaccgtgattgtaaagaagctgttctaaacccgtcggggggcggtgtttgcagggagggaagtagcgtgaggcaggttggggaaggcgtgagaggcctaggagagccgaggggcggtggaggggtgtggcctagaatgttaggcggagcgggaggtgggccgggccttcggacgccctgtcccgcagacgttgacgagtgcagcgaggaggacctttgccagagcggcatctgtaccaacaccgacggctccttcgagtgcatctgtcctccgggacaccgcgctggcccggacctcgcctcctgcctcgacgtggacgaatgtcgcgagcgaggcccagccctgtgcgggtcgcagcgctgtgagaactctcccggctcctaccgctgtgtccgggactgcgatcctgggtaccacgcgggccccgagggcacctgtgacgatgtggacgaatgccggaaccggtccttctgcggtgcccacgccgtgtgccagaacctgcccggctccttccagtgcctctgtgaccagtacgagggggcacgggatgggcgtcactgcgtggatgtgaacgagtgtgaaacactacagggtgtatgtggagctgccctgtgtgaaaatgtcgaaggctccttcctctgtgtctgccccaacagcccggaagagtttgaccccatgactggacgctgtgttcccccacgaacttctgctggcacgttcccaggctcgcagccccaggcacctgctagccccgttctgcccgccaggccacctccgccacccctgccccgccgacccagcacacctaggcagggccctgtggggagtgggcgccgggagtgctactttgacacagcggccccggatgcatgtgacaacatcctggctcggaatgtgacatggcaggagtgctgctgtactgtgggtgagggctggggcagcggctgccgcatccagcagtgcccgggcaccgagacagctgagtaccagtcattgtgccctcacggccggggctacctggcgcccagtggagacctgagcctccggagagacgtggacgaatgtcagctcttccgagaccaggtgtgcaagagtggcgtgtgtgtgaacacggccccgggctactcatgctattgcagcaacggctactactaccacacacagcggctggagtgcatcgacaatgacgagtgcgccgatgaggaaccggcctgtgagggcggccgctgtgtcaacactgtgggctcttatcactgtacctgcgagcccccactggtgctggatggctcgcagcgccgctgcgtctccaacgagagccagagcctcgatgacaatctgggagtgtgctggcaggaagtgggggctgacctcgtgtgcagccaccctcggctggaccgtcaggccacctacacagagtgctgctgcctgtatggagaggcctggggcatggactgcgccctctgccctgcgcaggactcagatgacttcgaggccctgtgcaatgtgctacgcccccccgcatatagccccccgcgaccaggtggctttggactcccctacgagtacggcccagacttaggtccaccttaccagggcctcccatatgggcctgagttgtacccaccacctgcgctaccctacgacccctacccaccgccacctgggcccttcgcccgccgggaggctccttatggggcaccccgcttcgacatgccagactttgaggacgatggtggcccctatggcgaatctgaggctcctgcgccacctggcccgggcacccgctggccctatcggtcccgggacacccgccgctccttcccagagcccgaggagcctcctgaaggtggaagctatgctggttccctggctgagccctacgaggagctggaggcggaggagtgcgggatcctggacggctgcaccaacggccgctgcgtgcgcgtccccgaaggcttcacctgccgttgcttcgacggctaccgcctggacatgacccgcatggcctgcgttgacatcaacgagtgtgatgaggccgaggctgcctccccgctgtgcgtcaacgcgcgttgcctcaacacggatggctccttccgctgcatctgccgcccgggattcgcacccacgcaccagccgcaccactgtgcgcccgcacggccccgggcctgagccctggcacccgctggccgcccacccgcgcccgccactcggggcccctgccgcgcatcctgcagcccgcttatgcgtatgtgcacggggccgcccgcctggacctggagaagggacctacggacgcctggaagctgcgacgccctgcactgctcccgcctccaccagcgcctcccactgatgtcgtggtcccgggcctggcccaggggcccctttacatgccctctcccttttataaaattttccattaaaaaccacctattttct

SEQ ID NO: 15728 - DNA, 5142 bp, Homo sapiens
  source 1..5142: mol_type = unassigned DNA
atgccgaggcctggcaccagcggccgccgccccctcctgctggtgctgttgctgccgctcttcgcagccgccacctccgccgccagccccagccccagccccagccaggtcgtcgaggtcccgggggtccccagccgcccggccagcgttgctgtttgtcgctgctgcccgggccagacgtctaggaggagccgctgcatccgagccttctgcagggtccgaagctgccagcccaaaaagtgtgcaggcccccagcggtgcctgaacccagtgcctgcagtgcccagtcccagccccagcgtgaggaagagacaggtgtccctcaactggcagccactgacgctccaggaggccagagctctactgaagcggcggcggccccgggggccagggggccggggactactgagaaggaggcccccacagcgtgcccccgctggcaaggccccggtcctgtgtcccttgatctgtcacaatggcggtgtgtgcgtgaagcctgaccgctgcctctgtcccccggacttcgctggcaagttctgccagttgcactcctcgggcgcccggcccccggccccggctgtaccaggcctcacccgctccgtgtacactatgccactggccaaccaccgcgacgacgagcacggcgtggcatctatggtgagcgtccacgtggagcacccgcaggaggcgtcggtggtggtgcaccaggtggagcgtgtgtctggcccttgggaggaggcggacgctgaggcggtggcgcgggcggaagcggcggcgcgggcggaggcggcagcgccctacacggtgttggcacagagcgcgccgcgggaggacggctactcagatgcctcgggcttcggttactgctttcgggagctgcgcggaggcgaatgcgcgtccccgctgcccgggctccggacgcaggaggtctgctgccgaggggccggcttggcctggggcgttcacgactgtcagctgtgctccgagcgcctggggaactccgaaagagtgagcgccccagatggaccttgtccaaccggctttgaaagagttaatgggtcctgcgaagatgtggatgagtgcgcgactggcgggcgctgccagcacggcgagtgtgcaaacacgcgcggcgggtacacgtgtgtgtgccccgacggctttctgctcgactcgtcccgcagcagctgcatctcccaacacgtgatctcagaggccaaagggccctgcttccgcgtgctccgcgacggcggctgttcgctgcccattctgcggaacatcactaaacagatctgctgctgcagccgcgtaggcaaggcctggggccggggctgccagctctgcccacccttcggctcagagggtttccgggagatctgcccggctggtcctggttaccactactcggcctccgacctccgctacaacaccagacccctgggccaggagccaccccgagtgtcactcagccagcctcgtaccctgccagccacctctcggccatctgcaggctttctgcccacccatcgcctggagccccggcctgaaccccggcccgatccccggcccggccctgagcttcccttgcccagcatccctgcctggactggtcctgagattcctgaatcaggtccctcctccggcatgtgtcagcgcaacccccaggtctgcggcccaggacgctgcatttcccggcccagcggctacacctgcgcttgcgactctggcttccggctcagcccccagggcacccgatgcattgatgtggacgaatgtcgccgcgtgcccccgccctgtgctcccgggcgctgcgagaactcaccaggcagcttccgctgcgtgtgcggcccgggcttccgagccggcccacgggctgcggaatgcctggatgtggacgagtgccaccgcgtgccgccgccgtgtgacctcgggcgctgcgagaacacgccaggcagcttcctgtgcgtgtgccccgccgggtaccaggctgcaccgcacggagccagctgccaggatgtggatgaatgcacccagagcccaggcctgtgtggccgaggggcctgcaagaacctgcctggctctttccgctgtgtttgcccggctggcttccggggctcggcgtgtgaagaggatgtggatgagtgtgcccaggagccgccgccctgtgggcccggccgctgtgacaacacggcaggctcctttcactgtgcctgccctgctggcttccgctcccgagggcccggggccccctgccaagatgtggatgagtgtgcccgaagccccccaccctgcacctacggccggtgtgagaacacagaaggcagcttccagtgtgtctgccccatgggcttccaacccaacactgctggctccgagtgcgaggatgtggatgagtgtgagaaccacctcgcatgccctgggcaggagtgtgtgaactcgcccggctccttccagtgcaggacctgtccttctggccaccacctgcaccgtggcagatgcactgatgtggacgaatgcagttcgggtgcccctccctgtggtccccacggccactgcactaacaccgaaggctccttccgctgcagctgcgcgccaggctaccgggcgccgtcgggtcggcccgggccctgcgcagacgtgaacgagtgcctggagggcgatttctgcttccctcacggcgagtgcctcaacactgacggctcctttgcctgtacttgtgcccctggctaccgacccggaccccgcggagcctcttgcctcgacgttgacgagtgcagcgaggaggacctttgccagagcggcatctgtaccaacaccgacggctccttcgagtgcatctgtcctccgggacaccgcgctggcccggacctcgcctcctgcctcgacgtggacgaatgtcgcgagcgaggcccagccctgtgcgggtcgcagcgctgtgagaactctcccggctcctaccgctgtgtccgggactgcgatcctgggtaccacgcgggccccgagggcacctgtgacgatgtggatgagtgccaagaatatggtcccgagatttgtggagcccagcgttgtgagaacacccctggctcctaccgctgcacaccagcctgtgaccctggctatcagcccacgccagggggcggatgccaggatgtggacgaatgccggaaccggtccttctgcggtgcccacgccgtgtgccagaacctgcccggctccttccagtgcctctgtgaccagtacgagggggcacgggatgggcgtcactgcgtggatgtgaacgagtgtgaaacactacagggtgtatgtggagctgccctgtgtgaaaatgtcgaaggctccttcctctgtgtctgccccaacagcccggaagagtttgaccccatgactggacgctgtgttcccccacgaacttctgctggcacgttcccaggctcgcagccccaggcacctgctagccccgttctgcccgccaggccacctccgccacccctgccccgccgacccagcacacctaggcagggccctgtggggagtgggcgccgggagtgctactttgacacagcggccccggatgcatgtgacaacatcctggctcggaatgtgacatggcaggagtgctgctgtactgtgggtgagggctggggcagcggctgccgcatccagcagtgcccgggcaccgagacagctgagtaccagtcattgtgccctcacggccggggctacctggcgcccagtggagacctgagcctccggagagacgtggacgaatgtcagctcttccgagaccaggtgtgcaagagtggcgtgtgtgtgaacacggccccgggctactcatgctattgcagcaacggctactactaccacacacagcggctggagtgcatcgacaatgacgagtgcgccgatgaggaaccggcctgtgagggcggccgctgtgtcaacactgtgggctcttatcactgtacctgcgagcccccactggtgctggatggctcgcagcgccgctgcgtctccaacgagagccagagcctcgatgacaatctgggagtgtgctggcaggaagtgggggctgacctcgtgtgcagccaccctcggctggaccgtcaggccacctacacagagtgctgctgcctgtatggagaggcctggggcatggactgcgccctctgccctgcgcaggactcagatgacttcgaggccctgtgcaatgtgctacgcccccccgcatatagccccccgcgaccaggtggctttggactcccctacgagtacggcccagacttaggtccaccttaccagggcctcccatatgggcctgagttgtacccaccacctgcgctaccctacgacccctacccaccgccacctgggcccttcgcccgccgggaggctccttatggggcaccccgcttcgacatgccagactttgaggacgatggtggcccctatggcgaatctgaggctcctgcgccacctggcccgggcacccgctggccctatcggtcccgggacacccgccgctccttcccagagcccgaggagcctcctgaaggtggaagctatgctggttccctggctgagccctacgaggagctggaggcggaggagtgcgggatcctggacggctgcaccaacggccgctgcgtgcgcgtccccgaaggcttcacctgccgttgcttcgacggctaccgcctggacatgacccgcatggcctgcgttgacatcaacgagtgtgatgaggccgaggctgcctccccgctgtgcgtcaacgcgcgttgcctcaacacggatggctccttccgctgcatctgccgcccgggattcgcacccacgcaccagccgcaccactgtgcgcccgcacggccccgggcctgagccctggcacccgctggccgcccacccgcgcccgccactcggggcccctgccgcgcatcctgcagcccgcttatgcgtatgtgcacggggccgcccgcctggacctggagaagggacctacggacgcctggaagctgcgacgccctgcactgctcccgcctccaccagcgcctcccactgatgtcgtggtcccgggcctggcccaggggcccctttacatgccctctcccttttataaaattttccattaaaaaccacctattttctatc

SEQ ID NO: 15729 - DNA, 1700 bp, Homo sapiens
  source 1..1700: mol_type = unassigned DNA
gtctttcctcctccgcttctcccctccccttacctctttcccccgcctcctctcctagcctccccaactctcctctaccccaatcttctcctgccctctcctctgcttccccggcctcccccttctgactctcctctcccctctttgtatcccccatcttgcctccctgcttcccacatccgaccacccgacctctctcctcagacgtggacgaatgtcgcgagcgaggcccagccctgtgcgggtcgcagcgctgtgagaactctcccggctcctaccgctgtgtccgggactgcgatcctgggtaccacgcgggccccgagggcacctgtgacgatgtgaacgagtgtgaaacactacagggtgtatgtggagctgccctgtgtgaaaatgtcgaaggctccttcctctgtgtctgccccaacagcccggaagagtttgaccccatgactggacgctgtgttcccccacgaacttctgctgacgtggacgaatgtcagctcttccgagaccaggtgtgcaagagtggcgtgtgtgtgaacacggccccgggctactcatgctattgcagcaacggctactactaccacacacagcggctggagtgcatcgacaatgacgagtgcgccgatgaggaaccggcctgtgagggcggccgctgtgtcaacactgtgggctcttatcactgtacctgcgagcccccactggtgctggatggctcgcagcgccgctgcgtctccaacgagagccagagcctcgatgacaatctgggagtgtgctggcaggaagtgggggctgacctcgtgtgcagccaccctcggctggaccgtcaggccacctacacagagtgctgctgcctgtatggagaggcctggggcatggactgcgccctctgccctgcgcaggactcagatgacttcgaggccctgtgcaatgtgctacgcccccccgcatatagccccccgcgaccaggtggctttggactcccctacgagtacggcccagacttaggtccaccttaccagggcctcccatatgggcctgagttgtacccaccacctgcgctaccctacgacccctacccaccgccacctgggcccttcgcccgccgggaggctccttatggggcaccccgcttcgacatgccagactttgaggacgatggtggcccctatggcgaatctgaggctcctgcgccacctggcccgggcacccgctggccctatcggtcccgggacacccgccgctccttcccagagcccgaggagcctcctgaaggtggaagctatgctggttccctggctgagccctacgaggagctggaggcggaggagtgcgggatcctggacggctgcaccaacggccgctgcgtgcgcgtccccgaaggcttcacctgccgttgcttcgacggctaccgcctggacatgacccgcatggcctgcgttgacatcaacgagtgtgatgaggccgaggctgcctccccgctgtgcgtcaacgcgcgttgcctcaacacggatggctccttccgctgcatctgccgcccgggattcgcacccacgcaccagccgcaccactgtgcgcccgcacggccccgggcctgagccctggcacccgctggccgcccacccgcgcccgccactcggggcccctgccgcgcatcctgcagcccgcttatgcgtatgtgcacggggccgcccgcc

SEQ ID NO: 15730 - DNA, 4958 bp, Homo sapiens
  source 1..4958: mol_type = unassigned DNA
agcgcggcgctgcagccatggcgggcggcgtgcggctgctctgggtgtcgctattggtgctgctggcgcagctagggccgcagcctggactgggccggctcggagagcgtctccgcgtgcgcttcaccccggtcgtgtgcggcctgcgctgcgtccatgggccgaccggctcccgctgtaccccgacctgcgcgccccgcaacgccaccagcgtggacagcggcgctcccggcggggcggccccggggggacccggcttccgcgccttcctgtgtcccttgatctgtcacaatggcggtgtgtgcgtgaagcctgaccgctgcctctgtcccccggacttcgctggcaagttctgccagttgcactcctcgggcgcccggcccccggccccggctgtaccaggcctcacccgctccgtgtacactatgccactggccaaccaccgcgacgacgagcacggcgtggcatctatggtgagcgtccacgtggagcacccgcaggaggcgtcggtggtggtgcaccaggtggagcgtgtgtctggcccttgggaggaggcggacgctgaggcggtggcgcgggcggaagcggcggcgcgggcggaggcggcagcgccctacacggtgttggcacagagcgcgccgcgggaggacggctactcagatgcctcgggcttcggttactgctttcgggagctgcgcggaggcgaatgcgcgtccccgctgcccgggctccggacgcaggaggtctgctgccgaggggccggcttggcctggggcgttcacgactgtcagctgtgctccgagcgcctggggaactccgaaagagtgagcgccccagatggaccttgtccaaccggctttgaaagagttaatgggtcctgcgaagatgtggatgagtgcgcgactggcgggcgctgccagcacggcgagtgtgcaaacacgcgcggcgggtacacgtgtgtgtgccccgacggctttctgctcgactcgtcccgcagcagctgcatctcccaacacgtgatctcagaggccaaagggccctgcttccgcgtgctccgcgacggcggctgttcgctgcccattctgcggaacatcactaaacagatctgctgctgcagccgcgtaggcaaggcctggggccggggctgccagctctgcccacccttcggctcagagggtttccgggagatctgcccggctggtcctggttaccactactcggcctccgacctccgctacaacaccagacccctgggccaggagccaccccgagtgtcactcagccagcctcgtaccctgccagccacctctcggccatctgcaggctttctgcccacccatcgcctggagccccggcctgaaccccggcccgatccccggcccggccctgagcttcccttgcccagcatccctgcctggactggtcctgagattcctgaatcaggtccctcctccggcatgtgtcagcgcaacccccaggtctgcggcccaggacgctgcatttcccggcccagcggctacacctgcgcttgcgactctggcttccggctcagcccccagggcacccgatgcattgatgtggacgaatgtcgccgcgtgcccccgccctgtgctcccgggcgctgcgagaactcaccaggcagcttccgctgcgtgtgcggcccgggcttccgagccggcccacgggctgcggaatgcctggatgtggacgagtgccaccgcgtgccgccgccgtgtgacctcgggcgctgcgagaacacgccaggcagcttcctgtgcgtgtgccccgccgggtaccaggctgcaccgcacggagccagctgccaggatgtggatgaatgcacccagagcccaggcctgtgtggccgaggggcctgcaagaacctgcctggctctttccgctgtgtttgcccggctggcttccggggctcggcgtgtgaagaggatgtggatgagtgtgcccaggagccgccgccctgtgggcccggccgctgtgacaacacggcaggctcctttcactgtgcctgccctgctggcttccgctcccgagggcccggggccccctgccaagatgtggatgagtgtgcccgaagccccccaccctgcacctacggccggtgtgagaacacagaaggcagcttccagtgtgtctgccccatgggcttccaacccaacactgctggctccgagtgcgaggatgtggatgagtgtgagaaccacctcgcatgccctgggcaggagtgtgtgaactcgcccggctccttccagtgcaggacctgtccttctggccaccacctgcaccgtggcagatgcactgatgtggacgaatgcagttcgggtgcccctccctgtggtccccacggccactgcactaacaccgaaggctccttccgctgcagctgcgcgccaggctaccgggcgccgtcgggtcggcccgggccctgcgcagacgtgaacgagtgcctggagggcgatttctgcttccctcacggcgagtgcctcaacactgacggctcctttgcctgtacttgtgcccctggctaccgacccggaccccgcggagcctcttgcctcgacgttgacgagtgcagcgaggaggacctttgccagagcggcatctgtaccaacaccgacggctccttcgagtgcatctgtcctccgggacaccgcgctggcccggacctcgcctcctgcctcgacgtggacgaatgtcgcgagcgaggcccagccctgtgcgggtcgcagcgctgtgagaactctcccggctcctaccgctgtgtccgggactgcgatcctgggtaccacgcgggccccgagggcacctgtgacgatgtggatgagtgccaagaatatggtcccgagatttgtggagcccagcgttgtgagaacacccctggctcctaccgctgcacaccagcctgtgaccctggctatcagcccacgccagggggcggatgccaggatgtggacgaatgccggaaccggtccttctgcggtgcccacgccgtgtgccagaacctgcccggctccttccagtgcctctgtgaccagtacgagggggcacgggatgggcgtcactgcgtggatgtgaacgagtgtgaaacactacagggtgtatgtggagctgccctgtgtgaaaatgtcgaaggctccttcctctgtgtctgccccaacagcccggaagagtttgaccccatgactggacgctgtgttcccccacgaacttctgctggcacgttcccaggctcgcagccccaggcacctgctagccccgttctgcccgccaggccacctccgccacccctgccccgccgacccagcacacctaggcagggccctgtggggagtgggcgccgggagtgctactttgacacagcggccccggatgcatgtgacaacatcctggctcggaatgtgacatggcaggagtgctgctgtactgtgggtgagggctggggcagcggctgccgcatccagcagtgcccgggcaccgagacagctgagtaccagtcattgtgccctcacggccggggctacctggcgcccagtggagacctgagcctccggagagacgtggacgaatgtcagctcttccgagaccaggtgtgcaagagtggcgtgtgtgtgaacacggccccgggctactcatgctattgcagcaacggctactactaccacacacagcggctggagtgcatcgacaatgacgagtgcgccgatgaggaaccggcctgtgagggcggccgctgtgtcaacactgtgggctcttatcactgtacctgcgagcccccactggtgctggatggctcgcagcgccgctgcgtctccaacgagagccagagcctcgatgacaatctgggagtgtgctggcaggaagtgggggctgacctcgtgtgcagccaccctcggctggaccgtcaggccacctacacagagtgctgctgcctgtatggagaggcctggggcatggactgcgccctctgccctgcgcaggactcagatgacttcgaggccctgtgcaatgtgctacgcccccccgcatatagccccccgcgaccaggtggctttggactcccctacgagtacggcccagacttaggtccaccttaccagggcctcccatatgggcctgagttgtacccaccacctgcgctaccctacgacccctacccaccgccacctgggcccttcgcccgccgggaggctccttatggggcaccccgcttcgacatgccagactttgaggacgatggtggcccctatggcgaatctgaggctcctgcgccacctggcccgggcacccgctggccctatcggtcccgggacacccgccgctccttcccagagcccgaggagcctcctgaaggtggaagctatgctggttccctggctgagccctacgaggagctggaggcggaggagtgcgggatcctggacggctgcaccaacggccgctgcgtgcgcgtccccgaaggcttcacctgccgttgcttcgacggctaccgcctggacatgacccgcatggcctgcgttgacatcaacgagtgtgatgaggccgaggctgcctccccgctgtgcgtcaacgcgcgttgcctcaacacggatggctccttccgctgcatctgccgcccgggattcgcacccacgcaccagccgcaccactgtgcgcccgcacggccccgggcctgagccctggcacccgctggccgcccacccgcgcccgccactcggggcccctgccgcgcatcctgcagcccgcttatgcgtatgtgcacggggccgcccgcctggacctggagaagggacctacggacgcctggaagctgcgacgccctgcactgctcccgcctccaccagcgcctcccactgatgtcgtggtcccgggcctggcccaggggcccctttacatgccctctcccttttataaaattttccattaaaaaccacctattttctatc

SEQ ID NO: 15731 - DNA, 4776 bp, Homo sapiens
  source 1..4776: mol_type = unassigned DNA
atgggagacgtaaaagcgttgctgtttgtcgctgctgcccgggccagacgtctaggaggagccgctgcatccgagtccctggctgtctccgaagccttctgcagggtccgaagctgccagcccaaaaagtgtgcaggcccccagcggtgcctgaacccagtgcctgcagtgcccagtcccagccccagcgtgaggaagagacaggtgtccctcaactggcagccactgacgctccaggaggccagagctctactgaagcggcggcggccccgggggccagggggccggggactactgagaaggaggcccccacagcgtgcccccgctggcaaggccccggtcctgtgtcccttgatctgtcacaatggcggtgtgtgcgtgaagcctgaccgctgcctctgtcccccggacttcgctggcaagttctgccagttgcactcctcgggcgcccggcccccggccccggctgtaccaggcctcacccgctccgtgtacactatgccactggccaaccaccgcgacgacgagcacggcgtggcatctatggtgagcgtccacgtggagcacccgcaggaggcgtcggtggtggtgcaccaggtggagcgtgtgtctggcccttgggaggaggcggacgctgaggcggtggcgcgggcggaagcggcggcgcgggcggaggcggcagcgccctacacggtgttggcacagagcgcgccgcgggaggacggctactcagatgcctcgggcttcggttactgctttcgggagctgcgcggaggcgaatgcgcgtccccgctgcccgggctccggacgcaggaggtctgctgccgaggggccggcttggcctggggcgttcacgactgtcagctgtgctccgagcgcctggggaactccgaaagagtgagcgccccagatggaccttgtccaaccggctttgaaagagttaatgggtcctgcgaagatgtggatgagtgcgcgactggcgggcgctgccagcacggcgagtgtgcaaacacgcgcggcgggtacacgtgtgtgtgccccgacggctttctgctcgactcgtcccgcagcagctgcatctcccaacacgtgatctcagaggccaaagggccctgcttccgcgtgctccgcgacggcggctgttcgctgcccattctgcggaacatcactaaacagatctgctgctgcagccgcgtaggcaaggcctggggccggggctgccagctctgcccacccttcggctcagagggtttccgggagatctgcccggctggtcctggttaccactactcggcctccgacctccgctacaacaccagacccctgggccaggagccaccccgagtgtcactcagccagcctcgtaccctgccagccacctctcggccatctgcaggctttctgcccacccatcgcctggagccccggcctgaaccccggcccgatccccggcccggccctgagcttcccttgcccagcatccctgcctggactggtcctgagattcctgaatcaggtccctcctccggcatgtgtcagcgcaacccccaggtctgcggcccaggacgctgcatttcccggcccagcggctacacctgcgcttgcgactctggcttccggctcagcccccagggcacccgatgcattgatgtggacgaatgtcgccgcgtgcccccgccctgtgctcccgggcgctgcgagaactcaccaggcagcttccgctgcgtgtgcggcccgggcttccgagccggcccacgggctgcggaatgcctggatgtggacgagtgccaccgcgtgccgccgccgtgtgacctcgggcgctgcgagaacacgccaggcagcttcctgtgcgtgtgccccgccgggtaccaggctgcaccgcacggagccagctgccaggatgtggatgaatgcacccagagcccaggcctgtgtggccgaggggcctgcaagaacctgcctggctctttccgctgtgtttgcccggctggcttccggggctcggcgtgtgaagaggatgtggatgagtgtgcccaggagccgccgccctgtgggcccggccgctgtgacaacacggcaggctcctttcactgtgcctgccctgctggcttccgctcccgagggcccggggccccctgccaagatgtggatgagtgtgcccgaagccccccaccctgcacctacggccggtgtgagaacacagaaggcagcttccagtgtgtctgccccatgggcttccaacccaacactgctggctccgagtgcgaggatgtggatgagtgtgagaaccacctcgcatgccctgggcaggagtgtgtgaactcgcccggctccttccagtgcaggacctgtccttctggccaccacctgcaccgtggcagatgcactgatgtggacgaatgcagttcgggtgcccctccctgtggtccccacggccactgcactaacaccgaaggctccttccgctgcagctgcgcgccaggctaccgggcgccgtcgggtcggcccgggccctgcgcagacgtgaacgagtgcctggagggcgatttctgcttccctcacggcgagtgcctcaacactgacggctcctttgcctgtacttgtgcccctggctaccgacccggaccccgcggagcctcttgcctcgacgttgacgagtgcagcgaggaggacctttgccagagcggcatctgtaccaacaccgacggctccttcgagtgcatctgtcctccgggacaccgcgctggcccggacctcgcctcctgcctcgacgtggacgaatgtcgcgagcgaggcccagccctgtgcgggtcgcagcgctgtgagaactctcccggctcctaccgctgtgtccgggactgcgatcctgggtaccacgcgggccccgagggcacctgtgacgatgtgaacgagtgtgaaacactacagggtgtatgtggagctgccctgtgtgaaaatgtcgaaggctccttcctctgtgtctgccccaacagcccggaagagtttgaccccatgactggacgctgtgttcccccacgaacttctgctggcacgttcccaggctcgcagccccaggcacctgctagccccgttctgcccgccaggccacctccgccacccctgccccgccgacccagcacacctaggcagggccctgtggggagtgggcgccgggagtgctactttgacacagcggccccggatgcatgtgacaacatcctggctcggaatgtgacatggcaggagtgctgctgtactgtgggtgagggctggggcagcggctgccgcatccagcagtgcccgggcaccgagacagctgagtaccagtcattgtgccctcacggccggggctacctggcgcccagtggagacctgagcctccggagagacgtggacgaatgtcagctcttccgagaccaggtgtgcaagagtggcgtgtgtgtgaacacggccccgggctactcatgctattgcagcaacggctactactaccacacacagcggctggagtgcatcgacaatgacgagtgcgccgatgaggaaccggcctgtgagggcggccgctgtgtcaacactgtgggctcttatcactgtacctgcgagcccccactggtgctggatggctcgcagcgccgctgcgtctccaacgagagccagagcctcgatgacaatctgggagtgtgctggcaggaagtgggggctgacctcgtgtgcagccaccctcggctggaccgtcaggccacctacacagagtgctgctgcctgtatggagaggcctggggcatggactgcgccctctgccctgcgcaggactcagatgacttcgaggccctgtgcaatgtgctacgcccccccgcatatagccccccgcgaccaggtggctttggactcccctacgagtacggcccagacttaggtccaccttaccagggcctcccatatgggcctgagttgtacccaccacctgcgctaccctacgacccctacccaccgccacctgggcccttcgcccgccgggaggctccttatggggcaccccgcttcgacatgccagactttgaggacgatggtggcccctatggcgaatctgaggctcctgcgccacctggcccgggcacccgctggccctatcggtcccgggacacccgccgctccttcccagagcccgaggagcctcctgaaggtggaagctatgctggttccctggctgagccctacgaggagctggaggcggaggagtgcgggatcctggacggctgcaccaacggccgctgcgtgcgcgtccccgaaggcttcacctgccgttgcttcgacggctaccgcctggacatgacccgcatggcctgcgttgacatcaacgagtgtgatgaggccgaggctgcctccccgctgtgcgtcaacgcgcgttgcctcaacacggatggctccttccgctgcatctgccgcccgggattcgcacccacgcaccagccgcaccactgtgcgcccgcacggccccgggcctgagccctggcacccgctggccgcccacccgcgcccgccactcggggcccctgccgcgcatcctgcagcccgcttatgcgtatgtgcacggggccgcccgcctggacctggagaagggacctacggacgcctggaagctgcgacgccctgcactgctcccgcctccaccagcgcctcccactgatgtcgtggtcccgggcctggcccaggggcccctttacatgccctctcccttttataaaattttccattaaaaaccacctattttctatc

SEQ ID NO: 15732 - DNA, 1285 bp, Homo sapiens
  source 1..1285: mol_type = unassigned DNA
aactccctcccccaggccccgccactgtcctgcaactgcggcaaccaatctcctgaccgcgaccccgattccaaccctgccacaccagagccctatccccaaactgctcctttcttctctagcccctaccccaccttcccttagcttggtccccaaagctctcctttctgcccttgcgctaccaaaccctgccctccacaattgcctctctcactgtgcccctctccggctgtcctggccgggtccccatcctggctctggcccaagcttggtcccgctcccgcttccctctacccctgcctccttgcgtcgcttctcccggggctgtctgccccagtcccagccgcctggtctgtgcctacagatgtggacgagtgccaccgcgtgccgccgccgtgtgacctcgggcgctgcgagaacacgccaggcagcttcctgtgcgtgtgccccgccgggtaccaggctgcaccgcacggagccagctgccaggatgtggatgagtgtgcccgaagccccccaccctgcacctacggccggtgtgagaacacagaaggcagcttccagtgtgtctgccccatgggcttccaacccaacactgctggctccgaatgtggatgagtgtgagaaccacctcgcatgccctgggcaggagtgtgtgaactcgcccggctccttccagtgcaggacctgtccttctggccaccacctgcaccgtggcagatgcactgatgtggacgaatgcagttcgggtgcccctccctgtggtccccacggccactgcactaacaccgaaggctccttccgctgcagctgcgcgccaggctaccgggcgccgtcgggtcggcccgggccctgcgcagacgtgaacgagtgcctggagggcgatttctgcttccctcacggcgagtgcctcaacactgacggctcctttgcctgtacttgtgcccctggctaccgacccggaccccgcggagcctcttgcctcggttcgtacccgggctgatcctggccccggaaagggtgggcttagggcaggaaaaggcgggacggggagaagagggcgaaaaggggaaaacgagtttttagccggggtattccagcaggatcagggggcagctggtgggagtctcgaggcagtgagggggggcggggcgtggagatgaaagggccgagtctgggtatttggaccgtgattgtaaagaagctgttctaaacccgtcggggggcggtgtttgcagggagggaagtagcgtgaggcaggttggggaaggcgtgagaggcctag

SEQ ID NO: 15733 - DNA, 1116 bp, Homo sapiens
  source 1..1116: mol_type = unassigned DNA
agaagcagtcagcccagggctctcggatgcagggagcctgggcccaaacagcagcttccggagtcggaaggagctgaggaagaagactgactgaaggagcttgcgacttttccgcctcggcaaccggacccagcagcaagcaggacgggcggcgctctgctactggtcccgttaagccagagtagcccaagccctgaagtcactgctcatccggaatggaaatcccgccgaccaactacccagcctccagggcggccttggtggcacagaactacatcaactaccagcaggggaccccgcacagggtgtttgaggtgcagaaggtcaaacaagccagcatggaggatattccaggaagaggacataagtatcaccttaaatttgctgttgaagaaattatacaaaaacaagttaaggtgaactgcacagctgaagtactttacccttcaacgggacaagaaactgcaccagaagtcaacttcacatttgaaggagaaactggaaagaatccagatgaagaagacaacacattttatcaaagacttaagtccatgaaggaaccgctagaagcacaaaatattccagacaattttggaaatgtatctccagaaatgacgctcgttctacatttagcctgggttgcctgtggttatataatatggcaaaattctactgaagacacatggtataaaatggtaaaaattcaaactgtcaagcaagtgcaaagaaatgatgactttattgaattagactacaccattctacttcataatatagcatctcaggagattattccctggcaaatgcaagttctctggcatccacaatacggcactaaagtaaaacataatagccgtctgccaaaggaagtacaactggaataaacaaaaaccctaacactggaagtgtaaacatgtctattgatgtgtatgccaatttcactggcatctagcttatgaggccaaataatcccaaagtgtcactttatataaatgtcttgattacagtatagaactttatagagtccataatacaaagtatcactacataaaaatgtctttaaaacagtaatagtggtatgtatatccaaaataaaaagcttcaatttcagcctca

SEQ ID NO: 15734 - DNA, 1178 bp, Homo sapiens
  source 1..1178: mol_type = unassigned DNA
agccgagggctgcacaaagaccttcctggcctgccccagacagagctgaggacccctggccgtgggcttgggcctcggcttcacaggatggggctgccagtgtcctgggcccctcctgccctctgggttctagggtgctgcgccctgctcctctcgctgtgggcgctgtgcacagcctgccgcaggcccgaggacgctgtagcccccaggaagagggcgcggaggcagcgggcgaggctgcagggcagtgcgacggcggcggaagcgtccctactgaggcggacccacctctgctccctcagcaagtcggacaccagactgcacgagctgcaccggggcccgcgcagcagcagggccctgcggcctgccagcatggatctcctgcgcccacactggctggaggtgtccagggacatcaccggaccgcaggcagccccctctgccttcccacaccaggagctgccccgggctctgccggcagctgcagccaccgcagggtgcgctggcctcgaggccacctattccaacgtggggctggcggcccttcccggggtcagcctggcggccagccctgtggtggccgagtatgcccgcgtccagaagcgcaaagggacccatcgcagtccccaagagccacagcaggggaagactgaggtgaccccggccgctcaggtggacgtcctgtactccagggtctgcaagcctaaaaggagggacccaggacccaccacagacccgctggaccccaagggccagggagcgattctggccctggcgggtgacctggcctaccagaccctcccgctcagggccctggatgtggacagcggccccctggaaaacgtgtatgagagcatccgggagctgggggaccctgctggcaggagcagcacgtgcggggctgggacgccccctgcttccagctgccccagcctagggaggggctggagacccctccctgcctccctgccctgaacactcaaggacctgtgctccttcctccagagtgaggcccgtcccccgccccgccccgcctcacagctgacagcgccagtcccaggtccccgggctgccagcccgtgaggtccgtgaggtcctggccgctctgacagccgcggcctccccgggctccagagaaggcccgcgtctaaataaagcgccagcgcaggatgaaagcg

SEQ ID NO: 15735 - DNA, 451 bp, Homo sapiens
  source 1..451: mol_type = unassigned DNA
aggccagggtgcccgccaggctgcctgacacccacagatgggtggagctcagtgctgctccagcgggcgagacgggcgggagaggactgtggcccaccacgtggggcactcttgggcctcggcttcacaggatggggctgccagtgtcctgggcccctcctgccctctgggttctagggtgctgcgccctgctcctctcgctgtgggcgctgtgcacagcctgccgcaggcccgaggacgctgtagcccccaggaagagggcgcggaggcagcgggcgaggctgcagggcagtgcgacggcggcggaagcgtccctactgaggcggacccacctctgctccctcagcaagtcggacaccagactgcacgagctgcaccggggcccgcgcagcagcagggccctgcggcctgccagcatggatctcctgcgcccacactggctggaggtgtc

SEQ ID NO: 15736 - DNA, 4542 bp, Homo sapiens
  source 1..4542: mol_type = unassigned DNA
accctggagcccaggttaccgccgctgccacccaggagccccgatcctcgcctctgtcccatccttgtgttcaaacctcccgcatctcggcaacctcggcacccgcccggcagcctccgcaggaaccaggcacccgctctttggcggtcagacgccgaggccccagctgggagtttggtcctaagagggaaggcaaggaggcgggacgccgcatcggctctgctgaagagcctgcgggttggagggcaaaaaagtttatcttctggatgccaatgtgaattgtggtctacaaatacattgtggagaaaatagattgcacagaaatgaatattatcaggatctgaagactgtgaaaatgtttttcagtattgtcatagtctcctctggagaaaataatctgtgaaattatgtgaatagagaccatttttcaaaacaatgggggaaagagcaggaagtccaggtactgatcaagaaagaaaggcaggcaaacaccattattcttacttatctgattttgaaacgccacagtcttctggccgatcatcgctggtcagttcttcacctgcaagtgttaggagaaaaaatcctaaaagacaaacttcagatggccaagtacatcaccaagcccctcggaaaccaagccctaagggtctaccaaacagaaagggagtccgagtgggatttcgctcccagagcctcaatagagagccacttcggaaagatactgatcttgttacaaaacggattctgtctgcaagactgctaaaaatcaatgagttgcagaatgaagtatctgaactccaggtcaagttagctgagctgctaaaagaaaataaatctttgaaaaggcttcagtacagacaggagaaagccctgaataagtttgaagatgccgaaaatgaaatctcacaacttatatttcgtcataacaatgagattacagcactcaaagaacgcttaagaaaatctcaagagaaagaacgggcaactgagaaaagggtaaaagatacagaaagtgaactatttaggacaaaattttccttacagaaactgaaagagatctctgaagctagacacctacctgaacgagatgatttggcaaagaaactagtttcagcagagttaaagttagatgacaccgagagaagaattaaggagctatcgaaaaaccttgaactgagtactaacagtttccaacgacagttgcttgctgaaaggaaaagggcatatgaggctcatgatgaaaataaagttcttcaaaaggaggtacagcgactatatcacaaattaaaggaaaaggagagagaactggatataaaaaatatatattctaatcgtctgccaaagtcctctccaaataaagagaaagaacttgcattaagaaaaaatgctgcatgccagagtgattttgcagacctgtgtacaaaaggagtacaaaccatggaagacttcaagccagaagaatatcctttaactccagaaacaattatgtgttacgaaaacaaatgggaagaaccaggacatcttactttggacttgcaatctcaaaagcaagacaggcatggagaagcagggattctaaacccaattatggaaagagaagaaaaatttgttacagatgaagaactccatgtcgtaaaacaggaggttgaaaagctggaggatgaatgggaaagagaagaacttgataaaaagcaaaaagaaaaggcatctttactggaaagagaagaaaagccagagtgggaaactggaaggtaccaactaggaatgtatccaattcagaatatggataaattgcaaggagaggaagaagaaagactgaagagagaaatgctacttgctaaactgaatgaaattgacagagaactccaagattctcgaaatctaaaataccctgttttgccattgttacctgattttgaatcaaaactacactccccagagagaagccccaaaacatacaggttctctgaatcctcagagagattatttaatgggcatcatttgcaagacatcagtttctcaactccaaaaggagaaggtcagaattcaggaaatgttagaagtccagcctcccctaatgagttcgcatttggtagctacgtgccttcgtttgcaaaaacatcagagaggtcaaatccatttagtcaaaaaagtagttttttggatttccaaagaaacagtatggaaaaacttagtaaagatggtgtagatttaattacaagaaaagagaaaaaagctaatttgatggaacagttatttggtgccagtggtagcagcaccatttcctccaaaagcagtgacccaaattctgtggcttccagtaaaggagacattgaccctctaaattttctccctgggaataaaggcagcagagatcaagaacatgatgaagatgaaggctttttcctcagtgaaggaagaagttttaatccaaataggcaccgattaaaacatgcagacgataaaccagcagtaaaagcagctgattctgtagaagatgaaattgaagaagtagcactgagatgactgactagagtatacattttttctaattgtaaatattgaaatattttaatacagtatttattataaacatttagactttttaatgctaaaatgtccttattaaggaatgatttttaatagctaaatacaatgcagttaaaaagaagtagatcatacatacaccacatagatagtttgccaagaatgaaggaggcttttttgaatgaaaccaaaaataaaaatatgtcttgaaaaatgaaatagattttaactcttcatccagtgctatggcaagtttaactgcactggaggtggtattccttttctacttttattcctatttatgtatttatttttaatcatattctcactgtgctaaatacagtcttcccactaattgttgaatgaaaattaagggtgaaagtctgtgttgggaagtgtagctccggatggtggagaaccagtgcttcttaggagcccttccctttatggatagggccaggggtccctatcttacgtggcagtcctaagctactcttgagtgatagcagtcacaacattgggatttcccattcctctgaaagtacccacagctaaacactactcatttcccaatttcagtatttactgaaatcacttacctacaattctgttagaatattatgttgagttcggaagacatttctctgtttgcaaggacagttagttgctctctgtcatagcccgcagaagcttggctacagtgtaattcctctccttgttctcctacactctttgtatctcagtgactgggtgtaagatttcatgccaaatgcaaggaatagtggaaatacataccaactgcaaagaatagaaaaactttatcccaatatattatagaaagatcttcagttcaattatgtccagagtaatataatttggcaatgttaatgcttttaagatttgaacttgtcctcaaaccaaggagacaacaatagtgtaatactattggacttacaggattagttttaaagcaactttgaatagaagtgtttcagacataggacttctgccttgttgactagagtggatagttttctgtttaaatgcattggtcttttggctgtttgtaattcacttcagcttatagagaagttgatgaccttggatcatgctgggtatgattggtctttaaaaagcagtaatataccaccagcccaaggagaaaacattgttaaaatgaagagtggtggaaatagtgtgttgggaagaataaaaaatttagattggcacttattctaaagtgagctgtttttttcaagaatttactagcatttgctcgtagtatgatttctgacgccagtcatatatactgatgaggggaaggagttactgtgttattctgagttcttataaatgcatattattgaatttcattgcatgactatttgtcaagacttacctggttaggtctccaattaaaagatgtaccacctgtcatcttctaaattgtgttcctttcatttattgggaacagaatctctcaaaagtgctaaactatattaaaaagttttcttaatagatttgtatgtctgatatgtataaccatttactataatatgttgcaaatcattctaatatatgtaaaacaatattatttgtaatgcagttattggtaaaatattatgtaatgttaattttgttcctagctgctaatttttctgccaaaagtattctaattttcaggttgttttaaaggcttttaaaactttttagttaagttttttattcacgtcatttaaattagttttttgctttttttctacctgataatctctttaacaagatgcaacaagacagaattattaaaattaaacctaaagttaagttacagatttaaaggcattatgatattaagcattaaaattggagattaaaatgtacaaaacagggttttccttatgaacaaaccttacagggtaaattgtttttttttctaaatgtcattaaatttatttgtactcagaactgttactaataaaaattaaaaatgca

SEQ ID NO: 15737 - DNA, 4719 bp, Homo sapiens
  source 1..4719: mol_type = unassigned DNA
agtctaggcctccgcctccgttaccctggagcccaggttaccgccgctgccacccaggagccccgatcctcgcctctgtcccatccttgtgttcaaacctcccgcatctcggcaacctcggcacccgcccggcagcctccgcaggaaccaggcacccgctctttggcggtcagacgccgaggccccagctgggagtttggtcctaagagggaaggcaaggaggcgggacgccgcatcggctctgctgaagagcctgcgggttggaggtgggctttgaagtgggcgtggagacggcgggggaggtggaggtgcgagtataaatgatcaaccagaaattatcttcaaaggaataaaaccagaagtatgtaaataaaaagcccaagataaagaaacagaaaagctgacactacatgaagcagagggcaaaaaagtttatcttctggatgccaatgtgaattgtggtctacaaatacattgtggagaaaatagattgcacagaaatgaatattatcaggatctgaagactgtgaaaatgtttttcagtattgtcatagtctcctctggagaaaataatctgtgaaattatgtgaatagagaccatttttcaaaacaatgggggaaagagcaggaagtccaggtactgatcaagaaagaaaggcaggcaaacaccattattcttacttatctgattttgaaacgccacagtcttctggccgatcatcgctggtcagttcttcacctgcaagtgttaggagaaaaaatcctaaaagacaaacttcagatggccaagtacatcaccaagcccctcggaaaccaagccctaagggtctaccaaacagaaagggagtccgagtgggatttcgctcccagagcctcaatagagagccacttcggaaagatactgatcttgttacaaaacggattctgtctgcaagactgctaaaaatcaatgagttgcagaatgaagtatctgaactccaggtcaagttagctgagctgctaaaagaaaataaatctttgaaaaggcttcagtacagacaggagaaagccctgaataagtttgaagatgccgaaaatgaaatctcacaacttatatttcgtcataacaatgagattacagcactcaaagaacgcttaagaaaatctcaagagaaagaacgggcaactgagaaaagggtaaaagatacagaaagtgaactatttaggacaaaattttccttacagaaactgaaagagatctctgaagctagacacctacctgaacgagatgatttggcaaagaaactagtttcagcagagttaaagttagatgacaccgagagaagaattaaggagctatcgaaaaaccttgaactgagtactaacagtttccaacgacagttgcttgctgaaaggaaaagggcatatgaggctcatgatgaaaataaagttcttcaaaaggaggtacagcgactatatcacaaattaaaggaaaaggagagagaactggatataaaaaatatatattctaatcgtctgccaaagtcctctccaaataaagagaaagaacttgcattaagaaaaaatgctgcatgccagagtgattttgcagacctgtgtacaaaaggagtacaaaccatggaagacttcaagccagaagaatatcctttaactccagaaacaattatgtgttacgaaaacaaatgggaagaaccaggacatcttactttggacttgcaatctcaaaagcaagacaggcatggagaagcagggattctaaacccaattatggaaagagaagaaaaatttgttacagatgaagaactccatgtcgtaaaacaggaggttgaaaagctggaggatgaatgggaaagagaagaacttgataaaaagcaaaaagaaaaggcatctttactggaaagagaagaaaagccagagtgggaaactggaaggtaccaactaggaatgtatccaattcagaatatggataaattgcaaggagaggaagaagaaagactgaagagagaaatgctacttgctaaactgaatgaaattgacagagaactccaagattctcgaaatctaaaataccctgttttgccattgttacctgattttgaatcaaaactacactccccagagagaagccccaaaacatacaggttctctgaatcctcagagagattatttaatgggcatcatttgcaagacatcagtttctcaactccaaaaggagaaggtcagaattcaggaaatgttagaagtccagcctcccctaatgagttcgcatttggtagctacgtgccttcgtttgcaaaaacatcagagaggtcaaatccatttagtcaaaaaagtagttttttggatttccaaagaaacagtatggaaaaacttagtaaagatggtgtagatttaattacaagaaaagagaaaaaagctaatttgatggaacagttatttggtgccagtggtagcagcaccatttcctccaaaagcagtgacccaaattctgtggcttccagtaaaggagacattgaccctctaaattttctccctgggaataaaggcagcagagatcaagaacatgatgaagatgaaggctttttcctcagtgaaggaagaagttttaatccaaataggcaccgattaaaacatgcagacgataaaccagcagtaaaagcagctgattctgtagaagatgaaattgaagaagtagcactgagatgactgactagagtatacattttttctaattgtaaatattgaaatattttaatacagtatttattataaacatttagactttttaatgctaaaatgtccttattaaggaatgatttttaatagctaaatacaatgcagttaaaaagaagtagatcatacatacaccacatagatagtttgccaagaatgaaggaggcttttttgaatgaaaccaaaaataaaaatatgtcttgaaaaatgaaatagattttaactcttcatccagtgctatggcaagtttaactgcactggaggtggtattccttttctacttttattcctatttatgtatttatttttaatcatattctcactgtgctaaatacagtcttcccactaattgttgaatgaaaattaagggtgaaagtctgtgttgggaagtgtagctccggatggtggagaaccagtgcttcttaggagcccttccctttatggatagggccaggggtccctatcttacgtggcagtcctaagctactcttgagtgatagcagtcacaacattgggatttcccattcctctgaaagtacccacagctaaacactactcatttcccaatttcagtatttactgaaatcacttacctacaattctgttagaatattatgttgagttcggaagacatttctctgtttgcaaggacagttagttgctctctgtcatagcccgcagaagcttggctacagtgtaattcctctccttgttctcctacactctttgtatctcagtgactgggtgtaagatttcatgccaaatgcaaggaatagtggaaatacataccaactgcaaagaatagaaaaactttatcccaatatattatagaaagatcttcagttcaattatgtccagagtaatataatttggcaatgttaatgcttttaagatttgaacttgtcctcaaaccaaggagacaacaatagtgtaatactattggacttacaggattagttttaaagcaactttgaatagaagtgtttcagacataggacttctgccttgttgactagagtggatagttttctgtttaaatgcattggtcttttggctgtttgtaattcacttcagcttatagagaagttgatgaccttggatcatgctgggtatgattggtctttaaaaagcagtaatataccaccagcccaaggagaaaacattgttaaaatgaagagtggtggaaatagtgtgttgggaagaataaaaaatttagattggcacttattctaaagtgagctgtttttttcaagaatttactagcatttgctcgtagtatgatttctgacgccagtcatatatactgatgaggggaaggagttactgtgttattctgagttcttataaatgcatattattgaatttcattgcatgactatttgtcaagacttacctggttaggtctccaattaaaagatgtaccacctgtcatcttctaaattgtgttcctttcatttattgggaacagaatctctcaaaagtgctaaactatattaaaaagttttcttaatagatttgtatgtctgatatgtataaccatttactataatatgttgcaaatcattctaatatatgtaaaacaatattatttgtaatgcagttattggtaaaatattatgtaatgttaattttgttcctagctgctaatttttctgccaaaagtattctaattttcaggttgttttaaaggcttttaaaactttttagttaagttttttattcacgtcatttaaattagttttttgctttttttctacctgataatctctttaacaagatgcaacaagacagaattattaaaattaaacctaaagttaagttacagatttaaaggcattatgatattaagcattaaaattggagattaaaatgtacaaaacagggttttccttatgaacaaaccttacagggtaaattgtttttttttctaaatgtcattaaatttatttgtactcagaactgttactaataaaaattaaaaatgca

SEQ ID NO: 15738 - DNA, 4928 bp, Homo sapiens
  source 1..4928: mol_type = unassigned DNA
taaaaagtcgcagcgaagcctgcacctccgagcaccgcgcgcggccctgcccccggcacggcccccaggtgcgctccttctccggctgcttgtagcactggtctcactgtccccgccgtcagccaccggttccttatccgtctcattccccattgtggcttggctgagccggtcgccaggcctcgctgtcctcctttgccttcctctctcctcagcggccgtactttgcgccgtacctcacctggcctgcaggatgaagaaccccatgctggaggtggtgtctttactactggagaagctgctcctcatctccaacttcacgctctttagttcgggcgccgcgggcgaagacaaagggaggaacagtttttatgaaaccagctctttccaccgaggcgacgtgctggaggtgccccggacccacctgacccactatggcatctacctaggagacaaccgtgttgcccacatgatgcccgacatcctgttggccctgacagacgacatggggcgcacgcagaaggtggtctccaacaagcgtctcatcctgggcgttattgtcaaagtggccagcatccgcgtggacacagtggaggacttcgcctacggagctaacatcctggtcaatcacctggacgagtccctccagaaaaaggcactgctcaacgaggaggtggcgcggagggctgaaaagctgctgggctttaccccctacagcctgctgtggaacaactgcgagcacttcgtgacctactgcagatatggcaccccgatcagtccccagtccgacaagttttgtgagactgtgaagataattattcgtgatcagagaagtgttcttgcttcagcagtcttgggattggcgtctatagtctgtacgggcttggtatcatacactacccttcctgcaatttttattccattcttcctatggatggctggctaacttcatacccccatgtcagtgtgtgtattctgtatgtaaatatgtttatatttatagagcatcaatcaatataagcattattgagaaaaatgtgacccgtaacactgtgttctggataaaaatgtgattaggaatcacgcaaagtgcttactgtgtaagcccaagaacaaaggctttctgaatcttctcaggcagttcagatttaaagcaccatccaaaccttggaaatacgacagggtgtggtagaattcagcaatatgagaaaaccagcccctaaaatgatagccacaagagattaattgtgtttttttttctcctgtaatccttgtactgttcggctgaatttgaagattggaagacttatattgagaccagtaactttactgtaaatttactttgtttcattgaaaaaacaaattgataaacatattaaactggaagaattttctttattcaaatgaaaacatgtttgatgactggtcaaaaaataagctcataatctatttttttcatgtagtatataagtcaagaatgttttattgtcattatgtgaaaccaatattggcaaatagtactttaatgatgaagtaaatgaccagaaattatagaaatctgtgttttcctgtaaaaatagcactatagtatcacttgaacaatttgatttggctttacttactaggaagcctggaattcattatttttttccttttatgtgccactgtggctactttaaatcactctgagaggtaaatggatataggattgaagttatgtgggtatttggcatgtgtgtgtgaaataaatatgtagatagtcacatatacacagactgagagataaattgttcttgattgctttattatcatcatactagtgtgttcattatagagtatctgtagaggtgaatgtaaaagtaagtccaatctattttcttatgtcattgaatttgtagtgttaacttgcatatatgttattggatgggttgtcttttaaagcatttactaatgtactctgaaatttttaaaagccttcagatttgttttctagtcacttttttccatatcatttctaattatagtttatatccttaaaagaaggatgccacagtagtatgtaaaacccaaacaagtagaacccaagcaaataaaattatttaaaataattttaaagtggcttagtactgccagtcatgtaaattgattctgctgagggtcttataagaattgagatataacaatggtaaaacaagcattcaagcacttttacaaaattaccaaattcttaaaatgaagccacagctagacttgcatttcaggtattaaaattgctttcttaactgtcaagaatcacaaaataacaaatcatattatgagtgaatatggggagggcggggccaatcagtcaatgataatctgaacaaattttaagagcagattttagattaataatgttttatcaccactaatttgcccacaacaaactcagtatttaatttttcaaattaaatattaaattatttaagtattttaaataattaaaacattaaatggcaacaccatagaatataggtgttctctggacctattctaaccacttaaaattatcttaagtatgcatacataaaagcaaccactatgagaactaccgtgttagtggtttttcacttactgtatattacccttgtaggaatagtttaaggaaattcatttcttaaaaatatagtgtcctcaaataattaatttttttgcaaactttagttattacaggcagcaaaaaccactgtctgaaactaaatctgtgttcaaagatgaagacccctcattaaaagccaaggacgttcttaagattggaactgacataattagtcttgacttacttcattaaagcaagattcaattccttgttcatttgagtgttcattatatgccaggcattgaccagttgcaattttatggtccagaattaatattattattcgtaaactagctataatagagtatatacagtgctgtgggaatacaggggaagaagcaattaaatctgctagaagggtaagagaaatctgtatgcaggaggcaatgctagcattaagccaagaaatagtgtgaggtgatcttatcacactgatgtgttcaactgtttatgggaaaaggaaactaggatggttttatttgtgaaatgttctacaacgctagaactgttgaacttcttgggagaaaaggagaatctttgttttgttgtgctgagtttgattagttgcttaaccaagtagaaagaaaagcacatcttcctgatcacagttataaaagaaaccctgaggccgggcgcggtggctcaagcctgtaaccccagcactttgggaggccaaggagggaggatcacaaggtcaggagatcgagaccatcctggctaacacggtgaaaccccatctctactaaaaatacaaaattagctgggcgtggtggccggcgcctgtagtcccagctactcatgaggttgaggcaggagaatggcgtgaaccgaggaggcggagcttgcagtgagtggaaattgcgccactgcactccagcctgggcaacaaagtgagactccatctcaaaaaaaaaaaaaaaaaaaaaaaaaaaaaaagaagaagaaaccctgagccattaatgtgtctcgtaacttgaggaagttcatgaattctctgggcttcatccattaagattcatccttatgctcctgcaagtttcttatatttatgtatttctattctgatttctgaaatgataacctagtagtgtctgatgaagttttttcatgcttattttattctttgtcacagatgaaagaagaataggactaattggggctaagatgaattaatgtaagtgtcagatactaggcaggtgttagggatgaaatgatgaatgaggcatggacctgttcctcagagtttatggcccagtagacataattgtattaggactttctgcagttgacatttgcataaagctgactgactgaaggaacagaaagtgagacagacagatatgaccaaatttatacaaaccatgtaccaacacttgaaagatgggtggatattttccaggaaacagattttgggcaggacattccatgcactggaaatagcatgaacaaatgcatgaaaattgcctacaacatgcctggcacatagctgtgaggtaccctatgagttgttgacttgaaaacatggaactgcacagggcattcaggcaagtgcaagtggttcaggggccagcgcagagcagagtgctgagtaaagatgtcagaaaaggaaagcaatggtctggtacaagtcttgtatagaacaagaagtttagacttttgaacaggcaatcgagatttggggttcagaaagataaatcccaaaagtatggagaacaaaggaactcattttaaaggactagctaagatgctcaatctctaaaaaaaaaaggatctgtattcgtgagagtagagagaaaggttgtttaggaagagtcaacagactttagcaaaatccttttatttgattcatgcataactcctgatggagtgtcaaggaagactcattcacttttctttcctgccagaaagttggttcttgcaaaatagattaacttgatgactatgtgtatattggatactcctaattttagctctgttagatatgtttctttctaaggacaagcaactatgtatagacttgttgtttgaattttttttcagtatatatatgtttcttgtttttctatttttctacttcatactgttaatgtcaaatatcaaaaatgttttccagcaatatcaagttatggcaatggcaaaagtccttgttgtagatgagaagcatataagaaatggttgccaatctttgttttgtatgatctatttagagttttaaccaacctagatctgtcagctaagctaattttatatttggtatacatgcatgtcaaataaagttaattttacatac

SEQ ID NO: 15739 - DNA, 546 bp, Homo sapiens
  source 1..546: mol_type = unassigned DNA
tctgctcctcgggcggccttgagcagtgcctaacgttgagcgtgaggctcgtgctccgggtctcgcgggcggccgcctcgggcgtcgagtcccggagattggacagacaccagagcctggggaccgcggagtgaccgggtggggctggagggcggcgccgcgccttctggggagacgcggaggtatcaggacctgggctatgctcctgattttatacagactgccatggctccagatataaaagaccaaataaaaagataagaattgctggcaacatatgcactaaacttcgttttgaaaaatccccttgatgccgatcactgagaagtgatccacaggatgaagaaccccatgctggaggtggtgtctttactactggagaagctgctcctcatctccaacttcacgctctttagttcgggcgccgcgggcgaagacaaagggaggaacagtttttatgaaaccagctctttccaccgaggcgacgtgctggaggtgccccggacccacctgacccactatggcatctacctaggagacaaccgt

SEQ ID NO: 15740 - DNA, 2654 bp, Homo sapiens
  source 1..2654: mol_type = unassigned DNA
acagaatgtagccacctttcttaacggtccgggaaaccagaggtctctccagctactcagggatgaagaaccccatgctggaggtggtgtctttactactggagaagctgctcctcatctccaacttcacgctctttagttcgggcgccgcgggcgaagacaaagggaggaacagtttttatgaaaccagctctttccaccgaggcgacgtgctggaggtgccccggacccacctgacccactatggcatctacctaggagacaaccgtgttgcccacatgatgcccgacatcctgttggccctgacagacgacatggggcgcacgcagaaggtggtctccaacaagcgtctcatcctgggcgttattgtcaaagtggccagcatccgcgtggacacagtggaggacttcgcctacggagctaacatcctggtcaatcacctggacgagtccctccagaaaaaggcactgctcaacgaggaggtggcgcggagggctgaaaagctgctgggctttaccccctacagcctgctgtggaacaactgcgagcacttcgtgacctactgcagatatggcaccccgatcagtccccagtccgacaagttttgtgagactgtgaagataattattcgtgatcagagaagtgttcttgcttcagcagtcttgggattggcgtctatagtctgtacgggcttggtatcatacactacccttcctgcaatttttattccattcttcctatggatggctggctaacttcatacccccatgtcagtgtgtgtattctgtatgtaaatatgtttatatttatagagcatcaatcaatataagcattattgagaaaaatgtgacccgtaacactgtgttctggataaaaatgtgattaggaatcacgcaaagtgcttactgtgtaagcccaagaacaaaggctttctgaatcttctcaggcagttcagatttaaagcaccatccaaaccttggaaatacgacagggtgtggtagaattcagcaatatgagaaaaccagcccctaaaatgatagccacaagagattaattgtgtttttttttctcctgtaatccttgtactgttcggctgaatttgaagattggaagacttatattgagaccagtaactttactgtaaatttactttgtttcattgaaaaaacaaattgataaacatattaaactggaagaattttctttattcaaatgaaaacatgtttgatgactggtcaaaaaataagctcataatctatttttttcatgtagtatataagtcaagaatgttttattgtcattatgtgaaaccaatattggcaaatagtactttaatgatgaagtaaatgaccagaaattatagaaatctgtgttttcctgtaaaaatagcactatagtatcacttgaacaatttgatttggctttacttactaggaagcctggaattcattatttttttccttttatgtgccactgtggctactttaaatcactctgagaggtaaatggatataggattgaagttatgtgggtatttggcatgtgtgtgtgaaataaatatgtagatagtcacatatacacagactgagagataaattgttcttgattgctttattatcatcatactagtgtgttcattatagagtatctgtagaggtgaatgtaaaagtaagtccaatctattttcttatgtcattgaatttgtagtgttaacttgcatatatgttattggatgggttgtcttttaaagcatttactaatgtactctgaaatttttaaaagccttcagatttgttttctagtcacttttttccatatcatttctaattatagtttatatccttaaaagaaggatgccacagtagtatgtaaaacccaaacaagtagaacccaagcaaataaaattatttaaaataattttaaagtggcttagtactgccagtcatgtaaattgattctgctgagggtcttataagaattgagatataacaatggtaaaacaagcattcaagcacttttacaaaattaccaaattcttaaaatgaagccacagctagacttgcatttcaggtattaaaattgctttcttaactgtcaagaatcacaaaataacaaatcatattatgagtgaatatggggagggcggggccaatcagtcaatgataatctgaacaaattttaagagcagattttagattaataatgttttatcaccactaatttgcccacaacaaactcagtatttaatttttcaaattaaatattaaattatttaagtattttaaataattaaaacattaaatggcaacaccatagaatataggtgttctctggacctattctaaccacttaaaattatcttaagtatgcatacataaaagcaaccactatgagaactaccgtgttagtggtttttcacttactgtatattacccttgtaggaatagtttaaggaaattcatttcttaaaaatatagtgtcctcaaataattaatttttttgcaaactttagttattacaggcagcaaaaaccactgtctgaaactaaatctgtgttcaaagatgaagacccctcattaaaagccaaggacgttcttaagattggaactgacataattagtcttgacttacttcattaaagcaagattcaattc

SEQ ID NO: 15741 - DNA, 560 bp, Homo sapiens
  source 1..560: mol_type = unassigned DNA
ttaaaagggtgggagcgtccgggggcccatctctctcgggtggagtcttctgacagctggtgcgcctgcccgggaacatcctcctggactcaatcatggcttgtggtctggtcgccagcaacctgaatctcaaacctggagagtgccttcgagtgcgaggcgaggtggctcctgacgctaagagcttcgtgctgaacctgggcaaagacagcaacaacctgtgcctgcacttcaaccctcgcttcaacgcccacggcgacgccaacaccatcgtgtgcaacagcaaggacggcggggcctgggggaccgagcagcgggaggctgtctttcccttccagcctggaagtgttgcagaggtgtgcatcaccttcgaccaggccaacctgaccgtcaagctgccagatggatacgaattcaagttccccaaccgcctcaacctggaggccatcaactacatggcagctgacggtgacttcaagatcaaatgtgtggcctttgactgaaatcagccagcccatggcccccaataaaggcagctgcctctgctccctctgaaccag

SEQ ID NO: 15742 - DNA, 1667 bp, Homo sapiens
  source 1..1667: mol_type = unassigned DNA
acaaaccctcgttggccccacaggagccagcctctggcttctctctgcaatggccatgtgctgcagacccggagtgggtagttagttggttaatgccagtcttcctcccctggacactgagttctgctgacagcccccgcccagccagagctctgctgtataccaccgggagtggggctggtgtggagcctggaggtcgcccgctgccctcctagggctgctccagacagcattaaaacgctgcaggtcgcaggtgagactaacagctgggagagctgctccaggcatttaggaccctgactggggcagatgagtcagcccagtgggggcagggctcctggaacgaggatctacagttggagttgccccactgtcatgtcacctggagaaaaactggacccaattcctgacagcttcattctgcaaccaccagtcttccacccggtggttccttatgtcacgacgatttttggaggcctgcatgcaggcaagatggtcatgctgcaaggagtggtccctctagatgcacacaggtttcaggtggacttccagtgtggctgcagcctgtgtccccggccagatatcgccttccacttcaaccctcgcttccataccaccaagccccatgtcatctgcaacaccctgcatggtggacgctggcaaagggaggcccggtggccccacctggccctgcgaagaggctccagcttcctcatcctctttctcttcgggaatgaggaagtgaaggtgagtgtgaatggacagcactttctccacttccgctaccggctcccactgtctcatgtggacacgctgggtatatttggtgacatcctggtagaggctgttggattcctgaacatcaatccatttgtggagggcagcagagagtacccagctggacatgaggtgccctgctcacatgctcttccccagggtctctcgcctgggcaggtcatcatagtacggggactggtcttgcaagagccgaagcattttactgtgagcctgagggaccaggctgcccatgctcctgtgacactcagggcctccttcgcagacagaactctggcctggatctcccgctgggggcagaagaaactgatctcagcccccttcctcttttacccccagagattctttgaggtgctgctcctgttccaggagggagggctgaagctggcgctcaatgggcaggggctgggggccaccagcatgaaccagcaggccctggagcagctgcgggagctccggatcagtggaagtgtccagctctactgtgtccactcctgaggatggttccagggaaataccgccagaaaacaagaaggtcagcccactcccagggccccactctcctcccctcattaaaccatccacctgacaccagcacatcaggcctggttcacctctggggtcacgagactgagtctacaggagctttgggcctgagggaaggcacaagagtgcaaaggttcctcgaactctgcaccttcctccaccaggagcctgggatatggctccatctgccttcagggcctggactgcactcacagaggcaagtgttgtagactaacaaagatactccaaaatacaatggcttaaagaatgtggtcatttattctttattatttatttatttgtggtcaaataaataaataaggtta

SEQ ID NO: 15743 - DNA, 1425 bp, Homo sapiens
  source 1..1425: mol_type = unassigned DNA
tccaggcatttaggaccctgactggggcagatgagtcagcccagtgggggcagggctcctggaacgaggatctacagttggagttgccccactgtcatgtcacctggagaaaaactggacccaattcctgacagcttcattctgcaaccaccagtcttccacccggtggttccttatgtcacgacgatttttggaggcctgcatgcaggcaagatggtcatgctgcaaggagtggtccctctagatgcacacagtaggtttcaggtggacttccagtgtggctgcagcctgtgtccccggccagatatcgccttccacttcaaccctcgcttccataccaccaagccccatgtcatctgcaacaccctgcatggtggacgctggcaaagggaggcccggtggccccacctggccctgcgaagaggctccagcttcctcatcctctttctcttcgggaatgaggaagtgaaggtgagtgtgaatggacagcactttctccacttccgctaccggctcccactgtctcatgtggacacgctgggtatatttggtgacatcctggtagaggctgttggattcctgaacatcaatccatttgtggagggcagcagagagtacccagctggacatcctttcctgctgatgagccccaggctggaggtgccctgctcacatgctcttccccagggtctctcgcctgggcaggtcatcatagtacggggactggtcttgcaagagccgaagcattttactgtgagcctgagggaccaggctgcccatgctcctgtgacactcagggcctccttcgcagacagaactctggcctggatctcccgctgggggcagaagaaactgatctcagcccccttcctcttttacccccagagattctttgaggtgctgctcctgttccaggagggagggctgaagctggcgctcaatgggcaggggctgggggccaccagcatgaaccagcaggccctggagcagctgcgggagctccggatcagtggaagtgtccagctctactgtgtccactcctgaggatggttccagggaaataccgccagaaaacaagaaggtcagcccactcccagggccccactctcctcccctcattaaaccatccacctgacaccagcacatcaggcctggttcacctctggggtcacgagactgagtctacaggagctttgggcctgagggaaggcacaagagtgcaaaggttcctcgaactctgcaccttcctccaccaggagcctgggatatggctccatctgccttcagggcctggactgcactcacagaggcaagtgttgtagactaacaaagatactccaaaatacaatggcttaaagaatgtggtcatttattctttattatttatttatttgtggtcaaataaataaataaggttatttattt

SEQ ID NO: 15744 - DNA, 1618 bp, Homo sapiens
  source 1..1618: mol_type = unassigned DNA
cacaggagccagcctctggcttctctctgcaatggccatgtgctgcagacccggagtgggtagttagttggttaatgccagtcttcctcccctggacactgagttctgctgacagcccccgcccagccagagctctgctgtataccaccgggagtggggctggtgtggagcctggaggtcgcccgctgccctcctagggctgctccagacagcattaaaacgctgcaggtcgcaggtgagactaacagctgggagagctgctccaggcatttaggaccctgactggggcagatgagtcagcccagtgggggcagggctcctggaacgaggatctacagttggagttgccccactgtcatgtcacctggagaaaaactggacccaattcctgacagcttcattctgcaaccaccagtcttccacccggtggttccttatgtcacgacgatttttggaggcctgcatgcaggcaagatggtcatgctgcaaggagtggtccctctagatgcacacaggtttcaggtggacttccagtgtggctgcagcctgtgtccccggccagatatcgccttccacttcaaccctcgcttccataccaccaagccccatgtcatctgcaacaccctgcatggtggacgctggcaaagggaggcccggtggccccacctggccctgcgaagaggctccagcttcctcatcctctttctcttcgggaatgaggaagtgaaggtgagtgtgaatggacagcactttctccacttccgctaccggctcccactgtctcatgtggacacgctgggtatatttggtgacatcctggtagaggctgttggattcctgaacatcaatccatttgtggagggcagcagagagtacccagctggacatcctttcctgctgatgagccccaggctggaggtgccctgctcacatgctcttccccagggtctctcgcctgggcaggtcatcatagtacggggactggtcttgcaagagccgaagcattttactgtgagcctgagggaccaggctgcccatgctcctgtgacactcagggcctccttcgcagacagaactctggcctggatctcccgctgggggcagaagaaactgatctcagcccccttcctcttttacccccagagattctttgaggtgctgctcctgttccaggagggagggctgaagctggcgctcaatgggcaggggctgggggccaccagcatgaaccagcaggccctggagcagctgcgggagctccggatcagtggaagtgtccagctctactgtgtccactcctgaggatggttccagggaaataccgccagaaaacaagaaggtcagcccactcccagggccccactctcctcccctcattaaaccatccacctgacaccagcacatcaggcctggttcacctctggggtcacgagactgagtctacaggagctttgggcctgagggaaggcacaagagtgcaaaggttcctcgaactctgcaccttcctccaccaggagcctgggatatggctccatctgccttcagggcctggactgcactcacagaggcaagtgttgtagactaacaaagatactccaaaatacaatggcttaaagaa

SEQ ID NO: 15745 - DNA, 1816 bp, Homo sapiens
  source 1..1816: mol_type = unassigned DNA
cctcagcttcccagagtgctgagattacaggcatgagccacagagcccagcccaggtaacttctacatggggaaaggtgagcctgggaaggccattgttaagtgcctctccaggggtccatttcagagttagctgtcagttcctaacttgtccattcttcttgcctcccagttcctagtctccagccactcaacagtcctcagaaagccccagtaccaggcttctggggaccagggtgacatctagtggatggcaagcctccctggggtcactgcagcctgttgtgtcctaggagctggggaaaggcaactggctggtgctgaatttggcaagggagcggaatttgacttctctggtgtaatgcagctttgccgtgtgacggtccaggaaaggggattaggtggaagaaaatatttcagtgaacactgatttttacctataaggaattttctgtttggagaggaaaagttgagttttattctgctcctttcctcccactcgcctgacatagaggtccctaagccctttctccaaacctgcatggatgagtttcttttcttgttcaggtggttccttatgtcacgacgatttttggaggcctgcatgcaggcaagatggtcatgctgcaaggagtggtccctctagatgcacacaggtttcaggtggacttccagtgtggctgcagcctgtgtccccggccagatatcgccttccacttcaaccctcgcttccataccaccaagccccatgtcatctgcaacaccctgcatggtggacgctggcaaagggaggcccggtggccccacctggccctgcgaagaggctccagcttcctcatcctctttctcttcgggaatgaggaagtgaaggtgagtgtgaatggacagcactttctccacttccgctaccggctcccactgtctcatgtggacacgctgggtatatttggtgacatcctggtagaggctgttggattcctgaacatcaatccatttgtggagggcagcagagagtacccagctggacatcctttcctgctgatgagccccaggctggaggtgccctgctcacatgctcttccccagggtctctcgcctgggcaggtcatcatagtacggggactggtcttgcaagagccgaagcattttactgtgagcctgagggaccaggctgcccatgctcctgtgacactcagggcctccttcgcagacagaactctggcctggatctcccgctgggggcagaagaaactgatctcagcccccttcctcttttacccccagagattctttgaggtgctgctcctgttccaggagggagggctgaagctggcgctcaatgggcaggggctgggggccaccagcatgaaccagcaggccctggagcagctgcgggagctccggatcagtggaagtgtccagctctactgtgtccactcctgaggatggttccagggaaataccgccagaaaacaagaaggtcagcccactcccagggccccactctcctcccctcattaaaccatccacctgacaccagcacatcaggcctggttcacctctggggtcacgagactgagtctacaggagctttgggcctgagggaaggcacaagagtgcaaaggttcctcgaactctgcaccttcctccaccaggagcctgggatatggctccatctgccttcagggcctggactgcactcacagaggcaagtgttgtagactaacaaagatactccaaaatacaatggcttaaagaatgtggtcatttattctttattatttatttatttgtggtcaaataaataaataaggtta

SEQ ID NO: 15746 - DNA, 1789 bp, Homo sapiens
  source 1..1789: mol_type = unassigned DNA
cctcagcttcccagagtgctgagattacaggcatgagccacagagcccagcccaggtaacttctacatggggaaaggtgagcctgggaaggccattgttaagtgcctctccaggggtccatttcagagttagctgtcagttcctaacttgtccattcttcttgcctcccagttcctagtctccagccactcaacagtcctcagaaagccccagtaccaggcttctggggaccagggtgacatctagtggatggcaagcctccctggggtcactgcagcctgttgtgtcctaggagctggggaaaggcaactggctggtgctgaatttggcaagggagcggaatttgacttctctggtgtaatgcagctttgccgtgtgacggtccaggaaaggggattaggtggaagaaaatatttcagtgaacactgatttttacctataaggaattttctgtttggagaggaaaagttgagttttattctgctcctttcctcccactcgcctgacatagaggtccctaagccctttctccaaacctgcatggatgagtttcttttcttgttcaggtggttccttatgtcacgacgatttttggaggcctgcatgcaggcaagatggtcatgctgcaaggagtggtccctctagatgcacacaggtttcaggtggacttccagtgtggctgcagcctgtgtccccggccagatatcgccttccacttcaaccctcgcttccataccaccaagccccatgtcatctgcaacaccctgcatggtggacgctggcaaagggaggcccggtggccccacctggccctgcgaagaggctccagcttcctcatcctctttctcttcgggaatgaggaagtgaaggtgagtgtgaatggacagcactttctccacttccgctaccggctcccactgtctcatgtggacacgctgggtatatttggtgacatcctggtagaggctgttggattcctgaacatcaatccatttgtggagggcagcagagagtacccagctggacatgaggtgccctgctcacatgctcttccccagggtctctcgcctgggcaggtcatcatagtacggggactggtcttgcaagagccgaagcattttactgtgagcctgagggaccaggctgcccatgctcctgtgacactcagggcctccttcgcagacagaactctggcctggatctcccgctgggggcagaagaaactgatctcagcccccttcctcttttacccccagagattctttgaggtgctgctcctgttccaggagggagggctgaagctggcgctcaatgggcaggggctgggggccaccagcatgaaccagcaggccctggagcagctgcgggagctccggatcagtggaagtgtccagctctactgtgtccactcctgaggatggttccagggaaataccgccagaaaacaagaaggtcagcccactcccagggccccactctcctcccctcattaaaccatccacctgacaccagcacatcaggcctggttcacctctggggtcacgagactgagtctacaggagctttgggcctgagggaaggcacaagagtgcaaaggttcctcgaactctgcaccttcctccaccaggagcctgggatatggctccatctgccttcagggcctggactgcactcacagaggcaagtgttgtagactaacaaagatactccaaaatacaatggcttaaagaatgtggtcatttattctttattatttatttatttgtggtcaaataaataaataaggtta

SEQ ID NO: 15747 - DNA, 599 bp, Homo sapiens
  source 1..599: mol_type = unassigned DNA
agaagactggactcaattctgaaggtcgccaagaaggagagaacaatgtcttctttacccgtgccatacaaactgcctgtgtctttgtctgttggttcctgcgtgataatcaaagggacaccaatccactcttttatcaatgacccacagctgcaggtggatttctacactgacatggatgaggattcagatattgccttccgtttccgagtgcactttggcaatcatgtggtcatgaacaggcgtgagtttgggatatggatgttggaggagacaacagactacgtgccctttgaggatggcaaacaatttgagctgtgcatctacgtacattacaatgagtatgagataaaggtcaatggcatacgcatttacggctttgtccatcgaatcccgccatcatttgtgaagatggtgcaagtgtcgagagatatctccctgacctcagtgtgtgtctgcaattgagggagatgatcacactcctcattgttgaggaatccctctttctacctgaccatgggattcccagaacctgctaacagaataatccctgctcacattttcccctacactttgtcattaaaacagcacgaaaactc

SEQ ID NO: 15748 - DNA, 589 bp, Homo sapiens
  source 1..589: mol_type = unassigned DNA
tgctgggtactgggagatgcaggcggggagacacaaggtagaaggggcaaagtcctcacctaggaccttgagggagttaatgtgtaatattctaggatataagcttgaccacgagttgagaccctgagcacaggcctccaggagccgctgggagctgccgccaggagctgtcaccatgacgggggaacttgaggttaagaacatggacatgaagccggggtcaaccctgaagatcacaggcagcatcgccgatggcactgatggctttgtaattaatctgggccaggggacagacaagctgaacctgcatttcaaccctcgcttcagcgaatccaccattgtctgcaactcattggacggcagcaactgggggcaagaacaacgggaagatcacctgtgcttcagcccagggtcagaggtcaagttcacagtgacctttgagagtgacaaattcaaggtgaagctgccagatgggcacgagctgacttttcccaacaggctgggtcacagccacctgagctacctgagcgtaaggggcgggttcaacatgtcctctttcaagttaaaagaataaaagacttccagccga

SEQ ID NO: 15749 - DNA, 406 bp, Homo sapiens
  source 1..406: mol_type = unassigned DNA
actttctagttgcgtgagtcctgggatccctaattccccacctgaaaaatggggtgagaacagaggttcccttgagaatgtactatgagcttataacgatgagggctgaagaaagtggtttgcaaagtgcagaatgcccttcagaaggtagccattgttaagaggacaaggttacagatgcaaggaagctgggctaagtgagggaggctgggagagctgtcaagcggctgcattgcggatataagcttgaccacgagttgagaccctgagcacaggcctccaggagccgctgggagctgccgccaggagctgtcaccatgacgggggaacttgaggttaagaacatggacatgaagccggggtcaaccctgaagatcacaggcagcatcgccgatggcactgatgg

SEQ ID NO: 15750 - DNA, 2257 bp, Homo sapiens
  source 1..2257: mol_type = unassigned DNA
aatcgaaagtagactcttttctgaagcatttcctgggatcagcctgaccacgctccatactgggagaggcttctgggtcaaaggaccagtctgcagagggatcctgtggctggaagcgaggaggctccacacggccgttgcagctaccgcagccaggatctgggcatccaggcacggccatgacccctccgaggctcttctgggtgtggctgctggttgcaggaacccaaggcgtgaacgatggtgacatgcggctggccgatgggggcgccaccaaccagggccgcgtggagatcttctacagaggccagtggggcactgtgtgtgacaacctgtgggacctgactgatgccagcgtcgtctgccgggccctgggcttcgagaacgccacccaggctctgggcagagctgccttcgggcaaggatcaggccccatcatgctggatgaggtccagtgcacgggaaccgaggcctcactggccgactgcaagtccctgggctggctgaagagcaactgcaggcacgagagagacgctggtgtggtctgcaccaatgaaaccaggagcacccacaccctggacctctccagggagctctcggaggcccttggccagatctttgacagccagcggggctgcgacctgtccatcagcgtgaatgtgcagggcgaggacgccctgggcttctgtggccacacggtcatcctgactgccaacctggaggcccaggccctgtggaaggagccgggcagcaatgtcaccatgagtgtggatgctgagtgtgtgcccatggtcagggaccttctcaggtacttctactcccgaaggattgacatcaccctgtcgtcagtcaagtgcttccacaagctggcctctgcctatggggccaggcagctgcagggctactgcgcaagcctctttgccatcctcctcccccaggacccctcgttccagatgcccctggacctgtatgcctatgcagtggccacaggggacgccctgctggagaagctctgcctacagttcctggcctggaacttcgaggccttgacgcaggccgaggcctggcccagtgtccccacagacctgctccaactgctgctgcccaggagcgacctggcggtgcccagcgagctggccctactgaaggccgtggacacctggagctggggggagcgtgcctcccatgaggaggtggagggcttggtggagaagatccgcttccccatgatgctccctgaggagctctttgagctgcagttcaacctgtccctgtactggagccacgaggccctgttccagaagaagactctgcaggccctggaattccacactgtgcccttccagttgctggcccggtacaaaggcctgaacctcaccgaggatacctacaagccccggatttacacctcgcccacctggagtgcctttgtgacagacagttcctggagtgcacggaagtcacaactggtctatcagtccagacgggggcctttggtcaaatattcttctgattacttccaagccccctctgactacagatactacccctaccagtccttccagactccacaacaccccagcttcctcttccaggacaagagggtgtcctggtccctggtctacctccccaccatccagagctgctggaactacggcttctcctgctcctcggacgagctccctgtcctgggcctcaccaagtctggcggctcagatcgcaccattgcctacgaaaacaaagccctgatgctctgcgaagggctcttcgtggcagacgtcaccgatttcgagggctggaaggctgcgattcccagtgccctggacaccaacagctcgaagagcacctcctccttcccctgcccggcagggcacttcaacggcttccgcacggtcatccgccccttctacctgaccaactcctcaggtgtggactagacggcgtggcccaagggtggtgagaaccggagaaccccaggacgccctcactgcaggctcccctcctcggcttccttcctctctgcaatgaccttcaacaaccggccaccagatgtcgccctactcacctgagcgctcagcttcaagaaattactggaaggcttccactagggtccaccaggagttctcccaccacctcaccagtttccaggtggtaagcaccaggacgccctcgaggttgctctgggatccccccacagcccctggtcagtctgcccttgtcactggtctgaggtcattaaaattacattgaggttcct

SEQ ID NO: 15751 - DNA, 2090 bp, Homo sapiens
  source 1..2090: mol_type = unassigned DNA
atactgggagaggcttctgggtcaaaggaccagtctgcagagggatcctgtggctggaagcgaggaggctccacacggccgttgcagctaccgcagccaggatctgggcatccaggcacggccatgacccctccgaggctcttctgggtgtggctgctggttgcaggaacccaaggcgtgaacgatggtgacatgcggctggccgatgggggcgccaccaaccagggccgcgtggagatcttctacagaggccagtggggcactgtgtgtgacaacctgtgggacctgactgatgccagcgtcgtctgccgggccctgggcttcgagaacgccacccaggctctgggcagagctgccttcgggcaaggatcaggccccatcatgctggccgactgcaagtccctgggctggctgaagagcaactgcaggcacgagagagacgctggtgtggtctgcaccaatgaaaccaggagcacccacaccctggacctctccagggagctctcggaggcccttggccagatctttgacagccagcggggctgcgacctgtccatcagcgtgaatgtgcagggcgaggacgccctgggcttctgtggccacacggtcatcctgactgccaacctggaggcccaggccctgtggaaggagccgggcagcaatgtcaccatgagtgtggatgctgagtgtgtgcccatggtcagggaccttctcaggtacttctactcccgaaggattgacatcaccctgtcgtcagtcaagtgcttccacaagctggcctctgcctatggggccaggcagctgcagggctactgcgcaagcctctttgccatcctcctcccccaggacccctcgttccagatgcccctggacctgtatgcctatgcagtggccacaggggacgccctgctggagaagctctgcctacagttcctggcctggaacttcgaggccttgacgcaggccgaggcctggcccagtgtccccacagacctgctccaactgctgctgcccaggagcgacctggcggtgcccagcgagctggccctactgaaggccgtggacacctggagctggggggagcgtgcctcccatgaggaggtggagggcttggtggagaagatccgcttccccatgatgctccctgaggagctctttgagctgcagttcaacctgtccctgtactggagccacgaggccctgttccagaagaagactctgcaggccctggaattccacactgtgcccttccagttgctggcccggtacaaaggcctgaacctcaccgaggatacctacaagccccggatttacacctcgcccacctggagtgcctttgtgacagacagttcctggagtgcacggaagtcacaactggtctatcagtccagacgggggcctttggtcaaatattcttctgattacttccaagccccctctgactacagatactacccctaccagtccttccagactccacaacaccccagcttcctcttccaggacaagagggtgtcctggtccctggtctacctccccaccatccagagctgctggaactacggcttctcctgctcctcggacgagctccctgtcctgggcctcaccaagtctggcggctcagatcgcaccattgcctacgaaaacaaagccctgatgctctgcgaagggctcttcgtggcagacgtcaccgatttcgagggctggaaggctgcgattcccagtgccctggacaccaacagctcgaagagcacctcctccttcccctgcccggcagggcacttcaacggcttccgcacggtcatccgccccttctacctgaccaactcctcaggtgtggactagacggcgtggcccaagggtggtgagaaccggagaaccccaggacgccctcactgcaggctcccctcctcggcttccttcctctctgcaatgaccttcaacaaccggccaccagatgtcgccctactcacctgagcgctcagcttcaagaaattactggaaggcttccactagggtccaccaggagttctcccaccacctcaccagtttccaggtggtaagcaccaggacgccctcgaggttgctct

SEQ ID NO: 15752 - DNA, 494 bp, Homo sapiens
  source 1..494: mol_type = unassigned DNA
acggctgcccaacccggtcccagccatgtccaacgtcccccacaagtcctcactgcccgagggcatccgccctggcacggtgctgagaattcgcggcttggttcctcccaatgccagcaggttccatgtaaacctgctgtgcggggaggagcagggctccgatgccgcgctgcatttcaacccccggctggacacgtcggaggtggtcttcaacagcaaggagcaaggctcctggggccgcgaggagcgcgggccgggcgttcctttccagcgcgggcagcccttcgaggtgctcatcatcgcgtcagacgacggcttcaaggccgtggttggggacgcccagtaccaccacttccgccaccgcctgccgctggcgcgcgtgcgcctggtggaggtgggcggggacgtgcagctggactccgtgaggatcttctgagcagaagcccaggcgggcccggggccttggctggcaaataaagcgttagcccgcagcg

SEQ ID NO: 15753 - DNA, 2437 bp, Homo sapiens
  source 1..2437: mol_type = unassigned DNA
tggacttggatccgaggcagacgaggaagctgagaaaaccctggcgttgaccccgtggacctgggcgccccgggaaggccagcgcttggtccaggcaggcggggcctgtgcggtgaccaccctggtcctgaaaagtcccagccccgagcgccctccctcctagacctggaggcctggaacagccagccgcccacggacgccagagccgggaaccctgacggcacttagctgctgacaaacaacctgctccgtggagcgcctgaaacaccagtctttggggccagtgcctcagtttcaatccaggtaacctttaaatgaaacttgcctaaaatcttaggtcatacacagaagagactccaatcgacaagaagctggaaaagaatgatgttgtccttaaacaacctacagaatatcatctataacccggtaatcccgtttgttggcaccattcctgatcagctggatcctggaactttgattgtgatacgtgggcatgttcctagtgacgcagacagattccaggtggatctgcagaatggcagcagcatgaaacctcgagccgatgtggcctttcatttcaatcctcgtttcaaaagggccggctgcattgtttgcaatactttgataaatgaaaaatggggacgggaagagatcacctatgacacgcctttcaaaagagaaaagtcttttgagatcgtgattatggtgctgaaggacaaattccaggtggctgtaaatggaaaacatactctgctctatggccacaggatcggcccagagaaaatagacactctgggcatttatggcaaagtgaatattcactcaattggttttagcttcagctcggacttacaaagtacccaagcatctagtctggaactgacagagataagtagagaaaatgttccaaagtctggcacgccccagcttaggctgccattcgctgcaaggttgaacacccccatgggccctggacgaactgtcgtcgttaaaggagaagtgaatgcaaatgccaaaagctttaatgttgacctactagcaggaaaatcaaaggatattgctctacacttgaacccacgcctgaatattaaagcatttgtaagaaattcttttcttcaggagtcctggggagaagaagagagaaatattacctctttcccatttagtcctgggatgtactttgagatgataatttattgtgatgttagagaattcaaggttgcagtaaatggcgtacacagcctggagtacaaacacagatttaaagagctcagcagtattgacacgctggaaattaatggagacatccacttactggaagtaaggagctggtagcctacctacacagctgctacaaaaaccaaaatacagaatggcttctgtgatactggccttgctgaaacgcatctcactgtcattctattgtttatattgttaaaatgagcttgtgcaccattaggtcctgctgggtgttctcagtccttgccatgaagtatggtggtgtctagcactgaatggggaaactgggggcagcaacacttatagccagttaaagccactctgccctctctcctactttggctgactcttcaagaatgccattcaacaagtatttatggagtacctactataatacagtagctaacatgtattgagcacagattttttttggtaaaactgtgaagagctaggatatatacttggtgaaacaaaccagtatgttccctgttctcttgagcttcgactcttctgtgcgctactgctgcgcactgctttttctacaggcattacatcaactcctaaggggtcctctgggattagttatgcagatattaaatcacccgaagacactaacttacagaagacacaactccttccccagtgatcactgtcataaccagtgctctaccgtatcccatcactgaggactgatgttgactgacatcattttctttatcgtaataaacatgtggctctattagctgcaagctttaccaagtaattggcatgacatctgagcacagaaattaaggcaaaaaaccaaagcaaaacaaatacatggtgctgaaattaacttgatgccaagcccaaggcagctgatttctgtgtatttgaacttagggcaaatcagagtctacacagacgcctacagaaagtttcaggaagaggcaagatgcattcaatttgaaagatatttatgggcaacaaagtaaggtcaggattagacttcaggcattcataaggcaggcactatcagaaagtgtacgccaactaagggacccacaaagcaggcagaggtaatgcagaaatctgttttgttcccatgaaatcaccaatcaaggcctccgttcttctaaagattagtccatcatcattagcaactgagatcaaagcactcttccactttacgtgattaaaatcaaacctgtatcagcaa

SEQ ID NO: 15754 - DNA, 1402 bp, Homo sapiens
  source 1..1402: mol_type = unassigned DNA
gatcctgtagaacttcggagattggggaagataatcggaagaggtagaagacaccgtccatgacacttcctggggaagcagatgtatgtataaggatggccagtgcctcagtttcaatccaggtaacctttaaatgaaacttgcctaaaatcttaggtcatacacagaagagactccaatcgacaagaagctggaaaagaatgatgttgtccttaaacaacctacagaatatcatctataacccggtaatcccgtttgttggcaccattcctgatcagctggatcctggaactttgattgtgatacgtgggcatgttcctagtgacgcagacagattccaggtggatctgcagaatggcagcagcatgaaacctcgagccgatgtggcctttcatttcaatcctcgtttcaaaagggccggctgcattgtttgcaatactttgataaatgaaaaatggggacgggaagagatcacctatgacacgcctttcaaaagagaaaagtcttttgagatcgtgattatggtgctgaaggacaaattccaggtggctgtaaatggaaaacatactctgctctatggccacaggatcggcccagagaaaatagacactctgggcatttatggcaaagtgaatattcactcaattggttttagcttcagctcggacttacaaagtacccaagcatctagtctggaactgacagagataagtagagaaaatgttccaaagtctggcacgccccagcttcctagtaatagaggaggagacatttctaaaatcgcacccagaactgtctacaccaagagcaaagattcgactgtcaatcacactttgacttgcaccaaaataccacctatgaactatgtgtcaaagaggctgccattcgctgcaaggttgaacacccccatgggccctggacgaactgtcgtcgttaaaggagaagtgaatgcaaatgccaaaagctttaatgttgacctactagcaggaaaatcaaaggatattgctctacacttgaacccacgcctgaatattaaagcatttgtaagaaattcttttcttcaggagtcctggggagaagaagagagaaatattacctctttcccatttagtcctgggatgtactttgagatgataatttattgtgatgttagagaattcaaggttgcagtaaatggcgtacacagcctggagtacaaacacagatttaaagagctcagcagtattgacacgctggaaattaatggagacatccacttactggaagtaaggagctggtagcctacctacacagctgctacaaaaaccaaaatacagaatggcttctgtgatactggccttgctgaaacgcatctcactgtcattctattgtttatattgttaaaatgagcttgtgcaccatt

SEQ ID NO: 15755 - DNA, 1284 bp, Homo sapiens
  source 1..1284: mol_type = unassigned DNA
aaacaacctgctccgtggagcgcctgaaacaccagtctttggggccagtgcctcagtttcaatccaggtaacctttaaatgaaacttgcctaaaatcttaggtcatacacagaagagactccaatcgacaagaagctggaaaagaatgatgttgtccttaaacaacctacagaatatcatctataacccggtaatcccgtttgttggcaccattcctgatcagctggatcctggaactttgattgtgatacgtgggcatgttcctagtgacgcagacagattccaggtggatctgcagaatggcagcagcatgaaacctcgagccgatgtggcctttcatttcaatcctcgtttcaaaagggccggctgcattgtttgcaatactttgataaatgaaaaatggggacgggaagagatcacctatgacacgcctttcaaaagagaaaagtcttttgagatcgtgattatggtgctgaaggacaaattccaggtggctgtaaatggaaaacatactctgctctatggccacaggatcggcccagagaaaatagacactctgggcatttatggcaaagtgaatattcactcaattggttttagcttcagctcggacttacaaagtacccaagcatctagtctggaactgacagagataagtagagaaaatgttccaaagtctggcacgccccagcttagactgtctctcccctcctgggatttacagggtcatggctctgaaacattccgtagtgttctttggacacgagttttcgagatcgctttctgcaggcctcttggtactgtggcttcttttcagaggctgccattcgctgcaaggttgaacacccccatgggccctggacgaactgtcgtcgttaaaggagaagtgaatgcaaatgccaaaagctttaatgttgacctactagcaggaaaatcaaaggatattgctctacacttgaacccacgcctgaatattaaagcatttgtaagaaattcttttcttcaggagtcctggggagaagaagagagaaatattacctctttcccatttagtcctgggatgtactttgagatgataatttattgtgatgttagagaattcaaggttgcagtaaatggcgtacacagcctggagtacaaacacagatttaaagagctcagcagtattgacacgctggaaattaatggagacatccacttactggaagtaaggagctggtagcctacctacacagctgctacaaaaaccaaaatacagaatggcttctgtgatactggccttgc

SEQ ID NO: 15756 - DNA, 4369 bp, Homo sapiens
  source 1..4369: mol_type = unassigned DNA
tagacctggaggcctggaacagccaggtggacgtcggcccacctttcttttctttccttcccattttcctaccacctcccaccccactccgccttccgggcaaaggcagccagatccacccaggacacattctttgtccttatccctctgtgctcgtcccacagcaagccagtcgcggtccaaggctccagaggctgtgcaggaggccgagctgggtggcgatcagcggcgggtccctgtccaaaacccagcagagccgccagggacgccccagacacagaaggcggggcgcggggagggtggggagaccacagcagtgaggcgcgcgagccgggaagtgaacgaggactgactcctgtcgcttcccgtagccgcccacggacgccagagccgggaaccctgacggcacttagctgctgacaaacaacctgctccgtggagcgcctgaaacaccagtctttggggccagtgcctcagtttcaatccaggtaacctttaaatgaaacttgcctaaaatcttaggtcatacacagaagagactccaatcgacaagaagctggaaaagaatgatgttgtccttaaacaacctacagaatatcatctataacccggtaatcccgtttgttggcaccattcctgatcagctggatcctggaactttgattgtgatacgtgggcatgttcctagtgacgcagacagattccaggtggatctgcagaatggcagcagcatgaaacctcgagccgatgtggcctttcatttcaatcctcgtttcaaaagggccggctgcattgtttgcaatactttgataaatgaaaaatggggacgggaagagatcacctatgacacgcctttcaaaagagaaaagtcttttgagatcgtgattatggtgctgaaggacaaattccaggtggctgtaaatggaaaacatactctgctctatggccacaggatcggcccagagaaaatagacactctgggcatttatggcaaagtgaatattcactcaattggttttagcttcagctcggacttacaaagtacccaagcatctagtctggaactgacagagataagtagagaaaatgttccaaagtctggcacgccccagcttaggctgccattcgctgcaaggttgaacacccccatgggccctggacgaactgtcgtcgttaaaggagaagtgaatgcaaatgccaaaagctttaatgttgacctactagcaggaaaatcaaaggatattgctctacacttgaacccacgcctgaatattaaagcatttgtaagaaattcttttcttcaggagtcctggggagaagaagagagaaatattacctctttcccatttagtcctgggatgtactttgagatgataatttattgtgatgttagagaattcaaggttgcagtaaatggcgtacacagcctggagtacaaacacagatttaaagagctcagcagtattgacacgctggaaattaatggagacatccacttactggaagtaaggagctggtagcctacctacacagctgctacaaaaaccaaaatacagaatggcttctgtgatactggccttgctgaaacgcatctcactgtcattctattgtttatattgttaaaatgagcttgtgcaccattaggtcctgctgggtgttctcagtccttgccatgaagtatggtggtgtctagcactgaatggggaaactgggggcagcaacacttatagccagttaaagccactctgccctctctcctactttggctgactcttcaagaatgccattcaacaagtatttatggagtacctactataatacagtagctaacatgtattgagcacagattttttttggtaaaactgtgaagagctaggatatatacttggtgaaacaaaccagtatgttccctgttctcttgagcttcgactcttctgtgcgctactgctgcgcactgctttttctacaggcattacatcaactcctaaggggtcctctgggattagttatgcagatattaaatcacccgaagacactaacttacagaagacacaactccttccccagtgatcactgtcataaccagtgctctaccgtatcccatcactgaggactgatgttgactgacatcattttctttatcgtaataaacatgtggctctattagctgcaagctttaccaagtaattggcatgacatctgagcacagaaattaaggcaaaaaaccaaagcaaaacaaatacatggtgctgaaattaacttgatgccaagcccaaggcagctgatttctgtgtatttgaacttagggcaaatcagagtctacacagacgcctacagaaagtttcaggaagaggcaagatgcattcaatttgaaagatatttatgggcaacaaagtaaggtcaggattagacttcaggcattcataaggcaggcactatcagaaagtgtacgccaactaagggacccacaaagcaggcagaggtaatgcagaaatctgttttgttcccatgaaatcaccaatcaaggcctccgttcttctaaagattagtccatcatcattagcaactgagatcaaagcactcttccactttacgtgattaaaatcaaacctgtatcagcaagttaaatggttccatttctgtgatttttctattatttgaggggagttggcagaagttccatgtatatgggatctttacaggtcagatcttgttacaggaaatttcaaaggtttgggagtggggagggaaaaaagctcagtcagtgaggatcattttatcacattagactggggcagaactctgccaggatttaggaatattttcagaacagattttagatattatttctatccatatattgaaaagaataccattgtcaatcttatttttttaaaagtactcagtgtagaaatcgctagcccttaattcttttccagcttttcatattaatgtatgcagagtctcaccaagctcaaagacactggttgggggtggagggtgccacagggaaagctgtagaaggcaagaagactcgagaatcccccagagttatttttctccataaagaccatcagagtgcttaactgagctgttggagactgtgaggcatttaggaaaaaaatagcccactcacatcattccttgtaagtcttaagttcattttcattttacgtggaggaaaaaaatttaaaaagctattagtatttattaatgaattttactgagacatttcttagaaatatgcacttctatactagcaagctctgtctctaaaatgcaagttggccttttgcttgccacatttctgcattaaacttctatattagcttcaaaggcttttaaactcaatgcgaacattctacgggatgttcttagatgcctttaaaaagggggcagatctaattttatttgaaccctcactttccaacttcaccatgacccagtactagagattagggcacttcaaagcattgaaaaaaatctactgatacttactttcttagacaagtagttcttagttaaccaccaatggaactgggttcattctgaatcctggaggagcttcctcgtgccacccagtgtttctgggccctctgtgtgagcagccaggtgtgagctgttttagaagcagcgtgttgccttcatctctcccgtttcccaaaagaacaaaggataaaggtgacagtcacactcctgggttaaaaaaagcattccagaaccacttctctttatgggcacaacaaagaaacgaaggctgaagttcgcctacccaaaatgaaaagtaggctttacagtcaaaagtacttctgttgattgctaaataacttcattttcttgaaatagagcaactttgagtgaaatctgcaacatggataccatgtatgtaagatactgctgtacagaagagttaaggcttacagtgcaaatgaggcgtcagctttgggtgctaaaattaacaagtctaatattattaccatcaatcaggaagagaataataaatgtttaaacaaacacagcagtctgtataaaaataccgtgtatcatttactctttctgcagctctatacgataggcaggagaggcttatgtggcagcacaagccaggtggggattttgtaaagaagtgataaaacatttgtaagtaatccaagtaggtgtattaaggcaccaaaagtaacatggcacccaacacccaaaaataaaaatatgaaatatgagtgtgaactctgagtagagtatgaaacaccacagaaagtcttagaaatagctctggagtggctctcccaggacagtttccagttgctgaatagtcttttggcactgatgttctacttcttcacattcatctaaaaaaaaaaaaaaaaaa

SEQ ID NO: 15757 - DNA, 1035 bp, Homo sapiens
  source 1..1035: mol_type = unassigned DNA
ctgtagaacttcggagattggggaagataatcggaagaggtagaagacaccgtccatgacacttcctggggaagcagatgtatgtataaggatccgcccacggacgccagagccgggaaccctgacggcacttagctgctgacaaacaacctgctccgtggagcgcctgaaacaccagtctttggatggagtctcgttctgttgcccaggctggagtgcagtggcacaatctcggctcacttcaacctccgtctcccaggttcaagcaattctcctgtctcagcctcctgagtagctgggactacagggccagtgcctcagtttcaatccaggtaacctttaaatgaaacttgcctaaaatcttaggtcatacacagaagagactccaatcgacaagaagctggaaaagaatgatgttgtccttaaacaacctacagaatatcatctataacccggtaatcccgtttgttggcaccattcctgatcagctggatcctggaactttgattgtgatacgtgggcatgttcctagtgacgcagacagattccaggtggatctgcagaatggcagcagcatgaaacctcgagccgatgtggcctttcatttcaatcctcgtttcaaaagggccggctgcattgtttgcaatactttgataaatgaaaaatggggacgggaagagatcacctatgacacgcctttcaaaagagaaaagtcttttgagatcgtgattatggtgctgaaggacaaattccaggtggctgtaaatggaaaacatactctgctctatggccacaggatcggcccagagaaaatagacactctgggcatttatggcaaagtgaatattcactcaattggttttagcttcagctcggacttacaaagtacccaagcatctagtctggaactgacagagataagtagagaaaatgttccaaagtctggcacgccccagcttcctagtaatagaggaggagacatttctaaaatcgcacccagaactgtctacaccaagagcaaagattcgactgtca

SEQ ID NO: 15758 - DNA, 1110 bp, Homo sapiens
  source 1..1110: mol_type = unassigned DNA
aaacaacctgctccgtggagcgcctgaaacaccagtctttggggccagtgcctcagtttcaatccaggtaacctttaaatgaaacttgcctaaaatcttaggtcatacacagaagagactccaatcgacaagaagctggaaaagaatgatgttgtccttaaacaacctacagaatatcatctataacccggtaatcccgtttgttggcaccattcctgatcagctggatcctggaactttgattgtgatacgtgggcatgttcctagtgacgcagacagattccaggtggatctgcagaatggcagcagcatgaaacctcgagccgatgtggcctttcatttcaatcctcgtttcaaaagggccggctgcattgtttgcaatactttgataaatgaaaaatggggacgggaagagatcacctatgacacgcctttcaaaagagaaaagtcttttgagatcgtgattatggtgctgaaggacaaattccaggttccaaagtctggcacgccccagcttcctagtaatagaggaggagacatttctaaaatcgcacccagaactgtctacaccaagagcaaagattcgactgtcaatcacactttgacttgcaccaaaataccacctatgaactatgtgtcaaagaggctgccattcgctgcaaggttgaacacccccatgggccctggacgaactgtcgtcgttaaaggagaagtgaatgcaaatgccaaaagctttaatgttgacctactagcaggaaaatcaaaggatattgctctacacttgaacccacgcctgaatattaaagcatttgtaagaaattcttttcttcaggagtcctggggagaagaagagagaaatattacctctttcccatttagtcctgggatgtactttgagatgataatttattgtgatgttagagaattcaaggttgcagtaaatggcgtacacagcctggagtacaaacacagatttaaagagctcagcagtattgacacgctggaaattaatggagacatccacttactggaagtaaggagctggtagcctacctacacagctgctacaaaaaccaaaatacagaatggcttctgtgatactggccttgc

SEQ ID NO: 15759 - DNA, 2996 bp, Homo sapiens
  source 1..2996: mol_type = unassigned DNA
tggacttggatccgaggcagacgaggaagctgagaaaaccctggcgttgaccccgtggacctgggcgccccgggaaggccagcgcttggtccaggcaggcggggcctgtgcggtgaccaccctggtcctgaaaagtcccagccccgagcgccctccctcctagacctggaggcctggaacagccagccgcccacggacgccagagccgggaaccctgacggcacttagctgctgacaaacaacctgctccgtggagcgcctgaaacaccagtctttggggccagtgcctcagtttcaatccaggtaacctttaaatgaaacttgcctaaaatcttaggtcatacacagaagagactccaatcgacaagaagctggaaaagaatgatgttgtccttaaacaacctacagaatatcatctataacccggtaatcccgtttgttggcaccattcctgatcagctggatcctggaactttgattgtgatacgtgggcatgttcctagtgacgcagacagattccaggtggatctgcagaatggcagcagcatgaaacctcgagccgatgtggcctttcatttcaatcctcgtttcaaaagggccggctgcattgtttgcaatactttgataaatgaaaaatggggacgggaagagatcacctatgacacgcctttcaaaagagaaaagtcttttgagatcgtgattatggtgctgaaggacaaattccaggtggctgtaaatggaaaacatactctgctctatggccacaggatcggcccagagaaaatagacactctgggcatttatggcaaagtgaatattcactcaattggttttagcttcagctcggacttacaaagtacccaagcatctagtctggaactgacagagataagtagagaaaatgttccaaagtctggcacgccccagcttcctagtaatagaggaggagacatttctaaaatcgcacccagaactgtctacaccaagagcaaagattcgactgtcaatcacactttgacttgcaccaaaataccacctatgaactatgtgtcaaagaggctgccattcgctgcaaggttgaacacccccatgggccctggacgaactgtcgtcgttaaaggagaagtgaatgcaaatgccaaaagctttaatgttgacctactagcaggaaaatcaaaggatattgctctacacttgaacccacgcctgaatattaaagcatttgtaagaaattcttttcttcaggagtcctggggagaagaagagagaaatattacctctttcccatttagtcctgggatgtactttgagatgataatttattgtgatgttagagaattcaaggttgcagtaaatggcgtacacagcctggagtacaaacacagatttaaagagctcagcagtattgacacgctggaaattaatggagacatccacttactggaagtaaggagctggtagcctacctacacagctgctacaaaaaccaaaatacagaatggcttctgtgatactggccttgctgaaacgcatctcactgtcattctattgtttatattgttaaaatgagcttgtgcaccattaggtcctgctgggtgttctcagtccttgccatgaagtatggtggtgtctagcactgaatggggaaactgggggcagcaacacttatagccagttaaagccactctgccctctctcctactttggctgactcttcaagaatgccattcaacaagtatttatggagtacctactataatacagtagctaacatgtattgagcacagattttttttggtaaaactgtgaagagctaggatatatacttggtgaaacaaaccagtatgttccctgttctcttgagcttcgactcttctgtgcgctactgctgcgcactgctttttctacaggcattacatcaactcctaaggggtcctctgggattagttatgcagatattaaatcacccgaagacactaacttacagaagacacaactccttccccagtgatcactgtcataaccagtgctctaccgtatcccatcactgaggactgatgttgactgacatcattttctttatcgtaataaacatgtggctctattagctgcaagctttaccaagtaattggcatgacatctgagcacagaaattaaggcaaaaaaccaaagcaaaacaaatacatggtgctgaaattaacttgatgccaagcccaaggcagctgatttctgtgtatttgaacttagggcaaatcagagtctacacagacgcctacagaaagtttcaggaagaggcaagatgcattcaatttgaaagatatttatgggcaacaaagtaaggtcaggattagacttcaggcattcataaggcaggcactatcagaaagtgtacgccaactaagggacccacaaagcaggcagaggtaatgcagaaatctgttttgttcccatgaaatcaccaatcaaggcctccgttcttctaaagattagtccatcatcattagcaactgagatcaaagcactcttccactttacgtgattaaaatcaaacctgtatcagcaagttaaatggttccatttctgtgatttttctattatttgaggggagttggcagaagttccatgtatatgggatctttacaggtcagatcttgttacaggaaatttcaaaggtttgggagtggggagggaaaaaagctcagtcagtgaggatcattttatcacattagactggggcagaactctgccaggatttaggaatattttcagaacagattttagatattatttctatccatatattgaaaagaataccattgtcaatcttatttttttaaaagtactcagtgtagaaatcgctagcccttaattcttttccagcttttcatattaatgtatgcagagtctcaccaagctcaaagacactggttgggggtggagggtgccacagggaaagctgtagaaggcaagaagactcgagaatcccccagagttat

SEQ ID NO: 15760 - DNA, 846 bp, Homo sapiens
  source 1..846: mol_type = unassigned DNA
atagttctagaagcttgtttctcccacctgaaaagactggatttgggacatgatcctgtagaacttcggagattggggaagataatcggaagaggtagaagacaccgtccatgacacttcctggggaagcagatgtatgtataaggatccgcccacggacgccagagccgggaaccctgacggcacttagctgctgacaaacaacctgctccgtggagcgcctgaaacaccagtctttggggccagtgcctcagtttcaatccaggtaacctttaaatgaaacttgcctaaaatcttaggtcatacacagaagagactccaatcgacaagaagctggaaaagaatgatgttgtccttaaacaacctacagaatatcatctataacccggtaatcccgtttgttggcaccattcctgatcagctggatcctggaactttgattgtgatacgtgggcatgttcctagtgacgcagacagattccaggtggatctgcagaatggcagcagcatgaaacctcgagccgatgtggcctttcatttcaatcctcgtttcaaaagggccggctgcattgtttgcaatactttgataaatgaaaaatggggacgggaagagatcacctatgacacgcctttcaaaagagaaaagtcttttgagatcgtgattatggtgctgaaggacaaattccaggtggctgtaaatggaaaacatactctgctctatggccacaggatcggcccagagaaaatagacactctgggcatttatggcaaagtgaatattcactcaattggttttagcttcagctcggacttacaaagtacccaagcatctagtctggaactgac

SEQ ID NO: 15761 - DNA, 799 bp, Homo sapiens
  source 1..799: mol_type = unassigned DNA
attttgtctttacattttacataatttcagatacattttcctcatatcaaataattcagcattttttagtactaacatcatagtctgtaagccattcaaaaaatgtatttcacaaaataggctatctcatcctttgagctattgagatgaattaatttatactcctcctaagatccctctcgtcactaagattcttttattttatgacaaaaccatagttctagaagcttgtttctcccacctgaaaagactggatttgggacatgatcctgtagaacttcggagccgcccacggacgccagagccgggaaccctgacggcacttagctgctgacaaacaacctgctccgtggagcgcctgaaacaccagtctttggggccagtgcctcagtttcaatccaggtaacctttaaatgaaacttgcctaaaatcttaggtcatacacagaagagactccaatcgacaagaagctggaaaagaatgatgttgtccttaaacaacctacagaatatcatctataacccggtaatcccgtttgttggcaccattcctgatcagctggatcctggaactttgattgtgatacgtgggcatgttcctagtgacgcagacagattccaggtggatctgcagaatggcagcagcatgaaacctcgagccgatgtggcctttcatttcaatcctcgtttcaaaagggccggctgcattgtttgcaatactttgataaatgaaaaatggggacgggaagagatcacctatgacacgcctttcaaaagagaaaagtcttttgagatcgtga

SEQ ID NO: 15762 - DNA, 6420 bp, Homo sapiens
  source 1..6420: mol_type = unassigned DNA
agaacttcggagattggggaagataatcggaagaggtagaagacaccgtccatgacacttcctggggaagcagatgtatgtataaggataggtgtgtactgtcaaaaagcagcgcctccaagtctcttctggcactgtctggacttggatccgaggcagacgaggaagctgagaaaaccctggcgttgaccccgtggacctgggcgccccgggaaggccagcgcttggtccaggcaggcggggcctgtgcggtgaccaccctggtcctgaaaagtcccagccccgagcgccctccctcctagacctggaggcctggaacagccagccgcccacggacgccagagccgggaaccctgacggcacttagctgctgacaaacaacctgctccgtggagcgcctgaaacaccagtctttggggccagtgcctcagtttcaatccaggtaacctttaaatgaaacttgcctaaaatcttaggtcatacacagaagagactccaatcgacaagaagctggaaaagaatgatgttgtccttaaacaacctacagaatatcatctataacccggtaatcccgtttgttggcaccattcctgatcagctggatcctggaactttgattgtgatacgtgggcatgttcctagtgacgcagacagattccaggtggatctgcagaatggcagcagcatgaaacctcgagccgatgtggcctttcatttcaatcctcgtttcaaaagggccggctgcattgtttgcaatactttgataaatgaaaaatggggacgggaagagatcacctatgacacgcctttcaaaagagaaaagtcttttgagatcgtgattatggtgctgaaggacaaattccaggtggctgtaaatggaaaacatactctgctctatggccacaggatcggcccagagaaaatagacactctgggcatttatggcaaagtgaatattcactcaattggttttagcttcagctcggacttacaaagtacccaagcatctagtctggaactgacagagataagtagagaaaatgttccaaagtctggcacgccccagcttcctagtaatagaggaggagacatttctaaaatcgcacccagaactgtctacaccaagagcaaagattcgactgtcaatcacactttgacttgcaccaaaataccacctatgaactatgtgtcaaagaggctgccattcgctgcaaggttgaacacccccatgggccctggacgaactgtcgtcgttaaaggagaagtgaatgcaaatgccaaaagctttaatgttgacctactagcaggaaaatcaaaggatattgctctacacttgaacccacgcctgaatattaaagcatttgtaagaaattcttttcttcaggagtcctggggagaagaagagagaaatattacctctttcccatttagtcctgggatgtactttgagatgataatttattgtgatgttagagaattcaaggttgcagtaaatggcgtacacagcctggagtacaaacacagatttaaagagctcagcagtattgacacgctggaaattaatggagacatccacttactggaagtaaggagctggtagcctacctacacagctgctacaaaaaccaaaatacagaatggcttctgtgatactggccttgctgaaacgcatctcactgtcattctattgtttatattgttaaaatgagcttgtgcaccattaggtcctgctgggtgttctcagtccttgccatgaagtatggtggtgtctagcactgaatggggaaactgggggcagcaacacttatagccagttaaagccactctgccctctctcctactttggctgactcttcaagaatgccattcaacaagtatttatggagtacctactataatacagtagctaacatgtattgagcacagattttttttggtaaaactgtgaagagctaggatatatacttggtgaaacaaaccagtatgttccctgttctcttgagcttcgactcttctgtgcgctactgctgcgcactgctttttctacaggcattacatcaactcctaaggggtcctctgggattagttatgcagatattaaatcacccgaagacactaacttacagaagacacaactccttccccagtgatcactgtcataaccagtgctctaccgtatcccatcactgaggactgatgttgactgacatcattttctttatcgtaataaacatgtggctctattagctgcaagctttaccaagtaattggcatgacatctgagcacagaaattaaggcaaaaaaccaaagcaaaacaaatacatggtgctgaaattaacttgatgccaagcccaaggcagctgatttctgtgtatttgaacttagggcaaatcagagtctacacagacgcctacagaaagtttcaggaagaggcaagatgcattcaatttgaaagatatttatgggcaacaaagtaaggtcaggattagacttcaggcattcataaggcaggcactatcagaaagtgtacgccaactaagggacccacaaagcaggcagaggtaatgcagaaatctgttttgttcccatgaaatcaccaatcaaggcctccgttcttctaaagattagtccatcatcattagcaactgagatcaaagcactcttccactttacgtgattaaaatcaaacctgtatcagcaagttaaatggttccatttctgtgatttttctattatttgaggggagttggcagaagttccatgtatatgggatctttacaggtcagatcttgttacaggaaatttcaaaggtttgggagtggggagggaaaaaagctcagtcagtgaggatcattttatcacattagactggggcagaactctgccaggatttaggaatattttcagaacagattttagatattatttctatccatatattgaaaagaataccattgtcaatcttatttttttaaaagtactcagtgtagaaatcgctagcccttaattcttttccagcttttcatattaatgtatgcagagtctcaccaagctcaaagacactggttgggggtggagggtgccacagggaaagctgtagaaggcaagaagactcgagaatcccccagagttatttttctccataaagaccatcagagtgcttaactgagctgttggagactgtgaggcatttaggaaaaaaatagcccactcacatcattccttgtaagtcttaagttcattttcattttacgtggaggaaaaaaatttaaaaagctattagtatttattaatgaattttactgagacatttcttagaaatatgcacttctatactagcaagctctgtctctaaaatgcaagttggccttttgcttgccacatttctgcattaaacttctatattagcttcaaaggcttttaaactcaatgcgaacattctacgggatgttcttagatgcctttaaaaagggggcagatctaattttatttgaaccctcactttccaacttcaccatgacccagtactagagattagggcacttcaaagcattgaaaaaaatctactgatacttactttcttagacaagtagttcttagttaaccaccaatggaactgggttcattctgaatcctggaggagcttcctcgtgccacccagtgtttctgggccctctgtgtgagcagccaggtgtgagctgttttagaagcagcgtgttgccttcatctctcccgtttcccaaaagaacaaaggataaaggtgacagtcacactcctgggttaaaaaaagcattccagaaccacttctctttatgggcacaacaaagaaacgaaggctgaagttcgcctacccaaaatgaaaagtaggctttacagtcaaaagtacttctgttgattgctaaataacttcattttcttgaaatagagcaactttgagtgaaatctgcaacatggataccatgtatgtaagatactgctgtacagaagagttaaggcttacagtgcaaatgaggcgtcagctttgggtgctaaaattaacaagtctaatattattaccatcaatcaggaagagaataataaatgtttaaacaaacacagcagtctgtataaaaataccgtgtatcatttactctttctgcagctctatacgataggcaggagaggcttatgtggcagcacaagccaggtggggattttgtaaagaagtgataaaacatttgtaagtaatccaagtaggtgtattaaggcaccaaaagtaacatggcacccaacacccaaaaataaaaatatgaaatatgagtgtgaactctgagtagagtatgaaacaccacagaaagtcttagaaatagctctggagtggctctcccaggacagtttccagttgctgaatagtcttttggcactgatgttctacttcttcacattcatctaaaaaaaaaaaaaaaaaatcaaaattaaaatctgagtcagtccgcctgcctcggttctcattagtttaattcttaatgccttgcactttccggcaatcattcaatcaaaagagtgaaatgaagcacattaacaaagcaggaggcgccacggaccgcctccctccacaccgctccttccgccttcattccttgcccacaggcttgcactggaagctgaataagaatccccaaaactcaaacttcctagggatgccacccctttagtagctcacacctcccccctccaagagctaagaaacaaaggagaatgtacttttgtagcttagataagcaatgaatcagtaaaggactgatctacttgctccaccacccctcccttaataataacatttactgttatttcctgggcctaagactctatgttccagaactgtcacagctccccatgtcacactcactagcttgtgatctttgtcaaataactgaaatcttttaagcctctagtttcttcctttgtaaaacagagataaaatgttgtggtttttaagtgagataatccaagtaaagcacctaacatggagtagtgaatgaacatcggttgctactaaaagtggacatcctactgcatccttaatgccactaggcatttccatacaatctggggaccaaaacttcaatcatataaatgtatgaggttaattaaaaacactactgtaatctgcttgtatgatcacaaaccaccacaaaagaaaagatcgtgaagattacactgtaaacggactctcaaatgatcaggaggtggtcacttcgcaacttgctccctccacccaactcaaaacaggagctcgagcctgcctgtatttgagactggagctgcctgtatgaggactggatcaactgctagtcacgttatatccaaatctgcattatcattgggcacattttcacagaattttactgaattattccttaattgtttaatggttgggaatagtttgggaattaccttccatcaactctgctaagaaaggaatggattctggtagcaagacaatataattctcctttagtttttcagccagtgctaacacagtaatcaaagcagcaaatcgaacctgaaagggataaaagagcaaagaaataaaaagtagtgttactgtatttattatcttaagagctgtactgacttgagacaagctctaactttttaaacattagttcacatgcgtttattcacttcattatgttcattaagctttcatcttagaataccagtttcaccatttgggagctgtttgtaatatgtgcaaccttataaatagtgttttccaaactgtgtcccaggactgcaaatctttaatgtgaaatgtctttttataatctcttcctttaaaaaaaaccaataaaataaaatgccgcatgcaaactcaagtgtgtcaccagattttacttcattggcgctcgccagcccgccaggctggcaataaagtgcctccagccacctctggcaggtctcctcacccacagcccctgactggtcaccactataattgtatgaggggccaggacagtcgcttgggataaactcccatctcagcactgaataaaaaacattctgtgtcacaatatcctagttttggggctttaaaaacgtctaggtgttcctcacatgccttgtctataataaggaaagcaagcagtagttgggtattgttagcttttgaaacaaaagccctactggtcttctaattttggatattttaattaaagaatatctggacagtacaaagtgaattattaaaaaaccatttgtaactacctagattcaatcaggatttccttgatttgtgcaaagtaaaatattacaataaatttgatactgctacttgtataaaaacctatggtttaaaatgtgggggttcatcataatagtctcattgttagcatatcctaataaagaatttgaactaataaatcctattaataaaa

SEQ ID NO: 15763 - DNA, 1852 bp, Homo sapiens
  source 1..1852: mol_type = unassigned DNA
gacttcctttgaccgtacgtgaaacttaagtgatggctgcttgtgatgcatacgaagtgttcatgctggcgggacctgtccctggggatacttcgggggttgcgtgatttaatgcaagcagatggcttaaattgggtcactggcttgttattatacatgtggccagtgcctcagtttcaatccaggtaacctttaaatgaaacttgcctaaaatcttaggtcatacacagaagagactccaatcgacaagaagctggaaaagaatgatgttgtccttaaacaacctacagaatatcatctataacccggtaatcccgtttgttggcaccattcctgatcagctggatcctggaactttgattgtgatacgtgggcatgttcctagtgacgcagacagattccaggtggatctgcagaatggcagcagcatgaaacctcgagccgatgtggcctttcatttcaatcctcgtttcaaaagggccggctgcattgtttgcaatactttgataaatgaaaaatggggacgggaagagatcacctatgacacgcctttcaaaagagaaaagtcttttgagatcgtgattatggtgctgaaggacaaattccaggtggctgtaaatggaaaacatactctgctctatggccacaggatcggcccagagaaaatagacactctgggcatttatggcaaagtgaatattcactcaattggttttagcttcagctcggacttacaaagtacccaagcatctagtctggaactgacagagataagtagagaaaatgttccaaagtctggcacgccccagcttaggctgccattcgctgcaaggttgaacacccccatgggccctggacgaactgtcgtcgttaaaggagaagtgaatgcaaatgccaaaagctttaatgttgacctactagcaggaaaatcaaaggatattgctctacacttgaacccacgcctgaatattaaagcatttgtaagaaattcttttcttcaggagtcctggggagaagaagagagaaatattacctctttcccatttagtcctgggatgtactttgagatgataatttattgtgatgttagagaattcaaggttgcagtaaatggcgtacacagcctggagtacaaacacagatttaaagagctcagcagtattgacacgctggaaattaatggagacatccacttactggaagtaaggagctggtagcctacctacacagctgctacaaaaaccaaaatacagaatggcttctgtgatactggccttgctgaaacgcatctcactgtcattctattgtttatattgttaaaatgagcttgtgcaccattaggtcctgctgggtgttctcagtccttgccatgaagtatggtggtgtctagcactgaatggggaaactgggggcagcaacacttatagccagttaaagccactctgccctctctcctactttggctgactcttcaagaatgccattcaacaagtatttatggagtacctactataatacagtagctaacatgtattgagcacagattttttttggtaaaactgtgaagagctaggatatatacttggtgaaacaaaccagtatgttccctgttctcttgagcttcgactcttctgtgcgctactgctgcgcactgctttttctacaggcattacatcaactcctaaggggtcctctgggattagttatgcagatattaaatcacccgaagacactaacttacagaagacacaactccttccccagtgatcactgtcataaccagtgctctaccgtatcccatcactgaggactgatgttgactgacatcattttctttatcgtaataaacatg

SEQ ID NO: 15764 - DNA, 1349 bp, Homo sapiens
  source 1..1349: mol_type = unassigned DNA
acctgaaaagactggatttgggacatgatcctgtagaacttcggagggccagtgcctcagtttcaatccaggtaacctttaaatgaaacttgcctaaaatcttaggtcatacacagaagagactccaatcgacaagaagctggaaaagaatgatgttgtccttaaacaacctacagaatatcatctataacccggtaatcccgtttgttggcaccattcctgatcagctggatcctggaactttgattgtgatacgtgggcatgttcctagtgacgcagacagattccaggtggatctgcagaatggcagcagcatgaaacctcgagccgatgtggcctttcatttcaatcctcgtttcaaaagggccggctgcattgtttgcaatactttgataaatgaaaaatggggacgggaagagatcacctatgacacgcctttcaaaagagaaaagtcttttgagatcgtgattatggtgctgaaggacaaattccaggtggctgtaaatggaaaacatactctgctctatggccacaggatcggcccagagaaaatagacactctgggcatttatggcaaagtgaatattcactcaattggttttagcttcagctcggacttacaaagtacccaagcatctagtctggaactgacagagataagtagagaaaatgttccaaagtctggcacgccccagcttcctagtaatagaggaggagacatttctaaaatcgcacccagaactgtctacaccaagagcaaagattcgactgtcaatcacactttgacttgcaccaaaataccacctatgaactatgtgtcaaagaggctgccattcgctgcaaggttgaacacccccatgggccctggacgaactgtcgtcgttaaaggagaagtgaatgcaaatgccaaaagctttaatgttgacctactagcaggaaaatcaaaggatattgctctacacttgaacccacgcctgaatattaaagcatttgtaagaaattcttttcttcaggagtcctggggagaagaagagagaaatattacctctttcccatttagtcctgggatgtactttgagatgataatttattgtgatgttagagaattcaaggttgcagtaaatggcgtacacagcctggagtacaaacacagatttaaagagctcagcagtattgacacgctggaaattaatggagacatccacttactggaagtaaggagctggtagcctacctacacagctgctacaaaaaccaaaatacagaatggcttctgtgatactggccttgctgaaacgcatctcactgtcattctattgtttatattgttaaaatgagcttgtgcacca

SEQ ID NO: 15765 - DNA, 554 bp, Homo sapiens
  source 1..554: mol_type = unassigned DNA
agatcatagggggtctggagggtgaaaaaaaagagtttggtgctcatggatggggctagtattggggtgtaggggagattaggtcaaagcaagaggattcaaaggagaaatgaattcctttagattggggaagataatcggaagaggtagaagacaccgtccatgacacttcctggggaagcagatgtatgtataaggatatggagtctcgttctgttgcccaggctggagtgcagtggcacaatctcggctcacttcaacctccgtctcccaggttcaagcaattctcctgtctcagcctcctgagtagctgggactacagggccagtgcctcagtttcaatccaggtaacctttaaatgaaacttgcctaaaatcttaggtcatacacagaagagactccaatcgacaagaagctggaaaagaatgatgttgtccttaaacaacctacagaatatcatctataacccggtaatcccgtttgttggcaccattcctgatcagctggatcctggaactttgattgtgatacgtgggcatgttcctagtgacgca

SEQ ID NO: 15766 - DNA, 3018 bp, Homo sapiens
  source 1..3018: mol_type = unassigned DNA
tgtttgttaaattatatgtagggacagggtcttccaacctttcccgagctggtctcaagctcctgggctgaagtgatcctcctgcctcagcctctcaaagtgctggtattataggcataagccaccacgccctgcccatttttctaagttggattattttacactccagtctgctgtgaatgagagttccagttgttgcgtatcgcaatcaatttgtgattgcctacaaatgatgtgccgtgatgaaattgtccctggtgtccgagaggatcgcaaagaatttcccttcctttctctcctttctgctccccttgtactgtctactccttaaactggtacttgatccaggaacataatggggatggacagtgcagatggcacacatggcctcagtctattggagcatctcaaaggaattagtctgcaaattctagtgcatctaggtggagcacaggaaggaagagaggtgcagactcacgtatggccctggggcacctgccatcctctcgcacccgtacagcccttacctgccagcacttaccctacccagcttgagttctgggccttctcaccagcacatcgctgggacctggtcgacttcaggtaagtttatttcatggctccctcccccacgacctgcacatgccatatgttccttcccagccccatgtcacttgaaatgttctatcatgtccaagacttctctcctcatcctaaagtgcagaaaataaggatggagaagagaaggagaagagaatcaagagagattcattgagagggaggatcagaagctcctgggcaccccatactgtagaataaaaatattcattatggtgtttttcttgcaaaatattcccctctacataattatgtttttacatgaataatataaatttaaacaggagaaatactttttgaagagtctgagaatcttcataaagttcaggcggccacgaattagctgtgtgacctggggcatgccccttagactctgagcctcagcttctctgtatgtaaaatgggttgaagccgcccttccccacaagcaccctgtgcacaggcaatgcccagccccattattttctggactccgtggccaagcatgcttaggacacacagccacatacttctgggcagtgtcatctggcaacttgctgtcatgtcagtgtggtcaagcattgtagacctctatgaaccaaatatgcttcaggcttgggttgagcacaggagagggaggagggaaaggtcactggggctgggagtgcctacttccctctgtgagtgtcaccccagtccacccagtaccatacctttctctctctggacccacttccttttgctgccggctcctccccattgaataacagccaagttgctttggtttctatttctttgttaagtcgttccctctacaaaggacttcctagtgggtgtgaaaggcagcggtggccacagaggcggcggagagatggccttcagcggttcccaggctccctacctgagtccagctgtccccttttctgggactattcaaggaggtctccaggacggacttcagatcactgtcaatgggaccgttctcagctccagtggaaccaggtttgctgtgaactttcagactggcttcagtggaaatgacattgccttccacttcaaccctcggtttgaagatggagggtacgtggtgtgcaacacgaggcagaacggaagctgggggcccgaggagaggaagacacacatgcctttccagaaggggatgccctttgacctctgcttcctggtgcagagctcagatttcaaggtgatggtgaacgggatcctcttcgtgcagtacttccaccgcgtgcccttccaccgtgtggacaccatctccgtcaatggctctgtgcagctgtcctacatcagcttccagcctcccggcgtgtggcctgccaacccggctcccattacccagacagtcatccacacagtgcagagcgcccctggacagatgttctctactcccgccatcccacctatgatgtacccccaccccgcctatccgatgcctttcatcaccaccattctgggagggctgtacccatccaagtccatcctcctgtcaggcactgtcctgcccagtgctcagaggttccacatcaacctgtgctctgggaaccacatcgccttccacctgaacccccgttttgatgagaatgctgtggtccgcaacacccagatcgacaactcctgggggtctgaggagcgaagtctgccccgaaaaatgcccttcgtccgtggccagagcttctcagtgtggatcttgtgtgaagctcactgcctcaaggtggccgtggatggtcagcacctgtttgaatactaccatcgcctgaggaacctgcccaccatcaacagactggaagtggggggcgacatccagctgacccatgtgcagacataggcggcttcctggccctggggccgggggctggggtgtggggcagtctgggtcctctcatcatccccacttcccaggcccagcctttccaaccctgcctgggatctgggctttaatgcagaggccatgtccttgtctggtcctgcttctggctacagccaccctggaacggagaaggcagctgacggggattgccttcctcagccgcagcagcacctggggctccagctgctggaatcctaccatcccaggaggcaggcacagccagggagaggggaggagtgggcagtgaagatgaagccccatgctcagtcccctcccatcccccacgcagctccaccccagtcccaagccaccagctgtctgctcctggtgggaggtggcctcctcagcccctcctctctgacctttaacctcactctcaccttgcaccgtgcaccaacccttcacccctcctggaaagcaggcctgatggcttcccactggcctccaccacctgaccagagtgttctcttcagaggactggctcctttcccagtgtccttaaaataaagaaatgaaaatgcttgttggcacattca

SEQ ID NO: 15767 - DNA, 2975 bp, Homo sapiens
  source 1..2975: mol_type = unassigned DNA
tgtttgttaaattatatgtagggacagggtcttccaacctttcccgagctggtctcaagctcctgggctgaagtgatcctcctgcctcagcctctcaaagtgctggtattataggcataagccaccacgccctgcccatttttctaagttggattattttacactccagtctgctgtgaatgagagttccagttgttgcgtatcgcaatcaatttgtgattgcctacaaatgatgtgccgtgatgaaattgtccctggtgtccgagaggatcgcaaagaatttcccttcctttctctcctttctgctccccttgtactgtctactccttaaactggtacttgatccaggaacataatggggatggacagtgcagatggcacacatggcctcagtctattggagcatctcaaaggaattagtctgcaaattctagtgcatctaggtggagcacaggaaggaagagaggtgcagactcacgtatggccctggggcacctgccatcctctcgcacccgtacagcccttacctgccagcacttaccctacccagcttgagttctgggccttctcaccagcacatcgctgggacctggtcgacttcaggtaagtttatttcatggctccctcccccacgacctgcacatgccatatgttccttcccagccccatgtcacttgaaatgttctatcatgtccaagacttctctcctcatcctaaagtgcagaaaataaggatggagaagagaaggagaagagaatcaagagagattcattgagagggaggatcagaagctcctgggcaccccatactgtagaataaaaatattcattatggtgtttttcttgcaaaatattcccctctacataattatgtttttacatgaataatataaatttaaacaggagaaatactttttgaagagtctgagaatcttcataaagttcaggcggccacgaattagctgtgtgacctggggcatgccccttagactctgagcctcagcttctctgtatgtaaaatgggttgaagccgcccttccccacaagcaccctgtgcacaggcaatgcccagccccattattttctggactccgtggccaagcatgcttaggacacacagccacatacttctgggcagtgtcatctggcaacttgctgtcatgtcagtgtggtcaagcattgtagacctctatgaaccaaatatgcttcaggcttgggttgagcacaggagagggaggagggaaaggtcactggggctgggagtgcctacttccctctgtgagtgtcaccccagtccacccagtaccatacctttctctctctggacccacttccttttgctgccggctcctccccattgaataacagccaagttgctttggtttctatttctttgttaagtcgttccctctacaaaggacttcctagtgggtgtgaaaggcagcggtggccacagaggcggcggagagatggccttcagcggttcccaggctccctacctgagtccagctgtccccttttctgggactattcaaggaggtctccaggacggacttcagatcactgtcaatgggaccgttctcagctccagtggaaccaggtttgctgtgaactttcagactggcttcagtggaaatgacattgccttccacttcaaccctcggtttgaagatggagggtacgtggtgtgcaacacgaggcagaacggaagctgggggcccgaggagaggaagacacacatgcctttccagaaggggatgccctttgacctctgcttcctggtgcagagctcagatttcaaggtgatggtgaacgggatcctcttcgtgcagtacttccaccgcgtgcccttccaccgtgtggacaccatctccgtcaatggctctgtgcagctgtcctacatcagcttccagacccagacagtcatccacacagtgcagagcgcccctggacagatgttctctactcccgccatcccacctatgatgtacccccaccccgcctatccgatgcctttcatcaccaccattctgggagggctgtacccatccaagtccatcctcctgtcaggcactgtcctgcccagtgctcagaggttccacatcaacctgtgctctgggaaccacatcgccttccacctgaacccccgttttgatgagaatgctgtggtccgcaacacccagatcgacaactcctgggggtctgaggagcgaagtctgccccgaaaaatgcccttcgtccgtggccagagcttctcagtgtggatcttgtgtgaagctcactgcctcaaggtggccgtggatggtcagcacctgtttgaatactaccatcgcctgaggaacctgcccaccatcaacagactggaagtggggggcgacatccagctgacccatgtgcagacataggcggcttcctggccctggggccgggggctggggtgtggggcagtctgggtcctctcatcatccccacttcccaggcccagcctttccaaccctgcctgggatctgggctttaatgcagaggccatgtccttgtctggtcctgcttctggctacagccaccctggaacggagaaggcagctgacggggattgccttcctcagccgcagcagcacctggggctccagctgctggaatcctaccatcccaggaggcaggcacagccagggagaggggaggagtgggcagtgaagatgaagccccatgctcagtcccctcccatcccccacgcagctccaccccagtcccaagccaccagctgtctgctcctggtgggaggtggcctcctcagcccctcctctctgacctttaacctcactctcaccttgcaccgtgcaccaacccttcacccctcctggaaagcaggcctgatggcttcccactggcctccaccacctgaccagagtgttctcttcagaggactggctcctttcccagtgtccttaaaataaagaaatgaaaatgcttgttggc

SEQ ID NO: 15768 - DNA, 1378 bp, Homo sapiens
  source 1..1378: mol_type = unassigned DNA
tccccattgaataacagccaagttgctttggtttctatttctttgttaagtcgttccctctacaaaggacttcctagtgggtgtgaaaggcagcggtggccacagaggcggcggagagatggccttcagcggttcccaggctccctacctgagtccagctgtccccttttctgggactattcaaggaggtctccaggacggacttcagatcactgtcaatgggaccgttctcagctccagtggaaccaggtttgctgtgaactttcagactggcttcagtggaaatgacattgccttccacttcaaccctcggtttgaagatggagggtacgtggtgtgcaacacgaggcagaacggaagctgggggcccgaggagaggaagacacacatgcctttccagaaggggatgccctttgacctctgcttcctggtgcagagctcagatttcaaggtgatggtgaacgggatcctcttcgtgcagtacttccaccgcgtgcccttccaccgtgtggacaccatctccgtcaatggctctgtgcagctgtcctacatcagcttccagcctcccggcgtgtggcctgccaacccggctcccattacccagacagtcatccacacagtgcagagcgcccctggacagatgttctctactcccgccatcccacctatgatgtacccccaccccgcctatccgatgcctttcatcaccaccattctgggagggctgtacccatccaagtccatcctcctgtcaggcactgtcctgcccagtgctcagaggtgtggatcttgtgtgaagctcactgcctcaaggtggccgtggatggtcagcacctgtttgaatactaccatcgcctgaggaacctgcccaccatcaacagactggaagtggggggcgacatccagctgacccatgtgcagacataggcggcttcctggccctggggccgggggctggggtgtggggcagtctgggtcctctcatcatccccacttcccaggcccagcctttccaaccctgcctgggatctgggctttaatgcagaggccatgtccttgtctggtcctgcttctggctacagccaccctggaacggagaaggcagctgacggggattgccttcctcagccgcagcagcacctggggctccagctgctggaatcctaccatcccaggaggcaggcacagccagggagaggggaggagtgggcagtgaagatgaagccccatgctcagtcccctcccatcccccacgcagctccaccccagtcccaagccaccagctgtctgctcctggtgggaggtggcctcctcagcccctcctctctgacctttaacctcactctcaccttgcaccgtgcaccaacccttcacccct

SEQ ID NO: 15769 - DNA, 3114 bp, Homo sapiens
  source 1..3114: mol_type = unassigned DNA
tgtttgttaaattatatgtagggacagggtcttccaacctttcccgagctggtctcaagctcctgggctgaagtgatcctcctgcctcagcctctcaaagtgctggtattataggcataagccaccacgccctgcccatttttctaagttggattattttacactccagtctgctgtgaatgagagttccagttgttgcgtatcgcaatcaatttgtgattgcctacaaatgatgtgccgtgatgaaattgtccctggtgtccgagaggatcgcaaagaatttcccttcctttctctcctttctgctccccttgtactgtctactccttaaactggtacttgatccaggaacataatggggatggacagtgcagatggcacacatggcctcagtctattggagcatctcaaaggaattagtctgcaaattctagtgcatctaggtggagcacaggaaggaagagaggtgcagactcacgtatggccctggggcacctgccatcctctcgcacccgtacagcccttacctgccagcacttaccctacccagcttgagttctgggccttctcaccagcacatcgctgggacctggtcgacttcaggtaagtttatttcatggctccctcccccacgacctgcacatgccatatgttccttcccagccccatgtcacttgaaatgttctatcatgtccaagacttctctcctcatcctaaagtgcagaaaataaggatggagaagagaaggagaagagaatcaagagagattcattgagagggaggatcagaagctcctgggcaccccatactgtagaataaaaatattcattatggtgtttttcttgcaaaatattcccctctacataattatgtttttacatgaataatataaatttaaacaggagaaatactttttgaagagtctgagaatcttcataaagttcaggcggccacgaattagctgtgtgacctggggcatgccccttagactctgagcctcagcttctctgtatgtaaaatgggttgaagccgcccttccccacaagcaccctgtgcacaggcaatgcccagccccattattttctggactccgtggccaagcatgcttaggacacacagccacatacttctgggcagtgtcatctggcaacttgctgtcatgtcagtgtggtcaagcattgtagacctctatgaaccaaatatgcttcaggcttgggttgagcacaggagagggaggagggaaaggtcactggggctgggagtgcctacttccctctgtgagtgtcaccccagtccacccagtaccatacctttctctctctggacccacttccttttgctgccggctcctccccattgaataacagccaagttgctttggtttctatttctttgttaagtcgttccctctacaaaggacttcctagtgggtgtgaaaggcagcggtggccacagaggcggcggagagatggccttcagcggttcccaggctccctacctgagtccagctgtccccttttctgggactattcaaggaggtctccaggacggacttcagatcactgtcaatgggaccgttctcagctccagtggaaccaggtttgctgtgaactttcagactggcttcagtggaaatgacattgccttccacttcaaccctcggtttgaagatggagggtacgtggtgtgcaacacgaggcagaacggaagctgggggcccgaggagaggaagacacacatgcctttccagaaggggatgccctttgacctctgcttcctggtgcagagctcagatttcaaggtgatggtgaacgggatcctcttcgtgcagtacttccaccgcgtgcccttccaccgtgtggacaccatctccgtcaatggctctgtgcagctgtcctacatcagcttccagaacccccgcacagtccctgttcagcctgccttctccacggtgccgttctcccagcctgtctgtttcccacccaggcccagggggcgcagacaaaaacctcccggcgtgtggcctgccaacccggctcccattacccagacagtcatccacacagtgcagagcgcccctggacagatgttctctactcccgccatcccacctatgatgtacccccaccccgcctatccgatgcctttcatcaccaccattctgggagggctgtacccatccaagtccatcctcctgtcaggcactgtcctgcccagtgctcagaggttccacatcaacctgtgctctgggaaccacatcgccttccacctgaacccccgttttgatgagaatgctgtggtccgcaacacccagatcgacaactcctgggggtctgaggagcgaagtctgccccgaaaaatgcccttcgtccgtggccagagcttctcagtgtggatcttgtgtgaagctcactgcctcaaggtggccgtggatggtcagcacctgtttgaatactaccatcgcctgaggaacctgcccaccatcaacagactggaagtggggggcgacatccagctgacccatgtgcagacataggcggcttcctggccctggggccgggggctggggtgtggggcagtctgggtcctctcatcatccccacttcccaggcccagcctttccaaccctgcctgggatctgggctttaatgcagaggccatgtccttgtctggtcctgcttctggctacagccaccctggaacggagaaggcagctgacggggattgccttcctcagccgcagcagcacctggggctccagctgctggaatcctaccatcccaggaggcaggcacagccagggagaggggaggagtgggcagtgaagatgaagccccatgctcagtcccctcccatcccccacgcagctccaccccagtcccaagccaccagctgtctgctcctggtgggaggtggcctcctcagcccctcctctctgacctttaacctcactctcaccttgcaccgtgcaccaacccttcacccctcctggaaagcaggcctgatggcttcccactggcctccaccacctgaccagagtgttctcttcagaggactggctcctttcccagtgtccttaaaataaagaaatgaaaatgcttgttggcacattca

SEQ ID NO: 15770 - DNA, 1466 bp, Homo sapiens
  source 1..1466: mol_type = unassigned DNA
ctacaaaggacttcctagtgggtgtgaaaggcagcggtggccacagaggcggcggagagatggccttcagcggttcccaggctccctacctgagtccagctgtccccttttctgggactattcaaggaggtctccaggacggacttcagatcactgtcaatgggaccgttctcagctccagtggaaccagatggagggtacgtggtgtgcaacacgaggcagaacggaagctgggggcccgaggagaggaagacacacatgcctttccagaaggggatgccctttgacctctgcttcctggtgcagagctcagatttcaaggtgatggtgaacgggatcctcttcgtgcagtacttccaccgcgtgcccttccaccgtgtggacaccatctccgtcaatggctctgtgcagctgtcctacatcagcttccagaacccccgcacagtccctgttcagcctgccttctccacggtgccgttctcccagcctgtctgtttcccacccaggcccagggggcgcagacaaaaacctcccggcgtgtggcctgccaacccggctcccattacccagacagtcatccacacagtgcagagcgcccctggacagatgttctctactcccgccatcccacctatgatgtacccccaccccgcctatccgatgcctttcatcaccaccattctgggagggctgtacccatccaagtccatcctcctgtcaggcactgtcctgcccagtgctcagaggtgtggatcttgtgtgaagctcactgcctcaaggtggccgtggatggtcagcacctgtttgaatactaccatcgcctgaggaacctgcccaccatcaacagactggaagtggggggcgacatccagctgacccatgtgcagacataggcggcttcctggccctggggccgggggctggggtgtggggcagtctgggtcctctcatcatccccacttcccaggcccagcctttccaaccctgcctgggatctgggctttaatgcagaggccatgtccttgtctggtcctgcttctggctacagccaccctggaacggagaaggcagctgacggggattgccttcctcagccgcagcagcacctggggctccagctgctggaatcctaccatcccaggaggcaggcacagccagggagaggggaggagtgggcagtgaagatgaagccccatgctcagtcccctcccatcccccacgcagctccaccccagtcccaagccaccagctgtctgctcctggtgggaggtggcctcctcagcccctcctctctgacctttaacctcactctcaccttgcaccgtgcaccaacccttcacccctcctggaaagcaggcctgatggcttcccactggcctccaccacctgaccagagtgttctcttcagaggactggctcctttcccagtgtccttaaaataaagaaatgaaaatgcttgttggcac

SEQ ID NO: 15771 - DNA, 449 bp, Homo sapiens
  source 1..449: mol_type = unassigned DNA
acaaaggacttcctagtgggtgtgaaaggcagcggtggccacagaggcggcggagagatggccttcagcggttcccaggctccctacctgagtccagctgtccccttttctgggactattcaaggaggtctccaggacggacttcagatcactgtcaatgggaccgttctcagctccagtggaaccaggtttgctgtgaactttcagactggcttcagtggaaatgacattgccttccacttcaaccctcggtttgaagatggagggtacgtggtgtgcaacacgaggcagaacggaagctgggggcccgaggagaggaagacacacatgcctttccagaaggggatgccctttgacctctgcttcctggtgcagagctcagatttcaaggtgcacctgctgcttcttttactctgaaaataagaactagaggagtcatcacgttgcta

SEQ ID NO: 15772 - DNA, 4830 bp, Homo sapiens
  source 1..4830: mol_type = unassigned DNA
gccctcctccgcgttccagaatccaagatggcgggatccaggcaaaggggtctccgggccagagttcggccgctgttctgcgccttgctgctgtcactcggtcgcttcgtccggggcgacggcgtgggaggagaccccgcggtcgcgttgccacatcgccgtttcgagtacaaatacagcttcaaggggccgcacctggtgcagagcgacgggaccgtgcccttctgggcccacgcggggaatgctattccaagttcagatcaaattcgagtagcaccatctttaaaaagccaaagaggctcagtgtggacaaagacaaaagcggcctttgagaactgggaagttgaggtgacatttcgagtgactggaagaggtcgaattggagctgatggcctagcaatttggtatgcagaaaatcaaggcttggagggccctgtgtttggatcagctgatctgtggaatggtgttggaatattttttgattcttttgacaatgatggaaagaaaaataatcctgctatagtaattataggcaacaatggacaaatccattatgaccatcaaaatgacggggctagtcaagctttggcaagttgccagagggacttccgcaacaaaccctatcctgtccgagcaaagattacctattaccagaacacactgacagtaatgatcaataatggctttacaccagataaaaatgattatgaattttgtgccaaagtggaaaatatgattatccctgcacaagggcattttggaatatctgctgcaactggaggtcttgcagatgaccatgatgtcctttcttttctgactttccagttgactgaacctggaaaagagccgcccacaccagataaagaaatttcggaaaaggaaaaagaaaagtatcaggaggaatttgagcactttcaacaagaattggataaaaaaaaagaggaattccagaagggccaccccgacctccaagggcagcctgcggaggaaatatttgagagtgtaggagatcgagagctaagacaagtctttgaaggacagaatcgtattcatcttgaaatcaagcagctgaaccggcagttagatatgattcttgatgaacagagaagatatgtctcttccttaacagaggaaatctctaaaagaggagcaggaatgcctgggcagcatgggcagattactcaacaagaactggatactgttgtgaaaactcagcatgagattctgagacaagtaaatgaaatgaaaaattccatgagtgaaaccgtcagactggtcagtggaatgcagcaccctggctctgctggaggcgtctatgagacaacacagcacttcattgacatcaaagagcacctgcacatagtaaagagggacatagataacttagtgcagcgaaatatgccatcaaatgaaaagccgaaatgcccagaactaccaccatttccatcatgtttgtctacggtccacttcattatatttgttgtggtgcaaactgtattattcattggttatatcatgtataggtctcagcaagaagcagctgccaaaaaattcttttgactaccattttcctgtgtacttcatctatttgtgtacaaaatgatgtcgttttgagggaatttaagtatttaaattgcttcatagtctaaattattaattttcttaataaaataactgtttaaacattgatttgcagttaagaataaaccttaaagcaaagacaaccacattttaatttgttcacagtatgtaaatctgtctaaatttcagtgaatttctggtcagtatgatgcagcctctgagcagaatattgaccagtaagagggtaaataaagtgggggcaacccctggatatgaatgttaccccctaagtctccaatattgcaggtttccctgtataacgtaaacacacttgccctcatgcctcccagaatatgaggtctaattaagaagtcccatcaggtttattttgtaaccaaagtcttttttagaggtcagacttcctaatcaaaggcctgggcctgcagtcctttcatcttaatgcaacttcctttgaaatcaaagaatattttgtctgagagctttaaggatctggtaatagacttcaaaatgttaagtgaaatttttttttcctctatttatcaatgatatatttcacttttaaaggaaattttagaggaaaattaatagctgctttttgcctaaaaaaccttgtgggtggaaacattcctctgagaatggcttttataggtattttgcctggtaatgtattcattcatgattgcccatattcttgaatgtcttcattccaatggggtcaggtcaatattatgaaaataatttttatatttatatttgtaacttaaggaatttatttctccctttactacagcatgtaaattcagctcaaattgcatgatctgaggatttaaattcacaaaacctgccactacattctggtttacattagttacttcatgctggctggggttagtgaccatttgcatactcttttaaatcaaggaggctgtagtagaagcagttttaagattcttgaaggcaaaatttgaaaaacagtgaatacttctaattgtttccttttagtgccagaactaaggacattgtgaagcacttgttagtaaacttaaccttgaaatgtcagactggaaggagtttttatagtctttgtgcatacttctaggtattacagaaacagtctgtaaatgacattttaagatgcaaatttaattctgttcacagctgatttatactgatttttgctgccttcaaaatactcttttacttcttttagctaaaatggttgtctttcatttgccatagaattccaaacaatactatcttataaaatagtactgttgaattattccaagcctccctaggtttgctctcaaatgtcatttacagattgggctaacgacctaaaatctatatataaagactttctgaagaactctgtattatagcaataccaaacgagtgctgtgtgtgcaaacagtctggcgttgctttttatgttgatatttatcctagaacactgaaagagaatatgccagtgataactcactttacttcagtcatttcaacacagaaaatgcttctctagcatttttcttttgtagtgttaacattttgaaattcatgtttcagaggcttcatcatcacagaatttactcttgctccatgaaaaaaaattaaataccttcagaggaatatttaagttgtaaactatgaaacttgagaaatcctcttgagataaaaggctgccaaatccagtattataaagtccatggtcatatgtgcctgtgcattaaaggaataccagatctatgcagtatacatttttcaggctgaaattcaaggggaatcattctgattattcttactacaaatggagatggctattatgaaacagcatgagcatgagccttttatcttttatacttagtgatatactttgcttgaaaatcactcagcaaagtagttcacatgatgtgtatcatatttgaagtgtggtttttctcaaaatcattgactttaaggagctcatttctgaacaaaaaggtttgctctgtggaaaaatcaatcactgccaggattctttcatttctgtactattttgtataattgaatttgttcacttctctcacaccagcaagtgttttacaggtgccttggattaaaacaaaattgattttaaaatttttatgtaagtcattgtgtctatgatgccacttttaaaaggaaaatgcaattgcgtaatggcttatatccttatttaatgtacctatttgtgttctaataattgtttgaatgttttattcagcttaaaactttaccatgaagtcataaacagtaaacaatgttttgttatgtattaaggggatatcagtgtttctcaaagtatgatccatggaccatctgggtcatggcgcctggtttcagacaacctgaatcaaatcttaggggtggggctttgggatgtcattgttcaataggcacctcaggagattctgagcacaccaatgtttgagaaccactaaaatgaggagtgggaaaaaaaaaataggtgttttgttaatttagagctgagctgagaagataatatatttttattgtcaatgacattaacagatatgcactgattcttttatacctacaatttacttaatgttccttttattaaaacgcgtggttcatgagcaactacagactgaatccagattattacctgttgctttcagtattttcgtgatggcttttaatcttatgaaatcatcttgagatcattcatggtcaagccatgaaaactcccatcttcaagcctgcctgctaaagcttctttgccttcctgattgtgattatggtaacaatttatatcagacagttgtactttttgataacttagggaaaacagaaatgacttgaacaagggattgcctgcctcactgcattgcagagatacaatttttgtaaagaacacaaatagcagttgtgaatattaaggtgtgattatctttccctgtccatgtgcttattgaaagaagatagtgaacaaatgattatattgaggatttttttaatttataagatctaatgtgaaatccacacttggaactttttagatctgtctgttgcttgtttaatatatttcttttatgacattacttaaagtttaaaagggttttctatccactgtcaatttcaattggataacattttgtcaagttttttttttcctgattatttgatgctagctggaattcaagaaatggcattgaccttattcaaataaagaaatattttagtaaa

SEQ ID NO: 15773 - DNA, 1626 bp, Homo sapiens
  source 1..1626: mol_type = unassigned DNA
acatccagctgcctgagaccctcctgcagccttctcaagggacagccccactctgcctcttgctcctccagggcagcaccatgcagcccctgtggctctgctgggcactctgggtgttgcccctggccagccccggggccgccctgaccggggagcagctcctgggcagcctgctgcggcagctgcagctcaaagaggtgcccaccctggacagggccgacatggaggagctggtcatccccacccacgtgagggcccagtacgtggccctgctgcagcgcagccacggggaccgctcccgcggaaagaggttcagccagagcttccgagaggtggccggcaggttcctggcgttggaggccagcacacacctgctggtgttcggcatggagcagcggctgccgcccaacagcgagctggtgcaggccgtgctgcggctcttccaggagccggtccccaaggccgcgctgcacaggcacgggcggctgtccccgcgcagcgcccgggcccgggtgaccgtcgagtggctgcgcgtccgcgacgacggctccaaccgcacctccctcatcgactccaggctggtgtccgtccacgagagcggctggaaggccttcgacgtgaccgaggccgtgaacttctggcagcagctgagccggccccggcagccgctgctgctacaggtgtcggtgcagagggagcatctgggcccgctggcgtccggcgcccacaagctggtccgctttgcctcgcagggggcgccagccgggcttggggagccccagctggagctgcacaccctggaccttggggactatggagctcagggcgactgtgaccctgaagcaccaatgaccgagggcacccgctgctgccgccaggagatgtacattgacctgcaggggatgaagtgggccgagaactgggtgctggagcccccgggcttcctggcttatgagtgtgtgggcacctgccggcagcccccggaggccctggccttcaagtggccgtttctggggcctcgacagtgcatcgcctcggagactgactcgctgcccatgatcgtcagcatcaaggagggaggcaggaccaggccccaggtggtcagcctgcccaacatgagggtgcagaagtgcagctgtgcctcggatggtgcgctcgtgccaaggaggctccagccataggcgcctagtgtagccatcgagggacttgacttgtgtgtgtttctgaagtgttcgagggtaccaggagagctggcgatgactgaactgctgatggacaaatgctctgtgctctctagtgagccctgaatttgcttcctctgacaagttacctcacctaatttttgcttctcaggaatgagaatctttggccactggagagcccttgctcagttttctctattcttattattcactgcactatattctaagcacttacatgtggagatactgtaacctgagggcagaaagcccaatgtgtcattgtttacttgtcctgtcactggatctgggctaaagtcctccaccaccactctggacctaagacctggggttaagtgtgggttgtgcatccccaatccagataataaagactttgtaaaacatgaataaaacacattttattcta

SEQ ID NO: 15774 - DNA, 2287 bp, Homo sapiens
  source 1..2287: mol_type = unassigned DNA
cagggctggggtaaggccaggaaaattcaacaggcactaaaaatattgtcaagctgctgacagcacagccagaggccccaggcctgggtggcatccagacagccctgtcctttctagacagccccctcctccaggctcagggacctgtctggctgtgagctcccaggaggtcccaggggtgtgacctccctccctccctccctccctcttcccttcaccccaggccagcccagggccagctataaagctggcccagcctggctctcagcacacccagctgcctgagaccctccttcaacctccctagaggacagccccactctgcctcctgctcccccagggcagcaccatgtggcccctgtggctctgctgggcactctgggtgctgcccctggctggccccggggcggccctgaccgaggagcagctcctgggcagcctgctgcggcagctgcagctcagcgaggtgcccgtactggacagggccgacatggagaagctggtcatccccgcccacgtgagggcccagtatgtagtcctgctgcggcgcagccacggggaccgctcccgcggaaagaggttcagccagagcttccgagaggtggccggcaggttcctggcgtcggaggccagcacacacctgctggtgttcggcatggagcagcggctgccgcccaacagcgagctggtgcaggccgtgctgcggctcttccaggagccggtccccaaggccgcgctgcacaggcacgggcggctgtccccgcgcagcgcccaggcccgggtgaccgtcgagtggctgcgcgtccgcgacgacggctccaaccgcacctccctcatcgactccaggctggtgtccgtccacgagagcggctggaaggccttcgacgtgaccgaggccgtgaacttctggcagcagctgagccggccccggcagccgctgctgctacaggtgtcggtgcagagggagcatctgggcccgctggcgtccggcgcccacaagctggtccgctttgcctcgcagggggcgccagccgggcttggggagccccagctggagctgcacaccctggacctcagggactatggagctcagggcgactgtgaccctgaagcaccaatgaccgagggcacccgctgctgccgccaggagatgtacattgacctgcaggggatgaagtgggccaagaactgggtgctggagcccccgggcttcctggcttacgagtgtgtgggcacctgccagcagcccccggaggccctggccttcaattggccatttctggggccgcgacagtgtatcgcctcggagactgcctcgctgcccatgatcgtcagcatcaaggagggaggcaggaccaggccccaggtggtcagcctgcccaacatgagggtgcagaagtgcagctgtgcctcggatggggcgctcgtgccaaggaggctccagccataggcgcctggtgtatccattgagccctctaactgaacgtgtgcatagaggtggtcttaatgtaggtcttaactttatacttagcaagttactccatcccaatttagtgctcctgtgtgaccttcgccctgtgtccttccatttcctgtctttcccgtccatcacccatcctaagcacttacgtgagtaaataatgcagctcagatgctgagctctagtaggaaatgctggcatgctgattacaagatacagctgagcaatgcacacattttcagctgggagtttctgttctctggcaaattcttcactgagtctggaacaataataccctatgattagaactggggaaacagaactgaattgctgtgttatatgaggaattaaaaccttcaaatctctatttcccccaaatactgacccattctggacttttgtaaacatacctaggcccctgttcccctgagagggtgctaagaggaaggatgaagggcttcaggctgggggcagtggacagggaattgggatacctggattctggttctgacagggccacaagctaggatctctaacaaacgcagaaggctttggctcgtcatttcctcttaaaaaggaggagctgggcttcagctctaagaacttcattgccctggggatcagacagcccctacctacccctgcccactcctctggagactgagccttgcccgtgcatatttaggtcatttcccacactgtcttagagaacttgtcaccagaaaccacatgtatttgcatgttttttgttaatttagctaaagcaattgaatgtagatactcagaagaaataaaaaatgatgtttc

SEQ ID NO: 15775 - DNA, 2085 bp, Homo sapiens
  source 1..2085: mol_type = unassigned DNA
gtcctttctagacagccccctcctccaggctcagggacctgtctggctgtgagctcccaggaggtcccaggggtgtgacctccctccctccctccctccctcttcccttcaccccaggccagcccagggccagctataaagctggcccagcctggctctcagcacacccagctgcctgagaccctccttcaacctccctagaggacagccccactctgcctcctgctcccccagggcagcaccatgtggcccctgtggctctgctgggcactctgggtgctgcccctggctggccccggggcggccctgaccgaggagcagctcctgggcagcctgctgcggcagctgcagctcagcgaggtgcccgtactggacagggccgacatggagaagctggtcatccccgcccacgtgagggcccagtatgtagtcctgctgcggcgcagccacggggaccgctcccgcggaaagaggttcagccagagcttccgagaggtggccggcaggttcctggcgtcggaggccgcgctgcacaggcacgggcggctgtccccgcgcagcgcccaggcccgggtgaccgtcgagtggctgcgcgtccgcgacgacggctccaaccgcacctccctcatcgactccaggctggtgtccgtccacgagagcggctggaaggccttcgacgtgaccgaggccgtgaacttctggcagcagctgagccggccccggcagccgctgctgctacaggtgtcggtgcagagggagcatctgggcccgctggcgtccggcgcccacaagctggtccgctttgcctcgcagggggcgccagccgggcttggggagccccagctggagctgcacaccctggacctcagggactatggagctcagggcgactgtgaccctgaagcaccaatgaccgagggcacccgctgctgccgccaggagatgtacattgacctgcaggggatgaagtgggccaagaactgggtgctggagcccccgggcttcctggcttacgagtgtgtgggcacctgccagcagcccccggaggccctggccttcaattggccatttctggggccgcgacagtgtatcgcctcggagactgcctcgctgcccatgatcgtcagcatcaaggagggaggcaggaccaggccccaggtggtcagcctgcccaacatgagggtgcagaagtgcagctgtgcctcggatggggcgctcgtgccaaggaggctccagccataggcgcctggtgtatccattgagccctctaactgaacgtgtgcatagaggtggtcttaatgtaggtcttaactttatacttagcaagttactccatcccaatttagtgctcctgtgtgaccttcgccctgtgtccttccatttcctgtctttcccgtccatcacccatcctaagcacttacgtgagtaaataatgcagctcagatgctgagctctagtaggaaatgctggcatgctgattacaagatacagctgagcaatgcacacattttcagctgggagtttctgttctctggcaaattcttcactgagtctggaacaataataccctatgattagaactggggaaacagaactgaattgctgtgttatatgaggaattaaaaccttcaaatctctatttcccccaaatactgacccattctggacttttgtaaacatacctaggcccctgttcccctgagagggtgctaagaggaaggatgaagggcttcaggctgggggcagtggacagggaattgggatacctggattctggttctgacagggccacaagctaggatctctaacaaacgcagaaggctttggctcgtcatttcctcttaaaaaggaggagctgggcttcagctctaagaacttcattgccctggggatcagacagcccctacctacccctgcccactcctctggagactgagccttgcccgtgcatatttaggtcatttcccacactgtcttagagaacttgtcaccagaaaccacatgtatttgcatgttttttgttaatttagctaaagcaattgaatgtagatactcagaagaaataaaaaatgatgtttcactctg

SEQ ID NO: 15776 - DNA, 1760 bp, Homo sapiens
  source 1..1760: mol_type = unassigned DNA
gtcgtgggtgtttggtgtgaggctgcgagccgccgcgagttctcacggtcccgccggcgccaccaccgcggtcactcaccgccgccgccgccaccactgccaccacgtttcccttctcaggtgtctgcaattgaactccaaggtgcagaatggtttggaaagtagctgtattcctcagtgtggccctgggcattggtgccgttcctatagatgatcctgaagatggaggcaagcactgggtggtgatcgtggcaggttcaaatggctggtataattataggcaccaggcagacgcgtgccatgcctaccagatcattcaccgcaatgggattcctgacgaacagatcgttgtgatgatgtacgatgacattgcttactctgaagacaatcccactccaggaattgtgatcaacaggcccaatggcacagatgtctatcagggagtcccgaaggactacactggagaggatgttaccccacaaaatttccttgctgtgttgagaggcgatgcagaagcagtgaagggcataggatccggcaaagtcctgaagagtggcccccaggatcacgtgttcatttacttcactgaccatggatctactggaatactggtttttcccaatgaagatcttcatgtaaaggacctgaatgagaccatccattacatgtacaaacacaaaatgtaccgaaagatggtgttctacattgaagcctgtgagtctgggtccatgatgaaccacctgccggataacatcaatgtttatgcaactactgctgccaaccccagagagtcgtcctacgcctgttactatgatgagaagaggtccacgtacctgggggactggtacagcgtcaactggatggaagattcggacgtggaagatctgactaaagagaccctgcacaagcagtaccacctggtaaaatcgcacaccaacaccagccacgtcatgcagtatggaaacaaaacaatctccaccatgaaagtgatgcagtttcagggtatgaaacgcaaagccagttctcccgtccccctacctccagtcacacaccttgacctcacccccagccctgatgtgcctctcaccatcatgaaaaggaaactgatgaacaccaatgatctggaggagtccaggcagctcacggaggagatccagcggcatctggattacgagtatgcgttgagacatttgtacgtgctggtcaacctttgtgagaagccgtatccgcttcacaggataaaattgtccatggaccacgtgtgccttggtcactactgaagagctgcctcctggaagcttttccaagtgtgagcgccccaccgactgtgtgctgatcagagactggagaggtggagtgagaagtctccgctgctcgggccctcctggggagcccccgctccagggctcgctccaggaccttcttcacaagatgacttgctcgctgttacctgcttccccagtcttttctgaaaaactacaaattagggtgggaaaagctctgtattgagaagggtcatatttgctttctaggaggtttgttgttttgcctgttagttttgaggagcaggaagctcatgggggcttctgtagcccctctcaaaaggagtctttattctgagaatttgaagctgaaacctctttaaatcttcagaatgattttattgaagagggccgcaagccccaaatggaaaactgtttttagaaaatatgatgatttttgattgcttttgtatttaattctgcaggtgttcaagtctt

SEQ ID NO: 15777 - DNA, 1689 bp, Homo sapiens
  source 1..1689: mol_type = unassigned DNA
gtgggtgtttggtgtgaggctgcgagccgccgcgagttctcacggtcccgccggcgccaccaccgcggtcactcaccgccgccgccgccaccactgccaccacgtttcccttctcaggtgtctgcaattgaactccaaggtgcagaatggtttggaaagtagctgtattcctcagtgtggccctgggcattggtgccgttcctatagatgatcctgaagatggaggcaagcactgggtggtgatcgtggcaggttcaaatggctggtataattataggcaccaggcagacgcgtgccatgcctaccagatcattcaccgcaatgggattcctgacgaacagatcgttgtgatgatgtacgatgacattgcttactctgaagacaatcccactccaggaattgtgatcaacaggcccaatggcacagatgtctatcagggagtcccgaaggactacactggagaggatgttaccccacaaaatttccttgctgtgttgagaggcgatgcagaagcagtgaagggcataggatccggcaaagtcctgaagagtggcccccaggatcacgtgttcatttacttcactgaccatggatctactggaatactggtttttcccaatgaagatcttcatgtaaaggacctgaatgagaccatccattacatgtacaaacacaaaatgtaccgaaagatggtgttctacattgaagcctgtgagtctgggtccatgatgaaccacctgccggataacatcaatgtttatgcaactactgctgccaaccccagagagtcgtcctacgcctgttactatgatgagaagaggtccacgtacctgggggactggtacagcgtcaactggatggaagattcggacgtggaagatctgactaaagagaccctgcacaagcagtaccacctggtaaaatcgcacaccaacaccagccacgtcatgcagtatggaaacaaaacaatctccaccatgaaagtgatgcagtttcagggtatgaaacgcaaagccagttctcccgtccccctacctccagtcacacaccttgacctcacccccagccctgatgtgcctctcaccatcatgaaaaggaaactgatgaacaccaatgatctggaggagtccaggcagctcacggaggagatccagcggcatctggatgataaaattgtccatggaccacgtgtgccttggtcactactgaagagctgcctcctggaagcttttccaagtgtgagcgccccaccgactgtgtgctgatcagagactggagaggtggagtgagaagtctccgctgctcgggccctcctggggagcccccgctccagggctcgctccaggaccttcttcacaagatgacttgctcgctgttacctgcttccccagtcttttctgaaaaactacaaattagggtgggaaaagctctgtattgagaagggtcatatttgctttctaggaggtttgttgttttgcctgttagttttgaggagcaggaagctcatgggggcttctgtagcccctctcaaaaggagtctttattctgagaatttgaagctgaaacctctttaaatcttcagaatgattttattgaagagggccgcaagccccaaatggaaaactgtttttagaaaatatgatgatttttgattgcttttgtatttaattctgcaggtgttcaagtctt

SEQ ID NO: 15778 - DNA, 2055 bp, Homo sapiens
  source 1..2055: mol_type = unassigned DNA
agatgccacgccccatagctccaccagtcaccgcggcacagtggcccttaagcgaggagcggcggcgcccgcagcaatcacagcagtgccgacgtcgtgggtgtttggtgtgaggctgcgagccgccgcgagttctcacggtcccgccggcgccaccaccgcggtcactcaccgccgccgccgccaccactgccaccacggtcgcctgccacaggtgtctgcaattgaactccaaggtgcagaatggtttggaaagtagctgtattcctcagtgtggccctgggcattggtgccgttcctatagatgatcctgaagatggaggcaagcactgggtggtgatcgtggcaggttcaaatggctggtataattataggcaccaggcagacgcgtgccatgcctaccagatcattcaccgcaatgggattcctgacgaacagatcgttgtgatgatgtacgatgacattgcttactctgaagacaatcccactccaggaattgtgatcaacaggcccaatggcacagatgtctatcagggagtcccgaaggactacactggagaggatgttaccccacaaaatttccttgctgtgttgagaggcgatgcagaagcagtgaagggcataggatccggcaaagtcctgaagagtggcccccaggatcacgtgttcatttacttcactgaccatggatctactggaatactggtttttcccaatgaagatcttcatgtaaaggacctgaatgagaccatccattacatgtacaaacacaaaatgtaccgaaagatggtgttctacattgaagcctgtgagtctgggtccatgatgaaccacctgccggataacatcaatgtttatgcaactactgctgccaaccccagagagtcgtcctacgcctgttactatgatgagaagaggtccacgtacctgggggactggtacagcgtcaactggatggaagattcggacgtggaagatctgactaaagagaccctgcacaagcagtaccacctggtaaaatcgcacaccaacaccagccacgtcatgcagtatggaaacaaaacaatctccaccatgaaagtgatgcagtttcagggtatgaaacgcaaagccagttctcccgtccccctacctccagtcacacaccttgacctcacccccagccctgatgtgcctctcaccatcatgaaaaggaaactgatgaacaccaatgatctggaggagtccaggcagctcacggaggagatccagcggcatctggatgccaggcacctcattgagaagtcagtgcgtaagatcgtctccttgctggcagcgtccgaggctgaggtggagcagctcctgtccgagagagccccgctcacggggcacagctgctacccagaggccctgctgcacttccggacccactgcttcaactggcactcccccacgtacgagtatgcgttgagacatttgtacgtgctggtcaacctttgtgagaagccgtatccgcttcacaggataaaattgtccatggaccacgtgtgccttggtcactactgaagagctgcctcctggaagcttttccaagtgtgagcgccccaccgactgtgtgctgatcagagactggagaggtggagtgagaagtctccgctgctcgggccctcctggggagcccccgctccagggctcgctccaggaccttcttcacaagatgacttgctcgctgttacctgcttccccagtcttttctgaaaaactacaaattagggtgggaaaagctctgtattgagaagggtcatatttgctttctaggaggtttgttgttttgcctgttagttttgaggagcaggaagctcatgggggcttctgtagcccctctcaaaaggagtctttattctgagaatttgaagctgaaacctctttaaatcttcagaatgattttattgaagagggccgcaagccccaaatggaaaactgtttttagaaaatatgatgatttttgattgcttttgtatttaattctgcaggtgttcaagtcttaaaaaataaagatttataacagaacccaaa

SEQ ID NO: 15779 - DNA, 2115 bp, Homo sapiens
  source 1..2115: mol_type = unassigned DNA
ccagtcaccgcggcacagtggcccttaagcgaggagcggcggcgcccgcagcaatcacagcagtgccgacgtcgtgggtgtttggtgtgaggctgcgagccgccgcgagttctcacggtcccgccggcgccaccaccgcggtcactcaccgccgccgccgccaccactgccaccacggtcgcctgccacagggtcttactctgttgcccaggctggagtgcagtggcacaatcttggctcactgcaacctctgcctcccgggttcaagcaattctcctgcctcagcctcccgagtagctgggattacaggtgtctgcaattgaactccaaggtgcagaatggtttggaaagtagctgtattcctcagtgtggccctgggcattggtgccgttcctatagatgatcctgaagatggaggcaagcactgggtggtgatcgtggcaggttcaaatggctggtataattataggcaccaggcagacgcgtgccatgcctaccagatcattcaccgcaatgggattcctgacgaacagatcgttgtgatgatgtacgatgacattgcttactctgaagacaatcccactccaggaattgtgatcaacaggcccaatggcacagatgtctatcagggagtcccgaaggactacactggagaggatgttaccccacaaaatttccttgctgtgttgagaggcgatgcagaagcagtgaagggcataggatccggcaaagtcctgaagagtggcccccaggatcacgtgttcatttacttcactgaccatggatctactggaatactggtttttcccaatgaagatcttcatgtaaaggacctgaatgagaccatccattacatgtacaaacacaaaatgtaccgaaagatggtgttctacattgaagcctgtgagtctgggtccatgatgaaccacctgccggataacatcaatgtttatgcaactactgctgccaaccccagagagtcgtcctacgcctgttactatgatgagaagaggtccacgtacctgggggactggtacagcgtcaactggatggaagattcggacgtggaagatctgactaaagagaccctgcacaagcagtaccacctggtaaaatcgcacaccaacaccagccacgtcatgcagtatggaaacaaaacaatctccaccatgaaagtgatgcagtttcagggtatgaaacgcaaagccagttctcccgtccccctacctccagtcacacaccttgacctcacccccagccctgatgtgcctctcaccatcatgaaaaggaaactgatgaacaccaatgatctggaggagtccaggcagctcacggaggagatccagcggcatctggatgccaggcacctcattgagaagtcagtgcgtaagatcgtctccttgctggcagcgtccgaggctgaggtggagcagctcctgtccgagagagccccgctcacggggcacagctgctacccagaggccctgctgcacttccggacccactgcttcaactggcactcccccacgtacgagtatgcgttgagacatttgtacgtgctggtcaacctttgtgagaagccgtatccgcttcacaggataaaattgtccatggaccacgtgtgccttggtcactactgaagagctgcctcctggaagcttttccaagtgtgagcgccccaccgactgtgtgctgatcagagactggagaggtggagtgagaagtctccgctgctcgggccctcctggggagcccccgctccagggctcgctccaggaccttcttcacaagatgacttgctcgctgttacctgcttccccagtcttttctgaaaaactacaaattagggtgggaaaagctctgtattgagaagggtcatatttgctttctaggaggtttgttgttttgcctgttagttttgaggagcaggaagctcatgggggcttctgtagcccctctcaaaaggagtctttattctgagaatttgaagctgaaacctctttaaatcttcagaatgattttattgaagagggccgcaagccccaaatggaaaactgtttttagaaaatatgatgatttttgattgcttttgtatttaattctgcaggtgttcaa

SEQ ID NO: 15780 - DNA, 1464 bp, Homo sapiens
  source 1..1464: mol_type = unassigned DNA
aatcacagcagtgccgacgtcgtgggtgtttggtgtgaggctgcgagccgccgcgagttctcacggtcccgccggcgccaccaccgcggtcactcaccgccgccgccgccaccactgccaccacggtcgcctgccacaggtgtctgcaattgaactccaaggtgcagaatggtttggaaagtagctgtattcctcagtgtggccctgggcattggtgccgttcctatagatgatcctgaagatggaggcaagcactgggtggtgatcgtggcaggttcaaatggctggtataattataggcaccaggcagacgcgtgccatgcctaccagatcattcaccgcaatgggattcctgacgaacagatcgttgtgatgatgtacgatgttaccccacaaaatttccttgctgtgttgagaggcgatgcagaagcagtgaagggcataggatccggcaaagtcctgaagagtggcccccaggatcacgtgttcatttacttcactgaccatggatctactggaatactggtttttcccaatgaagatcttcatgtaaaggacctgaatgagaccatccattacatgtacaaacacaaaatgtaccgaaagatggtgttctacattgaagcctgtgagtctgggtccatgatgaaccacctgccggataacatcaatgtttatgcaactactgctgccaaccccagagagtcgtcctacgcctgttactatgatgagaagaggtccacgtacctgggggactggtacagcgtcaactggatggaagattcggacgtggaagatctgactaaagagaccctgcacaagcagtaccacctggtaaaatcgcacaccaacaccagccacgtcatgcagtatggaaacaaaacaatctccaccatgaaagtgatgcagtttcagggtatgaaacgcaaagccagttctcccgtccccctacctccagtcacacaccttgacctcacccccagccctgatgtgcctctcaccatcatgaaaaggaaactgatgaacaccaatgatctggaggagtccaggcagctcacggaggagatccagcggcatctggatgccaggcacctcattgagaagtcagtgcgtaagatcgtctccttgctggcagcgtccgaggctgaggtggagcagctcctgtccgagagagccccgctcacggggcacagctgctacccagaggccctgctgcacttccggacccactgcttcaactggcactcccccacgtacgagtatgcgttgagacatttgtacgtgctggtcaacctttgtgagaagccgtatccgcttcacaggataaaattgtccatggaccacgtgtgccttggtcactactgaagagctgcctcctggaagcttttccaagtgtgagcgccccaccgactgtgtgctgatcagagactggagaggtggagtgagaagtctccgctgctcggg

SEQ ID NO: 15781 - DNA, 1592 bp, Homo sapiens
  source 1..1592: mol_type = unassigned DNA
aatcacagcagtgccgacgtcgtgggtgtttggtgtgaggctgcgagccgccgcgagttctcacggtcccgccggcgccaccaccgcggtcactcaccgccgccgccgccaccactgccaccacggtcgcctgccacaggtgtctgcaattgaactccaaggtgcagaatggtttggaaagtagctgtattcctcagtgtggcaggttcaaatggctggtataattataggcaccaggcagacgcgtgccatgcctaccagatcattcaccgcaatgggattcctgacgaacagatcgttgtgatgatgtacgatgacattgcttactctgaagacaatcccactccaggaattgtgatcaacaggcccaatggcacagatgtctatcagggagtcccgaaggactacactggagaggatgttaccccacaaaatttccttgctgtgttgagaggcgatgcagaagcagtgaagggcataggatccggcaaagtcctgaagagtggcccccaggatcacgtgttcatttacttcactgaccatggatctactggaatactggtttttcccaatgaagatcttcatgtaaaggacctgaatgagaccatccattacatgtacaaacacaaaatgtaccgaaagatggtgttctacattgaagcctgtgagtctgggtccatgatgaaccacctgccggataacatcaatgtttatgcaactactgctgccaaccccagagagtcgtcctacgcctgttactatgatgagaagaggtccacgtacctgggggactggtacagcgtcaactggatggaagattcggacgtggaagatctgactaaagagaccctgcacaagcagtaccacctggtaaaatcgcacaccaacaccagccacgtcatgcagtatggaaacaaaacaatctccaccatgaaagtgatgcagtttcagggtatgaaacgcaaagccagttctcccgtccccctacctccagtcacacaccttgacctcacccccagccctgatgtgcctctcaccatcatgaaaaggaaactgatgaacaccaatgatctggaggagtccaggcagctcacggaggagatccagcggcatctggatgccaggcacctcattgagaagtcagtgcgtaagatcgtctccttgctggcagcgtccgaggctgaggtggagcagctcctgtccgagagagccccgctcacggggcacagctgctacccagaggccctgctgcacttccggacccactgcttcaactggcactcccccacgtacgagtatgcgttgagacatttgtacgtgctggtcaacctttgtgagaagccgtatccgcttcacaggataaaattgtccatggaccacgtgtgccttggtcactactgaagagctgcctcctggaagcttttccaagtgtgagcgccccaccgactgtgtgctgatcagagactggagaggtggagtgagaagtctccgctgctcgggccctcctggggagcccccgctccagggctcgctccaggaccttcttcacaagatgacttgctcgctgttacctgcttccccagtcttttctg

SEQ ID NO: 15782 - DNA, 495 bp, Homo sapiens
  source 1..495: mol_type = unassigned DNA
aatcacagcagtgccgacgtcgtgggtgtttggtgtgaggctgcgagccgccgcgagttctcacggtcccgccggcgccaccaccgcggtcactcaccgccgccgccgccaccactgccaccacggtcgcctgccacaggtggagtctcactctgttgcccaggctggagtgcagtggcacaatctcagctcactgcaaccgctgcttcccaggttcaagccattctcctgcctcagcctcccgagtagctgggattacaggtgcccaccaccacgcacaggtagcatgcccaggtgtctgcaattgaactccaaggtgcagaatggtttggaaagtagctgtattcctcagtgtggccctgggcattggtgccgttcctatagatgatcctgaagatggaggcaagcactgggtggtgatcgtggcaggttcaaatggctggtataattataggcaccaggcagacgcgtgccatgcctaccagatcattcacc

SEQ ID NO: 15783 - DNA, 283 bp, Homo sapiens
  source 1..283: mol_type = unassigned DNA
ttctcacggtcccgccggcgccaccaccgcggtcactcaccgccgccgccgccaccactgccaccacggtcgcctgccacagacagaggacagaggtctcgctctctcacccaggccggatggttcactatagccttgacttcccgggctcaagtgatcctccccgctcagccccttgagtagctgggaccacaggtgtctgcaattgaactccaaggtgcagaatggtttggaaagtagctgtattcctcagtgtggccctgggcattggtgccgttcctat

SEQ ID NO: 15784 - DNA, 588 bp, Homo sapiens
  source 1..588: mol_type = unassigned DNA
aatcacagcagtgccgacgtcgtgggtgtttggtgtgaggctgcgagccgccgcgagttctcacggtcccgccggcgccaccaccgcggtcactcaccgccgccgccgccaccactgccaccacggtcgcctgccacagggtcttactctgttgcccaggctggagtgcagtggcacaatcttggctcactgcaacctctgcctcccgggttcaagcaattctcctgcctcagcctcccgagtagctgggattacagttttgagccagagtctcactctgccacctaggctggagtgcagtggcctgatcttggctcactgcaacctccacctcccggtttcaggcaattctcctgcctcagcctcccaagtagctgagactacaggtgtctgcaattgaactccaaggtgcagaatggtttggaaagtagctgtattcctcagtgtggccctgggcattggtgccgttcctatagatgatcctgaagatggaggcaagcactgggtggtgatcgtggcaggttcaaatggctggtataattataggcaccaggcagacgcgtgccatgcctaccagatcattcaccg

SEQ ID NO: 15785 - DNA, 533 bp, Homo sapiens
  source 1..533: mol_type = unassigned DNA
aatcacagcagtgccgacgtcgtgggtgtttggtgtgaggctgcgagccgccgcgagttctcacggtcccgccggcgccaccaccgcggtcactcaccgccgccgccgccaccactgccaccacggtcgcctgccacagttttgagccagagtctcactctgccacctaggctggagtgcagtggcctgatcttggctcactgcaacctccacctcccggtttcaggcaattctcctgcctcagcctcccaagtagctgagactacaggtgtctgcaattgaactccaaggtgcagaatggtttggaaagtagctgtattcctcagtgtggccctgggcattggtgccgttcctatagatgatcctgaagatggaggcaagcactgggtggtgatcgtggcaggttcaaatggctggtataattataggcaccaggcagacgcgtgccatgcctaccagatcattcaccgcaatgggattcctgacgaacagatcgttgtgatgatgtacgatgacattgcttactctgaaga

SEQ ID NO: 15786 - DNA, 546 bp, Homo sapiens
  source 1..546: mol_type = unassigned DNA
aatcacagcagtgccgacgtcgtgggtgtttggtgtgaggctgcgagccgccgcgagttctcacggtcccgccggcgccaccaccgcggtcactcaccgccgccgccgccaccactgccaccacggtcgcctgccacaggtggagtctcactctgttgcccaggctggagtgcagtggcacaatctcagctcactgcaaccgctgcttcccaggttcaagccattctcctgcctcagcctcccgagtagctgggattacaggtgcccaccaccacgcacaggtgtctgcaattgaactccaaggtgcagaatggtttggaaagtagctgtattcctcagtgtggccctgggcattggtgccgttcctatagatgatcctgaagatggaggcaagcactgggtggtgatcgtggcaggttcaaatggctggtataattataggcaccaggcagacgcgtgccatgcctaccagatcattcaccgcaatgggattcctgacgaacagatcgttgtgatgatgtacgatgacattgcttactctgaaga

SEQ ID NO: 15787 - DNA, 4764 bp, Homo sapiens
  source 1..4764: mol_type = unassigned DNA
agcttgtaaaacaccctggagagaaaatggcggcggcagcagcttcggcgcctcagcagctctcggatgaggagcttttctctcagctccgccgttacggcctgtctcccggaccagtgacggagagcacccgcccggtctacctcaagaagctgaagaagcttcgagaggaagagcagcaacagcaccggtcagggggccgcggcaacaagacgcggaacagtaataacaataacacggcagccgccacggtcgcagccgcgggaccagcggcggcggcggccgcggggatgggggtccggccggtctcgggcgacctctcctacttacggactcctgggggcctgtgccgaatctcggcctctggcccagagagcctcctgggagggcccgggggcgcctccgccgcccccgcggctggcagcaaagtgctgctgggcttcagctcggacgagtcggacgtggaggccagtccccgggaccaggccggcggcggcgggaggaaagaccgggcttcgctccagtaccgcgggctcaaagcgccgccggcgcccctggccgccagcgaggtgactaacagcaactctgcagagcgaaggaagccccactcgtggtggggggccaggaggccggcgggccccgagctgcagaccccgccggggaaagatggagcagtggaggacgaggaaggggagggagaggacggtgaggagagggacccggagaccgaggagccgctctgggcgagccggaccgtgaatggcagccggcttgtcccctacagctgccgggaaaactattcggactcagaggaagaggacgacgacgacgtggcctccagcagacaggtattaaaggacgactccctttcccggcatcggcccagacgaacccatagtaagcctctccccccgctgactgctaaatcggccggcggcaggctggagacttcagttcagggagggggaggactcgcgatgaatgacagggcggcggctgccgggagtctagacaggagccgaaacctcgaagaggcggcggccgcggagcagggaggagggtgtgatcaagtggactccagccccgttcctagataccgtgttaacgctaagaaactgacccctctcctgcccccgccacttactgacatggactcaaccttggattcgtcaacaggctcccttctgaaaaccaataatcatattggcggtggggccttcagtgtggactcccccaggatttattctaacagtctccctcccagtgcggcggtggccgcctctagttcactcaggatcaatcacgccaatcatacgggctccaatcatacctacctgaaaaacacatacaacaaaccgaagctttccgaacccgaagaggaacttctccagcaatttaaacgggaggaggtgtccccaacagggagtttcagtgcccactacttgtcgatgtttctcttaactgctgcctgcttatttttcctaatactgggactgacttacctaggaatgagagggacaggagtatctgaggatggagaactcagcatagaaaacccctttggtgaaacatttggaaaaatacaagaaagtgaaaaaactcttatgatgaacacattatataagcttcatgatcgattggcacagcttgcaggagatcatgaatgtggcagttctagtcaaagaacgctttctgttcaagaggcagctgcgtatttaaaagatttaggtcctgaatatgaaggtatatttaacacttcattgcagtggatcttagaaaatggaaaagatgttggaataaggtgtgttggttttggccctgaggaagaattgacaaatataactgatgtgcagtttttacagtccacaagaccactgatgtctttttggtgtcgttttcgacgtgcttttgttactgtaactcacagattattgttgttatgcttaggtgtagtgatggtttgtgtcgttctgcgttacatgaaatatcgatggacaaaagaagaggaggaaacaaggcagatgtatgatatggtggtaaagattatagatgttttacgaagtcataatgaagcctgccaggaaaacaaagatttacaaccttacatgcctattccacatgtacgcgattccttaatacagcctcatgacaggaaaaaaatgaagaaagtctgggatagagctgttgacttccttgctgctaatgagtctagagttcgcacggaaacacgaagaataggtggtgcagattttctggtttggcggtggatccagccttctgcatcctgtgacaaaatattagttataccttctaaagtatggcaaggtcaagcatttcatttagatagaagaaattcaccaccaaatagtttgacaccgtgtctaaagattcggaatatgtttgatcccgttatggaaataggggatcagtggcatttggcaattcaagaagcaattttagaaaaatgcagtgataatgatggcattgttcacattgcagtagacaaaaattcacgtgagggttgtgtatatgttaaatgtctgtctccagaatatgctggaaaggcttttaaagcattgcatggctcttggtttgatgggaaattggttacagtaaaatatttacgactagatagataccaccatcgctttccccaggctctcacttccaacactccattgaagccatcaaataaacatatgaactccatgtctcatcttcgtcttcggactggcctaaccaattctcaaggaagttcctgaaaagattttcttccatttctaagactgttatttacaataggaaaattcctgtttggctttttgtcttcctttttaaatgctttttgtatgtaatatttttattgatgaatacatctctgaacgttccagaagtcttaaggttccaaagggatttagcagtgaggcagcaatgctgagtaggtaggataattatttcattcagtttttggagctcagttaagccaatacatttaaagttttgcatgaggaacactgactttattaagcattttcagatgtggtggttgtatttttgccccaagaagtgtttggataaccacacaaaagcatgatgaaaaggcttcttgtagtcccataatttcttgtgaactaatgttgtgaatttttgtatacagtcacctgcatagttcctacaggctaatgtggtaaaactgttgatttcccaatttaaccttaggtttctgttgcttataagcgattcatttgctacggctggaatatgggaaaattaatttgggcttagtggttacaaatatgtgtaagtggatgtatatgtacttaaactggctttgtatatatgtataaatgctggtggtggtgaaagtagtcttgttttatgaggatgtctgcattaaagcagtaaaataagctttccattttattcataatctaatgtgtgtgtatatatgtatgtgtgtatgtgtgtgtatatatagatgtatatatatacacacacagagatatatacatatggctgtacttttgcatagatcaaacagccaaacacctggaagtattagatacaagtttaaaatatcttttataggttttatataaaaatgtctgagtatgattttgtgtgaaagttctgataccagttgtaatagagtcaaatttatgtgagcaataaagaagaaattggcagatattggaaaaatattttgtgaaaagctgtatttattataaatactagggccatgacatagtaccattggggttaagtcattttcccaatctatttataatttaatgatatgttagtgcctctgttatatgtcaagtttaaagcagggcacattgttgcagcaaaatgtgtatttgacaaattatacttgcaattttgggtcatgaaagtttgcaatatagtaaatgcacgattgactgttgctttgtgcctcagtatttaatttgtttcagtaaacttactttattactgtttatgatttcagataaaaatagttgctgagtaaattttacttgtaatctacaattggctttttaaaaataacctgttgatatataattgtcagtccaaatgaatatgtgaaacagctggaattgtacaaattttggttgtatttaaagctcagtttcctttttgttttattgtatgcgttgggtttgcagcatgaacttgcacagataatgcacgttttctggttaagtaaacatgatgcacactattctgtaacagaaagccctattgtgccttacctgtgtgcttttgtgggcaccttgtttatgaagaataaaaaatgatttgttatctgaagagaataaattttaaattctcagtttatgtctcagatgctaacgtgtgaaaatataaatatatataatatataaagtaaccagtcttcctgtattttatgtgcatcatagtgatttatctgagcttagtgacccccatcttgtaacctgttgcaagagtgaatgtaaaaaatagttgtggcattttaaaaggtcgcctttgatgcagatgcatctttttcttgcttctaaaacatatttcatgtaaacattgtacatttattattgtaatatatactattatgcagcttattttacctgaaactgttaagccgaccaagatccctccctgcaagacagatgggaatgtgtataataactaggtatttgagaagttctgaagtttgatgtaatctgttacttgtcctgttaaaaaaaggaaaaaattctaattaaaaatttattagttttt

SEQ ID NO: 15788 - DNA, 8946 bp, Homo sapiens
  source 1..8946: mol_type = unassigned DNA
gcggcgggagcgcggcttcccaggcccgccgctccgcagggctgctggcgttgctgctgttgagaggcggcggcggcggcgcaggcgggcgggaaggatggtgtttctgcgactggagcggcaggtgcggaccgggagccggaccgaggtttggcagaagcaacgtgtgctcgggagcaaccggcgcgggtgccactgaggcagcggagggaggcaggatcgactgacgggcgaacggacggacggacggaaggcgactcgagggccggccccggagccgcgccgtgggcgagatgccggggccgccggcgttgcggcggaggctgctgctgctgctgctggtcctcctgatcgccggcagtgctggggccgcgccacttccgcaaacaggtgcaggggaggcgccacctgctgcagaagtttcctcatcttttgtgatcctgtgtgtgtgcagtttaataatattaatagtgttaattgcaaactgtgtatcctgctgtaaggacccagaaatagactttaaggaatttgaagataattttgatgatgagatagatttcacaccaccagcagaagacactccctctgttcagtccccagcagaggtcttcacactttcagtaccaaatatttcactcccagctccctcgcaattccagccttctgtagagggattgaagtctcaagttgcccgccacagtctaaactacatacaggaaattggaaatggctggtttggaaaggttctcttgggagagatttacacgggcactagcgtagcaagagtcatcgtgaaggagttaaaagcaagtgccaacccaaaggaacaagatacttttttgaaaaatggagaaccttactacattcttcagcatccaaatattcttcagtgtgttggacagtgcgtagaagcgattccctacctcctggtgtttgagttctgtgacttgggtgacctgaaggcgtatctgcgcagcgagcaggagcacatgcggggggactcacagaccatgctgctgcagaggatggcgtgcgaggtcgccgcggggctggccgccatgcacaagctgcacttcctgcacagtgatttagccctgcggaattgttttctcacctccgacttaaatgtgaaagtgggagattacggaataggattcagcaggtacaaggaggattatattgaaacagatgataaaaaagttttccctctgcgatggactgctccagaattagtaaccagctttcaagacagactgctaactgcagatcagactaagtatagtaatatctggtctctgggtgtgacactttgggagctttttgacaatgccgcacagccgtattcaaacctttccaacttagatgtcctcaaccaagtcattagagagagagacacaaaactcccgaagccccagctggagcagccctactctgatagatggtatgaagtcttacagttctgttggctgtcaccagaaaagagacccgcggctgaagatgtgcacaggctgctgacttacctgcggctgcagagccagcgggactcagaggtcgactttgaacagcagtggaacgctctgaagccgaacacaaacagcagagactcctccaacaatgctgcattcccaattctcgaccactttgccagggaccggctgggtcgtgaaatggaggaagtcctcaccgtgaccgaaaccagccagggcctgagcttcgagtatgtctgggaggccgctaagcacgaccactttgacgagcgcagccggggccacctggacgaaggcttgtcctacacgagcatcttctatccggttgaagtttttgagagttcgctttcagatcctgggcccggaaagcaagatgacagcggccaggatgtccccctgagggtccctggagtggttcctgtttttgatgcccacaacctttctgttggaagcgactattatatccagttagaagaaaaaagtggtagtaacttggagcttgattacccaccagcgctgctcacaaccgacatggataatccagaaaggactggccctgaactgtcccagctcacggcgctcaggagcgttgaacttgaggagtccagtacagatgaggacttcttccaaagcagtacagaccccaaagactctagcttaccaggggacttacacgtgaccagtggccccgagagccctttcaacaatatatttaatgatgtggacaaatcggaagatttgcccagtcaccaaaaaatattcgacttaatggaattaaacggagttcaagccgactttaaacctgccactttaagttccagtttggataaccccaaagagtcagtcataacaggccactttgagaaagaaaagccccgtaagatttttgacagtgagcctctctgcctatcagataatcttatgcaccaagataattttgatccattgaatgttcaagaattgtcagaaaactttttatttcttcaagagaaaaacttactaaaaggctcattgtccagcaaagaacacataaatgatcttcagacagaacttaagaatgctggttttactgaagctatgttagaaacgtcatgtagaaactctttagatactgagcttcagtttgctgaaaataagccaggcttgtctttgttgcaggaaaacgtaagcacaaagggtgacgatacagatgtcatgctcacaggtgacactttgagcacctcattgcagtcttccccggaagtgcaggtacctcctacctccttcgaaacagaagaaacgccccgtcgggtacccccagactcactcccaacacagggagaaacccagcccacgtgtttagatgttattgtcccggaggactgtctccaccaggacatcagtccagacgctgtgactgtcccggttgaaattctctcaactgatgccagaacccacagcctggataacaggtcccaggactctcctggcgagagtgaggagaccctgcgactcaccgaaagtgactctgttcttgctgatgacatccttgccagcagggtgagtgtagggagtagtctcccggaactgggacaggaattgcacaataaaccattttcggaagaccatcacagtcatcgccggctagagaaaaacttagaggctgtggagactttaaatcagctcaattctaaagacgcagcaaaagaagcaggcttggtgtctgccctctcctcggactcaaccagtcaggacagcctcctggaggacagcttgtcagcacccttcccagcctctgagccgtccctggaaaccccggactctctggagtcagtggatgtccacgaagcgctactggactctttaggatctcacactccccagaaactagtgccccccgataagccggcagacagtggctacgaaacagagaacttggagtctcccgagtggaccttgcatcccgctcccgagggcaccgcagactcagaaccagccaccacgggcgatggcggccacagcggtctgcctcccaacccggtcattgtcatctcagatgccggcgatggtcacagaggcacagaagtgacccctgagacgttcacagctggctcccagggttcataccgagactctgcgtacttctcagacaatgactctgagcccgagaaaaggtctgaggaggtcccgggaacctccccatccgccttggtgttggtacaggagcagcccctacccgagccagtcctccccgagcaaagtcctgctgcccaggatagctgcctggaagccagaaagagccagccagatgaaagttgtctgtctgctttgcacaactccagtgacctggaattaagagccacgccggagccagcacagactggtgttccccagcaggtgcatcccacggaagacgaggccagcagtccctggagtgtgctgaatgcagaacttagcagcggcgatgacttcgagacacaggacgatcgcccctgcaccctcgcttccacggggaccaacacgaacgaactccttgcctacaccaattctgcgctggacaagtccctgtccagccactccgagggcccgaagttgaaggagccggacatcgaagggaagtacctggggaaactcggggtgtcagggatgctcgacctctcagaggacgggatggatgcagacgaggaggacgaaaacagcgacgactcggacgaggacctgcgggccttcaacctgcatagcctcagctccgagtcggaggacgagaccgagcaccccgtgcccatcatcctcagcaacgaggacggaaggcacctgcggagtctgttgaagcccacagcggccaatgcccccgacccactgcccgaggactggaagaaggaaaagaaggcagtcacgtttttcgatgatgtcacagtctacctgtttgaccaggagaccccaaccaaagagctggggccctgtggaggagaggcgtgcggcccggacctgagcggcccagccccagcctcaggctctccctacctgagcaggtgcatcaactccgaaagctccaccgacgaagaaggtggtggctttgagtgggatgatgacttctccccagatccttttatgtcaaagacaacaagtaacctgctcagctccaagccttctctccaaacatccaagtacttttctccgccgccaccggcccggagcacggagcagagctggccgcactcggcgccttactcccggttctccatctctcccgccaacattgccagcttttccctcacacacctgaccgactcggacatcgagcagggcggaagcagcgaagacggagaaaaggactaggtggctgccaacgcgcacgctcgggtccgaggctgctcccctggagcggcgcccctgcgccctcagcccgagcagcgacatccactcgccatttgctgacatgagattgggaggaagaatccagaggtgaagagggagacggctcttagctgcgttcaaggcggggccctcgggagcccaggtgcagagcgaggccgtgtccaggagccggcgtccctcagtgccccgtgcacccgcggccgcggcctcccaggcagtgctcatgcgctggccgtcgggggaggcaggggcacagcctccatgtgcgcgcgcgtgtggagctgtgtgcaccgcatgtgtgctttccacaggggcgtctctgcgtccacgcctgcacatcccggcgcacgtgtgggcaccacagaggacacgtgaggggaatggtcaccagtgagccatatttattatttctagagaaatcacgaactgctttctgtaattgcactgtggataaatgttccgagagtctccattgttgtacaggatcttcagttattcgaggggaatgaggcaggtcaagccgatgctagccactagtttgattttttttctgttttatagtttgcgctgcatggtacttgtgaagcttaaatattttgagtgttctactgtgtctaggattgttgggattgtacatatggtactctttcataaatgataaatgattctgaatgttagtgttttatgttcatataggaaatattttcattgagtccaaaataccactgttttgttgatggacttgaatgcatttttgtctcttcttgatgaagcggctttgccgcagcaaatgaggcttctctctgaggagctgagaggtcttgcagcctctccttgtcattctcccaccccacatcccattttttaaagcccttttggtaaaaaccaacaggttgtggccgcagacctcagatggacccggcccatccctggggacgtgctggcgtggcaggtccagagagctgcaccctgcacggggcaccgcaccgcttccctccgcgcagctcttctgcctggttttcggaggccaggctgctgggaagcttccgtgttcctgtcagtccttccttcaagaagccggggaactcaggcagactcatctccgcagagcataccagccgtgggggaccgttcgacttgatgatgtgtgcacacttcaggtggtggggacttgagctttaaaaaaacctccacagccgaatcttctcctccgagccactccacgtcacgtccagctgggcctggccagtctgtggttatccatgtgggatgagataacaccacatcctgcagctgtgaagggggatggacaagggacgacggccgacggcagagcatcagcagccgacacatagttcgggtcggggccttgggtggtcctgcatggcccgggactcatctcacggaccctccgttctgcattaagccccaggttctcttctggctttgaaagggcccgagtgctcccagtgtagcttcgtcacatcgtcacgagcccctgtggtcatgggcgacctcacacctccctccctgagttctgctctgacataaggaagtcctcggtggctggtgcagcgcggctgtgctgtgctggggaggcagccgttccttcgggggtccttgggcctgcagtcccctcatactcacccttcacccaacatattttccggtgctgatatgtttccagactccagcgcaacctggggtgctctccagacccgtgcaggggccgcctggggtacacggaaggaagttgagtcctagtgcaaaatgcaggcggacgttgccagagagtgcgcagcaaatgaccttcattgccagttccaccctactcctctcattttttatactaagcaataactttccaaagcaagaagttcaggatggagagagtcccctcctgtgtaggcatggggtggatgcggtgcccacctgggctatgtggggagcaccactgtctcgggatgcgcgaattttttttttttttttaattaacagggcattagaagatgattttgccaaaattgtcatgactctgaattcttgctgtggggacttcctgagttttctcagtttttacatctaagattagtcttggctgaagagaaatgagacgtgattatactactttttcaattgcaggtttaaggagttcagatttaatgaccaaagtcatacagatcatggaatctgtcgtcgtcttatacagtgtcagcctcgagtacatttattaaccttttggggctgtcagttttccactaggattaagattttggccgggcgcggtggctcacgcctgcaatcccaacacattggggggtcgaggcggacggatcactttgagcccaggagttcaagaccagcctgggcaacatggcgaaacctcgtctctactaaaaatacaaaatatatatatatatatatatactagctggggcacatagtggtgtgcacctgtagtcccagctgcttgggaggctgaggtgggaggatggctagagcccaggagatgggtgttgcagtgagctgagaccatgccactgtactctagcctgggtaacagccagaccctgtctcaaaaaaaaaaacaatttttttcataacataattcccatttttatttattttgagtcactcataattaattgccaaaaaagcattttatacattgagttggggggtagtggatcttagtgtggtgttgcatggaggggcgagattttatatttataatcaacacgtgggttaacatgtttttttgaaatccaagcaatacacaggaaatttaagtagaataaaaattgcagcccatttttgaaatgtcagcatgtgctgtgttcagttcaggtttttgttgtttgttttgttattttttaactaataagttggttatcagtggtgggttttcaaaatgtacttgttctaataagttgtacaatgaactaaatcagtggcattctctagataatgtgggggaaggttagaatattttctggccttctatggggtagcaacccagaatcaatctgaattagtcctgttttggtggagtttgtacattttaaatcctataacaaaaataatctagttttcatttccttactagctagatgcgaatttgtctttttgaatgaccctgtcaataagccagaaagggcaacccagaaaaagtgctccccacatccttctgagacttggcctgtgtgtgtggacgagaagccattcaccgtaagggtgcagaaagctcgaccaagccgaattgcaaacaacgttcgttctatttttaaatgtacaggttcgatcgtttctatagaaatgggtttatctaagaaaagtcttggtttgtcttgctgctgtaaaaggcctttccaaacccctccttttattcctgtttcccgaaataaggtatttgtagagttaaggacctactgcatgcctgtccccagggccccggtggaaggaaggcagcgcctgctcttccttaactcagcccatcatctgaaaattcagaagtgaaccaagggttagacgccagaggttgggcttctgttagagtggcttcaaaacatgagccttatgggaagtagccttaaaaaaagaatgggtatacgcagtgacttccgatggaaatctccaaaacaatattcctaagtagcaatggggttggctcaagtctttattaacaaagaacattctctttcatctataaagaaattcttaaagatgcattgacagtgttgaattaccaacagcctgtgaagatcagtttgaccggtgtggacacgtgctggttaagcactcaggcctacgtgggccgagcgggatcttgatcatggggctggtgtatggatccaccgtcggattccgtctgcagaggaggacgtagggggccgtcacacccaccaggcctccctgctgtgctttaacacaggcagaagaggttcatggcaatataatagtcaatgaactttcagtttaaattgtgtacatttttaaattgtaagatttttactgtatattgatgcatagtgtgattcaataaattgcttgtaatttaaaaactatttaatattcaaaataaatatagttatatatttataaa

SEQ ID NO: 15789 - DNA, 555 bp, Homo sapiens
  source 1..555: mol_type = unassigned DNA
tcctcggaactgttgcccacatgcagccccggacacagcccctagcccaaaccctacccttcttcctcggaggggcccctcgagacactgggctgcgggtgcctgtcattaagatgggcacagggtgggagggcttccagcggaccctgaaggaagtcgcctacatcctcctctgctgctggtgtatcaaggaactgctggattaatggtagcagggaactgcctcctctccccaccagcaccatggctggcatcgctcaggtgggcagggtagagtaaacaggaggcatagctgcagcttctgtggcagagcttgccttagcttctcattctcttctttagcccccagcccaattgccatcaagactcctgaagccagctgtgcttgaccaaggatgggccataaacaatgagtaaacagtaaagtgtggatcctgctttgagctgtgtcatctagcagacctgcctcatctctgagcctccttcattcccaacccctgcctctggtggacctctggtgggcaggagcttggactgctctggctaggaccccag

SEQ ID NO: 15790 - DNA, 649 bp, Homo sapiens
  source 1..649: mol_type = unassigned DNA
cttcctcggaactgttgcccacatgcagccccggacacagcccctagcccaaaccctacccttcttcctcggaggggcccctcgagacactgggctgcgggtgcctgtcattaagatgggcacagggtgggagggcttccagcggaccctgaaggaagtcgcctacatcctcctctgctgctggtgtatcaaggaactgctggattaatggtagcagggaactgcctcctctccccaccagcaccatggctggcatcgctcagcccccagcccaattgccatcaagactcctgaagccagctgtgcttgaccaaggatgggccataaacaatgagtaaacagtaaagtgtggatcctgctttgagctgtgtcatctagcagacctgcctcatctctgagcctccttcattcccaacccctgcctctggtggacctctggtgggcaggagcttggactgctctggctaggaccccagtaagattgtggcaagacctggcactcctccaagcttggcacagtgagcccaccagctcagatggttgatcttaccataccctcatagtaccaagaatggactgccccctaagaaacctgtttgagaatcactgaattataaatataatccataggccttgaggcccaagatta

SEQ ID NO: 15791 - DNA, 861 bp, Homo sapiens
  source 1..861: mol_type = unassigned DNA
ggccgtggcagaaggagggctcgggcaggctctgccactcagatcaccatgtacagcttcatgggtggtggcctgttctgtgcctgggtggggaccatcctcctggtggtggccatggcaacagaccactggatgcagtaccggctgtcagggtccttcgcccaccagggcctgtggcggtactgcctgggcaacaagtgctacctgcagacagacagcatcgcatactggaatgccacccgggccttcatgatcctgtctgccctatgcgccatctccggcatcatcatgggcatcatggccttcgctcatcagcctaccttctcccgcatctcccggcccttctctgctggcatcatgtttttttcctcaacccttttcgtcgtgttggccttggccatctacactggagtcaccgtcagcttcctgggccgccgctttggggactggcgcttttcctggtcctacatcctgggctgggtggcagtgctcatgacgttcttcgcagggattttctacatgtgcgcctaccgggtgcatgaatgccggcgcctgtctacaccccgctgagcccaaatgtgtcccccaacttcatctggaagttaaagtgaggccactgaagaggaggaggagggtctagaggcctgaaatcctggttcctaggggaatgagggggctcagttctggactgtgggtttgtggggggaggctgactcctggtcctaggctggaaggaggaagaatagggcccatgggagggagctgagaagactcaagtccccgtctgcctggcaggttgttagaaaaatggactatccattagagcaactttctggggcctaataaaactgatgtgaaact

SEQ ID NO: 15792 - DNA, 983 bp, Homo sapiens
  source 1..983: mol_type = unassigned DNA
gtggcagaaggagggctcgggcaggctctgccactcagatcaccatgtacagcttcatgggtggtggcctgttctgtgcctgggtggggaccatcctcctggtggtggccatggcaacagaccactggatgcagtaccggctgtcagggtccttcgcccaccagggcctgtggcggtactgcctgggcaacaagtgctacctgcagacagacagcatcggtgagccccccggccagggtccaggccgcgcctggggaaagagcagggcggacctcggggcccaaggacacctgtattccagatggagaactctgcggctcaaagagggaaagggagcaacccaagcatactggaatgccacccgggccttcatgatcctgtctgccctatgcgccatctccggcatcatcatgggcatcatggccttcgctcatcagcctaccttctcccgcatctcccggcccttctctgctggcatcatgtttttttcctcaacccttttcgtcgtgttggccttggccatctacactggagtcaccgtcagcttcctgggccgccgctttggggactggcgcttttcctggtcctacatcctgggctgggtggcagtgctcatgacgttcttcgcagggattttctacatgtgcgcctaccgggtgcatgaatgccggcgcctgtctacaccccgctgagcccaaatgtgtcccccaacttcatctggaagttaaagtgaggccactgaagaggaggaggagggtctagaggcctgaaatcctggttcctaggggaatgagggggctcagttctggactgtgggtttgtggggggaggctgactcctggtcctaggctggaaggaggaagaatagggcccatgggagggagctgagaagactcaagtccccgtctgcctggcaggttgttagaaaaatggactatccattagagcaactttctggggcctaataaaactgatgtgaaact

SEQ ID NO: 15793 - DNA, 2193 bp, Homo sapiens
  source 1..2193: mol_type = unassigned DNA
cgtgccgtaaagagaggccgggagctgcccctaaccgaggcagcagcggacgtgagcgataatggcggatatggaggatctcttcgggagcgacgccgacagcgaagctgagcgtaaagattctgattctggatctgactcagattctgatcaagagaatgctgcctctggcagtaatgcctctggaagtgaaagtgatcaggatgaaagaggtgattcaggacaaccaagtaataaggaactgtttggagatgacagtgaggacgagggagcttcacatcatagtggtagtgataatcactctgaaagatcagacaatagatcagaagcttctgagcgttctgaccatgaggacaatgacccctcagatgtagatcagcacagtggatcagaagcccctaatgatgatgaagacgaaggtcatagatcggatggagggagccatcattcagaagcagaaggttctgaaaaagcacattcagatgatgaaaaatggggcagagaagataaaagtgaccagtcagatgatgaaaagatacaaaattctgatgatgaggagagggcacaaggatctgatgaagataagctgcagaattctgacgatgatgagaaaatgcagaacacagatgatgaggagaggcctcagctttccgatgatgagagacaacagctatctgaggaggaaaaggctaattctgatgatgaacggccggtagcttctgataatgatgatgagaaacagaattctgatgatgaagaacaaccacagctgtctgatgaagagaaaatgcaaaattctgatgatgaaaggccacaggcctcagatgaagaacacaggcattcagatgatgaagaggaacaggatcataaatcagaatctgcaagaggcagtgatagtgaagatgaagttttacgaatgaaacgcaagaatgcgattgcatctgattcagaagcggatagtgacactgaggtgccaaaagataatagtggaaccatggatttatttggaggtgcagatgatatctcttcagggagtgatggagaagacaaaccacctactccaggacagcctgttgatgaaaatggattgcctcaggatcaacaggaagaggagccaattcctgagaccagaatagaagtagaaatacccaaagtaaacactgatttaggaaacgacttatattttgttaaactgcccaactttctcagtgtagagcccagaccttttgatcctcagtattatgaagatgaatttgaagatgaagaaatgctggatgaagaaggtagaaccaggttaaaattaaaggtagaaaatactataagatggaggatacgccgagatgaagaaggaaatgaaattaaagaaagcaatgctcggatagtcaagtggtcagatggaagcatgtccctgcatttaggcaatgaagtgtttgatgtgtacaaagccccactgcagggcgaccacaatcatctttttataagacaaggtactggtctacagggacaagcagtctttaaaacgaaactcaccttcagacctcactctacggacagtgccacacatagaaagatgactctgtcacttgcagataggtgttcaaagacacagaagattagaatcttgccaatggctggtcgtgatcctgaatgccaacgcacagaaatgattaagaaagaagaagaacgtttgagggcttccatacgtagggaatctcagcagcgccgaatgagagagaaacagcaccagcgggggctgagcgccagttacctggaacctgatcgatacgatgaggaggaggaaggcgaggagtccatcagcttggctgccattaaaaaccgatataaagggggcattcgagaggaacgagccagaatctattcatcagacagtgatgagggatcagaagaagataaagctcaaagattactcaaagcaaagaaacttaccagtgatgaggaaggtgaaccttccggaaagagaaaagcagaagatgatgataaagcaaataaaaagcataagaagtatgtgatcagcgatgaagaggaagaagatgatgattgaagtatgaaatatgaaaacattttatatattttattgtacagttataaatatgtaaacatgagttattttgattgaaatgaatcgatttgcttttgtgtaattttaattgtaataaaacaatttaaaagcaa

SEQ ID NO: 15794 - DNA, 1981 bp, Homo sapiens
  source 1..1981: mol_type = unassigned DNA
ctaaccgaggcagcagcggacgtgagcgataatggcggatatggaggatctcttcgggagcgacgccgacagcgaagctgagcgtaaagattctgattctggatctgactcagattctgatcaagagaatgctgcctctggcagtaatgcctctggaagtgaaagtgatcaggatgaaagaggtgattcaggacaaccaagtaataaggaactgtttggagatgacagtgaggacgagggagcttcacatcatagtggtagtgataatcactctgaaagatcagacaatagatcagaagcttctgagcgttctgaccatgaggacaatgacccctcagatgtagatcagcacagtggatcagaagcccctaatgatgatgaagacgaaggtcatagatcggatggagggagccatcattcagaagcagaaggttctgaaaaagcacattcagatgatgaaaaatggggcagagaagataaaagtgaccagtcagatgatgaaaagatacaaaattctgatgatgaggagagggcacaaggatctgatgaagataagctgcagaattctgacgatgatgagaaaatgcagaacacagatgatgaggagaggcctcagctttccgatgatgagagacaacagctatctgaggaggaaaaggctaattctgatgatgaacggccggtagcttctgataatgatgatgagaaacagaattctgatgatgaagaacaaccacagctgtctgatgaagagaaaatgcaaaattctgatgatgaaaggccacaggcctcagatgaagaacacaggcattcagatgatgaagaggaacaggatcataaatcagaatctgcaagaggcagtgatagtgaagatgaagttttacgaatgaaacgcaagaatgcgattgcatctgattcagaagcggatagtgacactgaggtgccaaaagataatagtggaaccatggatttatttggaggtgcagatgatatctcttcagggagtgatggagaagacaaaccacctactccaggacagcctgttgatgaaaatggattgcctcaggatcaacaggaagaggagccaattcctgagaccagaatagaagtagaaatacccaaagtaaacactgatttaggaaacgacttatattttgttaaactgcccaactttctcagtgtagagcccagcatgtccctgcatttaggcaatgaagtgtttgatgtgtacaaagccccactgcagggcgaccacaatcatctttttataagacaaggtactggtctacagggacaagcagtctttaaaacgaaactcaccttcagacctcactctacggacagtgccacacatagaaagatgactctgtcacttgcagataggtgttcaaagacacagaagattagaatcttgccaatggctggtcgtgatcctgaatgccaacgcacagaaatgattaagaaagaagaagaacgtttgagggcttccatacgtagggaatctcagcagcgccgaatgagagagaaacagcaccagcgggggctgagcgccagttacctggaacctgatcgatacgatgaggaggaggaaggcgaggagtccatcagcttggctgccattaaaaaccgatataaagggggcattcgagaggaacgagccagaatctattcatcagacagtgatgagggatcagaagaagataaagctcaaagattactcaaagcaaagaaacttaccagtgatgaggaaggtgaaccttccggaaagagaaaagcagaagatgatgataaagcaaataaaaagcataagaagtatgtgatcagcgatgaagaggaagaagatgatgattgaagtatgaaatatgaaaacattttatatattttattgtacagttataaatatgtaaacatgagttattttgattgaaatgaatcgatttgcttttgtgtaattttaattgtaataaaacaatttaaaagc

SEQ ID NO: 15795 - DNA, 2101 bp, Homo sapiens
  source 1..2101: mol_type = unassigned DNA
ctgcccctaaccgaggcagcagcggacgtgagcgataatggcggatatggaggatctcttcgggagcgacgccgacagcgaagctgagcgtaaagattctgattctggatctgactcagattctgatcaagagaatgctgcctctggcagtaatgcctctggaagtgaaagtgatcaggatgaaagaggtgattcaggacaaccaagtaataaggaactgtttggagatgacagtgaggacgagggagcttcacatcatagtggtagtgataatcactctgaaagatcagacaatagatcagaagcttctgagcgttctgaccatgaggacaatgacccctcagatgtagatcagcacagtggatcagaagcccctaatgatgatgaagacgaaggtcatagatcggatggagggagccatcattcagaagcagaaggttctgaaaaagcacattcagatgatgaaaaatggggcagagaagataaaagtgaccagtcagatgatgaaaagatacaaaattctgatgatgaggagagggcacaaggatctgatgaagataagctgcagaattctgacgatgatgagaaaatgcagaacacagatgatgaggagaggcctcagctttccgatgatgagagacaacagctatctgaggaggaaaaggctaattctgatgatgaacggccggtagcttctgataatgatgatgatgatgaaaggccacaggcctcagatgaagaacacaggcattcagatgatgaagaggaacaggatcataaatcagaatctgcaagaggcagtgatagtgaagatgaagttttacgaatgaaacgcaagaatgcgattgcatctgattcagaagcggatagtgacactgaggtgccaaaagataatagtggaaccatggatttatttggaggtgcagatgatatctcttcagggagtgatggagaagacaaaccacctactccaggacagcctgttgatgaaaatggattgcctcaggatcaacaggaagaggagccaattcctgagaccagaatagaagtagaaatacccaaagtaaacactgatttaggaaacgacttatattttgttaaactgcccaactttctcagtgtagagcccagaccttttgatcctcagtattatgaagatgaatttgaagatgaagaaatgctggatgaagaaggtagaaccaggttaaaattaaaggtagaaaatactataagatggaggatacgccgagatgaagaaggaaatgaaattaaagaaagcaatgctcggatagtcaagtggtcagatggaagcatgtccctgcatttaggcaatgaagtgtttgatgtgtacaaagccccactgcagggcgaccacaatcatctttttataagacaaggtactggtctacagggacaagcagtctttaaaacgaaactcaccttcagacctcactctacggacagtgccacacatagaaagatgactctgtcacttgcagataggtgttcaaagacacagaagattagaatcttgccaatggctggtcgtgatcctgaatgccaacgcacagaaatgattaagaaagaagaagaacgtttgagggcttccatacgtagggaatctcagcagcgccgaatgagagagaaacagcaccagcgggggctgagcgccagttacctggaacctgatcgatacgatgaggaggaggaaggcgaggagtccatcagcttggctgccattaaaaaccgatataaagggggcattcgagaggaacgagccagaatctattcatcagacagtgatgagggatcagaagaagataaagctcaaagattactcaaagcaaagaaacttaccagtgatgaggaaggtgaaccttccggaaagagaaaagcagaagatgatgataaagcaaataaaaagcataagaagtatgtgatcagcgatgaagaggaagaagatgatgattgaagtatgaaatatgaaaacattttatatattttattgtacagttataaatatgtaaacatgagttattttgattgaaatgaatcgatttgcttttgtgtaattttaattgtaataaaacaatttaaaagc

SEQ ID NO: 15796 - DNA, 3509 bp, Homo sapiens
  source 1..3509: mol_type = unassigned DNA
cctttaagagcggctggccaggcacggcctccgcctctcagtacgcggagcgccggcggtcacctggggctcgcggagcggccagatcgcggcggagtcggcgcgcttccccgagggaaggtgggagaggggacccggacgcgaggtgccccgaagccctctcgagcgtaaccgtcccgcgcctctctgaggcggaggatgcgggagcgcatctgggcgccgccgctgctgctgctgctgccgctgctactgccgccgccactgtggggcggccccccggacagcccacgccgggagctggagctggagcccgggcctctgcagcccttcgacctgctctacgccagcggcgcggccgcctactacagcggagactacgagcgagcggtgcgcgacttggaagcggcgctgcgcagccaccggcgcctgcgggaaatccgcacgcgctgtgcccgccactgcgcggcgcgccacccgctcccgcccccgccccccggcgagggccccggcgctgagctgccccttttccgctccttgttggggcgggcgcgctgttatcgcagctgtgagacccagcgcctcgggggccccgcatcccgccaccgcgtcagcgaggatgtgcgcagcgacttccagcgcagagtgccctacaactacctgcagcgggcctacatcaagcttaaccagctcgaaaaagcagtggaagcagctcacacatttttcgtggctaaccctgagcacatggaaatgcagcagaacattgagaattacagggcgacagctggtgttgaagcattgcagttggtagacagagaagccaagccacacatggagagttacaatgcaggagttaaacattatgaggctgatgactttgagatggctatcaggcacttcgaacaagccttaagagaatatttcgttgaagatacagaatgccggaccctatgtgaggggcctcagagatttgaagaatatgagtatttagggtataaggctggtctgtatgaagctattgcagatcactacatgcaggtgcttgtttgtcagcatgaatgtgtgagggaacttgccacccgccctggccgcctctctcccatcgagaattttcttcctctgcactatgattacctacagtttgcctactatcgagttggtgagtatgtgaaagccctggagtgtgccaaagcctatcttctatgccatccagatgatgaggatgtcctagacaatgtggattactatgagagtctgctggatgatagcattgacccggcatccattgaggccagagaggatttaacaatgtttgtgaaacgtcataagctggagtctgagctgataaaatcagctgcagaaggtctggggttttcatacactgaaccgaattattggatcagatatggaggacgacaggatgagaatcgggtcccttcaggagtgaacgtagagggagcagaagttcatggattctcaatgggaaaaaagctatcacccaagatagatcgagacctaagagaaggtggtcctctactctatgagaacatcacattcgtctacaactcggagcagctgaacgggactcagcgggttctcctggataacgtcctgtcggaagaacagtgccgggagctccacagcgtggccagtggaatcatgcttgttggtgatggatacagaggaaaaacttcaccccatacacccaatgaaaagtttgaaggtgcaactgtcctgaaagcactcaaatctggttatgaaggtcgagtcccactgaagagcgctcgtctgttttatgacatcagcgaaaaggctcgaaggattgtagaatcttattttatgctgaactcaactctgtatttttcctatacacacatggtctgccgaacagccctgtctggtcagcaggatagaagaaatgacctcagtcatcccatccatgctgacaactgtttgttggatccagaggccaacgaatgctggaaggagcctcctgcttacacatttcgagactatagtgctctcctatatatgaatgatgactttgaaggaggagaattcatattcacagagatggatgctaagactgtgactgcctctataaaaccaaaatgtgggcgcatgatcagcttctcatctggaggagagaaccctcatggggtgaaggcagtcaccaagggaaagaggtgtgctgtggctctgtggttcaccttggacccactttatagagaattggagcgaatacaggctgatgaagtgattgcaattctggatcaagaacagcaagggaagcatgaactgaatatcaaccctaaagatgagctataaaaatgagaaagaatgttctatcaaatatttatttaaattgttaatcttatgagaacctttttatttttgtacagagccatggtataaattaacaggttaatgtcagtcatcagatcttccttctcttcctaaggatgcttgtgttgcctcaatctatcaatctatctttcttgttttgggttgttttctctctctctctctctctctctcttcttagagacatggtctaaccatgttgtctaggatatagggcagtggctattcacagatgtgatgatagcacactggagcctcaaactcttaggctcaggcgatccttcaagcctcccggggagctgggaccacaggcacgtgccaccacacccagctctctttcttggtttttcatcatttcatgtatctatcaaagcccagttcacctcctcccccaaacacacacacacacacacacacacacacacacacacacaattaagttgctgcaaattcaaaagcttagagagaataagcttcttggtggtgaaactacaactctcacgtgtgctccagttctaaaattaacctgtgcctggtctctgaagccctttcttgctctgtgcctttcagccacatccttaggtgctaacggccatgagctccgactctccaaagtgagctccactttgggtctgaggagcccctggcagagtccacgctgcctcaggtatcatgggcgtaatgatcacccaggctccgggagatctcatggatgattactgtatgagacagaggggacttcagtctttccagggccttggtggaatttttggctctggtgttttcgccagacaataaacttacactggaagctttgattcaccctccacagtactccagaaaggactgtcctataagttgtacactttaaaaggtcatgtagaggttgtagtagaatggcttttcaccctggtgactttggaagaaactcttgaatactgcctgcatccgggcaccatggccaggttgcctaggagtggggtccactgatgaaaagaggtgttttgtacttacataagaaaaataaatttctgattgattttaaccgtcatctgcttatattttgggggcccctcctcattgctgctatccagcacacagatttgtgcttgtgtctgatttgtttaataaagggaggcttattttaa

SEQ ID NO: 15797 - DNA, 2963 bp, Homo sapiens
  source 1..2963: mol_type = unassigned DNA
agaagaccacagaaatgcctccaggaggcaggctgggatccagggtccaaccaatattcttgtgagagtgtgaagccaaggaacacgaaagaggggaacaccttggctaagaatgtattcgtgacagaggagaaggggaggaacaggaagcctccagctagtcgtttggaatctggcaaccatttctgtcagctttctcattcctagattgatgcagattgcttaattccttgagcttaaccagctcgaaaaagcagtggaagcagctcacacatttttcgtggctaaccctgagcacatggaaatgcagcagaacattgagaattacagggcgacagctggtgttgaagcattgcagttggtagacagagaagccaagccacacatggagagttacaatgcaggagttaaacattatgaggctgatgactttgagatggctatcaggcacttcgaacaagccttaagagaatatttcgttgaagatacagaatgccggaccctatgtgaggggcctcagagatttgaagaatatgagtatttagggtataaggctggtctgtatgaagctattgcagatcactacatgcaggtgcttgtttgtcagcatgaatgtgtgagggaacttgccacccgccctggccgcctctctcccatcgagaattttcttcctctgcactatgattacctacagtttgcctactatcgagttggtgagtatgtgaaagccctggagtgtgccaaagcctatcttctatgccatccagatgatgaggatgtcctagacaatgtggattactatgagagtctgctggatgatagcattgacccggcatccattgaggccagagaggatttaacaatgtttgtgaaacgtcataagctggagtctgagctgataaaatcagctgcagaaggtctggggttttcatacactgaaccgaattattggatcagatatggaggacgacaggatgagaatcgggtcccttcaggagtgaacgtagagggagcagaagttcatggattctcaatgggaaaaaagctatcacccaagatagatcgagacctaagagaaggtggtcctctactctatgagaacatcacattcgtctacaactcggagcagctgaacgggactcagcgggttctcctggataacgtcctgtcggaagaacagtgccgggagctccacagcgtggccagtggaatcatgcttgttggtgatggatacagaggaaaaacttcaccccatacacccaatgaaaagtttgaaggtgcaactgtcctgaaagcactcaaatctggttatgaaggtcgagtcccactgaagagcgctcgtctgttttatgacatcagcgaaaaggctcgaaggattgtagaatcttattttatgctgaactcaactctgtatttttcctatacacacatggtctgccgaacagccctgtctggtcagcaggatagaagaaatgacctcagtcatcccatccatgctgacaactgtttgttggatccagaggccaacgaatgctggaaggagcctcctgcttacacatttcgagactatagtgctctcctatatatgaatgatgactttgaaggaggagaattcatattcacagagatggatgctaagactgtgactgcctctataaaaccaaaatgtgggcgcatgatcagcttctcatctggaggagagaaccctcatggggtgaaggcagtcaccaagggaaagaggtgtgctgtggctctgtggttcaccttggacccactttatagagaattggagcgaatacaggctgatgaagtgattgcaattctggatcaagaacagcaagggaagcatgaactgaatatcaaccctaaagatgagctataaaaatgagaaagaatgttctatcaaatatttatttaaattgttaatcttatgagaacctttttatttttgtacagagccatggtataaattaacaggttaatgtcagtcatcagatcttccttctcttcctaaggatgcttgtgttgcctcaatctatcaatctatctttcttgttttgggttgttttctctctctctctctctctctctcttcttagagacatggtctaaccatgttgtctaggatatagggcagtggctattcacagatgtgatgatagcacactggagcctcaaactcttaggctcaggcgatccttcaagcctcccggggagctgggaccacaggcacgtgccaccacacccagctctctttcttggtttttcatcatttcatgtatctatcaaagcccagttcacctcctcccccaaacacacacacacacacacacacacacacacacacacacaattaagttgctgcaaattcaaaagcttagagagaataagcttcttggtggtgaaactacaactctcacgtgtgctccagttctaaaattaacctgtgcctggtctctgaagccctttcttgctctgtgcctttcagccacatccttaggtgctaacggccatgagctccgactctccaaagtgagctccactttgggtctgaggagcccctggcagagtccacgctgcctcaggtatcatgggcgtaatgatcacccaggctccgggagatctcatggatgattactgtatgagacagaggggacttcagtctttccagggccttggtggaatttttggctctggtgttttcgccagacaataaacttacactggaagctttgattcaccctccacagtactccagaaaggactgtcctataagttgtacactttaaaaggtcatgtagaggttgtagtagaatggcttttcaccctggtgactttggaagaaactcttgaatactgcctgcatccgggcaccatggccaggttgcctaggagtggggtccactgatgaaaagaggtgttttgtacttacataagaaaaataaatttctgattgattttaa

SEQ ID NO: 15798 - DNA, 2993 bp, Homo sapiens
  source 1..2993: mol_type = unassigned DNA
gcgtttgcgagctaaggtcggagttctgcaccggcgggggcggggctctgcgtggccggggcgggctcgggatccgcggggcgactcccggtctggcttgggcaggctgcccgggccgtggcaggaagccggaagcagccgcggccccagttcgggagacatggcgggcgttaaagctctcgtggcattatccttcagtggggctattggactgacttttcttatgctgggatgtgccttagaggattatgggtgtacttctctgaagtaagatgatttgtcaaaaattctgtgtggttttgttacattgggaatttatttatgtgataactgcgtttaacttgtcatatccaattactccttggagatttaagttgtcttgcatgccaccaaattcaacctatgactacttccttttgcctgctggactctcaaagaatacttcaaattcgaatggacattatgagacagctgttgaacctaagtttaattcaagtggtactcacttttctaacttatccaaaacaactttccactgttgctttcggagtgagcaagatagaaactgctccttatgtgcagacaacattgaaggaaagacatttgtttcaacagtaaattctttagtttttcaacaaatagatgcaaactggaacatacagtgctggctaaaaggagacttaaaattattcatctgttatgtggagtcattatttaagaatctattcaggaattataactataaggtccatcttttatatgttctgcctgaagtgttagaagattcacctctggttccccaaaaaggcagttttcagatggttcactgcaattgcagtgttcatgaatgttgtgaatgtcttgtgcctgtgccaacagccaaactcaacgacactctccttatgtgtttgaaaatcacatctggtggagtaattttccagtcacctctaatgtcagttcagcccataaatatggtgaagcctgatccaccattaggtttgcatatggaaatcacagatgatggtaatttaaagatttcttggtccagcccaccattggtaccatttccacttcaatatcaagtgaaatattcagagaattctacaacagttatcagagaagctgacaagattgtctcagctacatccctgctagtagacagtatacttcctgggtcttcgtatgaggttcaggtgaggggcaagagactggatggcccaggaatctggagtgactggagtactcctcgtgtctttaccacacaagatgtcatatactttccacctaaaattctgacaagtgttgggtctaatgtttcttttcactgcatctataagaaggaaaacaagattgttccctcaaaagagattgtttggtggatgaatttagctgagaaaattcctcaaagccagtatgatgttgtgagtgatcatgttagcaaagttacttttttcaatctgaatgaaaccaaacctcgaggaaagtttacctatgatgcagtgtactgctgcaatgaacatgaatgccatcatcgctatgctgaattatatgtgattgatgtcaatatcaatatctcatgtgaaactgatgggtacttaactaaaatgacttgcagatggtcaaccagtacaatccagtcacttgcggaaagcactttgcaattgaggtatcataggagcagcctttactgttctgatattccatctattcatcccatatctgagcccaaagattgctatttgcagagtgatggtttttatgaatgcattttccagccaatcttcctattatctggctacacaatgtggattaggatcaatcactctctaggttcacttgactctccaccaacatgtgtccttcctgattctgtggtgaagccactgcctccatccagtgtgaaagcagaaattactataaacattggattattgaaaatatcttgggaaaagccagtctttccagagaataaccttcaattccagattcgctatggtttaagtggaaaagaagtacaatggaagatgtatgaggtttatgatgcaaaatcaaaatctgtcagtctcccagttccagacttgtgtgcagtctatgctgttcaggtgcgctgtaagaggctagatggactgggatattggagtaattggagcaatccagcctacacagttgtcatggatataaaagttcctatgagaggacctgaattttggagaataattaatggagatactatgaaaaaggagaaaaatgtcactttactttggaagcccctgatgaaaaatgactcattgtgcagtgttcagagatatgtgataaaccatcatacttcctgcaatggaacatggtcagaagatgtgggaaatcacacgaaattcactttcctgtggacagagcaagcacatactgttacggttctggccatcaattcaattggtgcttctgttgcaaattttaatttaaccttttcatggcctatgagcaaagtaaatatcgtgcagtcactcagtgcttatcctttaaacagcagttgtgtgattgtttcctggatactatcacccagtgattacaagctaatgtattttattattgagtggaaaaatcttaatgaagatggtgaaataaaatggcttagaatctcttcatctgttaagaagtattatatccatgatcattttatccccattgagaagtaccagttcagtctttacccaatatttatggaaggagtgggaaaaccaaagataattaatagtttcactcaagatgatattgaaaaacaccagagtgatgcaggtttatatgtaattgtgccagtaattatttcctcttccatcttattgcttggaacattattaatatcacaccaaagaatgaaaaagctattttgggaagatgttccgaaccccaagaattgttcctgggcacaaggacttaattttcagaagaaaatgcctggcacaaaggaactactgggtggaggttggttgacttag

SEQ ID NO: 15799 - DNA, 8227 bp, Homo sapiens
  source 1..8227: mol_type = unassigned DNA
ccggtctggcttgggcaggctgcccgggccgtggcaggaagccggaagcagccgcggccccagttcgggagacatggcgggcgttaaagctctcgtggcattatccttcagtggggctattggactgacttttcttatgctgggatgtgccttagaggattatgggtgtacttctctgaagtaagatgatttgtcaaaaattctgtgtggttttgttacattgggaatttatttatgtgataactgcgtttaacttgtcatatccaattactccttggagatttaagttgtcttgcatgccaccaaattcaacctatgactacttccttttgcctgctggactctcaaagaatacttcaaattcgaatggacattatgagacagctgttgaacctaagtttaattcaagtggtactcacttttctaacttatccaaaacaactttccactgttgctttcggagtgagcaagatagaaactgctccttatgtgcagacaacattgaaggaaagacatttgtttcaacagtaaattctttagtttttcaacaaatagatgcaaactggaacatacagtgctggctaaaaggagacttaaaattattcatctgttatgtggagtcattatttaagaatctattcaggaattataactataaggtccatcttttatatgttctgcctgaagtgttagaagattcacctctggttccccaaaaaggcagttttcagatggttcactgcaattgcagtgttcatgaatgttgtgaatgtcttgtgcctgtgccaacagccaaactcaacgacactctccttatgtgtttgaaaatcacatctggtggagtaattttccagtcacctctaatgtcagttcagcccataaatatggtgaagcctgatccaccattaggtttgcatatggaaatcacagatgatggtaatttaaagatttcttggtccagcccaccattggtaccatttccacttcaatatcaagtgaaatattcagagaattctacaacagttatcagagaagctgacaagattgtctcagctacatccctgctagtagacagtatacttcctgggtcttcgtatgaggttcaggtgaggggcaagagactggatggcccaggaatctggagtgactggagtactcctcgtgtctttaccacacaagatgtcatatactttccacctaaaattctgacaagtgttgggtctaatgtttcttttcactgcatctataagaaggaaaacaagattgttccctcaaaagagattgtttggtggatgaatttagctgagaaaattcctcaaagccagtatgatgttgtgagtgatcatgttagcaaagttacttttttcaatctgaatgaaaccaaacctcgaggaaagtttacctatgatgcagtgtactgctgcaatgaacatgaatgccatcatcgctatgctgaattatatgtgattgatgtcaatatcaatatctcatgtgaaactgatgggtacttaactaaaatgacttgcagatggtcaaccagtacaatccagtcacttgcggaaagcactttgcaattgaggtatcataggagcagcctttactgttctgatattccatctattcatcccatatctgagcccaaagattgctatttgcagagtgatggtttttatgaatgcattttccagccaatcttcctattatctggctacacaatgtggattaggatcaatcactctctaggttcacttgactctccaccaacatgtgtccttcctgattctgtggtgaagccactgcctccatccagtgtgaaagcagaaattactataaacattggattattgaaaatatcttgggaaaagccagtctttccagagaataaccttcaattccagattcgctatggtttaagtggaaaagaagtacaatggaagatgtatgaggtttatgatgcaaaatcaaaatctgtcagtctcccagttccagacttgtgtgcagtctatgctgttcaggtgcgctgtaagaggctagatggactgggatattggagtaattggagcaatccagcctacacagttgtcatggatataaaagttcctatgagaggacctgaattttggagaataattaatggagatactatgaaaaaggagaaaaatgtcactttactttggaagcccctgatgaaaaatgactcattgtgcagtgttcagagatatgtgataaaccatcatacttcctgcaatggaacatggtcagaagatgtgggaaatcacacgaaattcactttcctgtggacagagcaagcacatactgttacggttctggccatcaattcaattggtgcttctgttgcaaattttaatttaaccttttcatggcctatgagcaaagtaaatatcgtgcagtcactcagtgcttatcctttaaacagcagttgtgtgattgtttcctggatactatcacccagtgattacaagctaatgtattttattattgagtggaaaaatcttaatgaagatggtgaaataaaatggcttagaatctcttcatctgttaagaagtattatatccatgatcattttatccccattgagaagtaccagttcagtctttacccaatatttatggaaggagtgggaaaaccaaagataattaatagtttcactcaagatgatattgaaaaacaccagagtgatgcaggtttatatgtaattgtgccagtaattatttcctcttccatcttattgcttggaacattattaatatcacaccaaagaatgaaaaagctattttgggaagatgttccgaaccccaagaattgttcctgggcacaaggacttaattttcagaagccagaaacgtttgagcatctttttatcaagcatacagcatcagtgacatgtggtcctcttcttttggagcctgaaacaatttcagaagatatcagtgttgatacatcatggaaaaataaagatgagatgatgccaacaactgtggtctctctactttcaacaacagatcttgaaaagggttctgtttgtattagtgaccagttcaacagtgttaacttctctgaggctgagggtactgaggtaacctatgaggacgaaagccagagacaaccctttgttaaatacgccacgctgatcagcaactctaaaccaagtgaaactggtgaagaacaagggcttataaatagttcagtcaccaagtgcttctctagcaaaaattctccgttgaaggattctttctctaatagctcatgggagatagaggcccaggcattttttatattatcagatcagcatcccaacataatttcaccacacctcacattctcagaaggattggatgaacttttgaaattggagggaaatttccctgaagaaaataatgataaaaagtctatctattatttaggggtcacctcaatcaaaaagagagagagtggtgtgcttttgactgacaagtcaagggtatcgtgcccattcccagccccctgtttattcacggacatcagagttctccaggacagttgctcacactttgtagaaaataatatcaacttaggaacttctagtaagaagacttttgcatcttacatgcctcaattccaaacttgttctactcagactcataagatcatggaaaacaagatgtgtgacctaactgtgtaatttcactgaagaaaccttcagatttgtgttataatgggtaatataaagtgtaatagattatagttgtgggtgggagagagaaaagaaaccagagtcaaatttgaaaataattgttccaaatgaatgttgtctgtttgttctctcttagtaacatagacaaaaaatttgagaaagccttcataagcctaccaatgtagacacgctcttctattttattcccaagctctagtgggaaggtcccttgtttccagctagaaataagcccaacagacaccatcttttgtgagatgtaattgttttttcagagggcgtgttgttttacctcaagtttttgttttgtaccaacacacacacacacacacattcttaacacatgtccttgtgtgttttgagagtatattatgtatttatattttgtgctatcagactgtaggatttgaagtaggactttcctaaatgtttaagataaacagaattcagccctggcctaaggggttatacttgtgaagactaatgagccaattgttatgtaccaaatctaagatatgtaccatagaatgaaataacctgcaagaatggtgatgcccacaatcagtattttgatgacaacacaagcacttttgaaaacataatgtcagttttaattcttctctctgaaagatgttgaagtggtcactttctgataaagttagattgccaaatgtcactgtatatctctccggaataattgtcttcccccatccccacctggacatatcctattttttcccctcactgagcattctgtctacataaaccaaccactgtgcagtactttacataccttaacccagttaattattgaaataattgtatgagacatctgttactatgatactccttaaagatgaagacagtaaataatttgcccacagttacagtcagtgggtgatggaatcagagttcagatttaaatccagattttttaatgctaatgattatgtttttaacctataccctacatagccatcaatttaaaaaaactgacttgtaatcaaaatttattaagtagaggctggcacagtggtgcatgcctgtaatcccagcactttgggaggctgaggcgggtggatcgcttgagctcagaagtcttgaaactagccggggcaacatagtgaggcctcgtctctacaaaaaacacaaaaattagctgagtgtgacagaaaaaataaagattataaaatgtattaagtagaagtataatgctggatgagaaattaagtgagaattgcacagatctcatgtttgcctttaacaacttaagattaatacataagtttattatttattcaacttttggtacggtaaaaaaattcaaagacagcatattgggcaacaaactaaattaagaaacctgcacatttggatgttcagtggcaagaagaccttcaagaatatcagtatcatcaaaataagtactttagtgttcaaaaatatgcctatgggtttttaaaaattatcagaatttcatatttagaccgagacaagagactcccaattttactgttatcctaaataaatctctacattccatctctagtccagttgtggctatgaagtgagcagttctaaacaatgacaaagattccagaccccacttgatagatatttttcacactttataatcaatttccactcaggaatcaataaagttattccatgtcataagtatttttaagatgtctcaggatctcacatactcaactaatgacccccttacaagaaataggtaaagggctgatagcaactcattacttgatgtggtacgagagccttagttctatgcaaagataaatggagaagcgtttttttcatggataattttacatggctttagagacacagaaacagataaattattacatgtataaaaattttagtaaaattgacattttaaatacatgcttatagattattggtatttaattgaaggtacagtacagaagagatagaaaaataaattttgccccactctgaaattgaagactgacctctgagcatgtccgctgagacacagtattctcctgtgatctgggacccagaataacaggaaagagaaactgatagatgttttcatcagcccaaggatgtatgtatcttacttgagtgaattcaacagtcccaggaccactgtagtgctgtaggtctgtgtaaagaaatgtagtgacagcacattaacctgagatcattgataccatcttggttcagcctcagttccccagataagtgaacaaatgaacaaaaatgcacttcagaaatattgaaattccaaggcactatttcatggacagtgctgaacaagtatagtttggcctattggtatgtatagacttagatcatatttattgtcaatgggcttgaattctgatttccacttttgaaagtttatttcactatgtatcattacattttattgggaccttgtgaaaactacctgccatgaaatactggattttcacataatttagaaaaaatttagaatgttttatgcctcagaatggtcaggaacttcccatttcttcccacagcttctataaaaaaaatttaaaaggaaggaggagctgaaataggggctatggtcttttaaacttataaatctggaatttttaatatttcattttaaggccttaaaccgaaacacaagctactaatcagtctttctaaatctgaccttcattgaaagcaactcagaaattaataatttgtgctgtggcttcaagtttaaatagattgtttgaagagaaatcatatgtcagggtttgcaggattacaggatttctaacttaaacccccaagaacaatgaaaaagttgacgtacatgtcactatgaataggcaccttctgttggatctctgtgtccatttagagatgagctacaagttgacaagaaaaataggagcagttttttttttctttttaaacctagtcaccaaatggtaaaaggacttggatgaaattccaataccagtgtgagattctggatttagaataaggttttataaccttaggcatgtcattcttctacttctcatttttccctaataaaacttattctctcttccataatatcatatatatggtcacattacttcaggaatatttatattacctcctccaaaactgaaagaaaataaactttaggctgtaagagttgagaattatgcatacagggctcacaggcggagttggacaatatgctgatggatcaagacatactgcaaccacaaagttccatctcacttagatgtggatgaaaaaagatctcttgctaaattattttctgtgaccttaaaagaaatttgtttcacttttcatctttcaagggtcatcttgatagttaccttaacaaacctttctcagctatttattattgagaaagcccattcttaaattttaagtcacaaaattatagttgtccactctactatgactgaaagaagcagcattcaagaaaaaatttaaacatagttaccaagaaatgtgaagaagtatttataaaaggaagctacataagtaggtaattttactctttcttaaccagtttaaaacagtaaagcacacctgcatctaatcacaatgttaggcgaacaacttaaaacatgatcagcctgtatgagaactgggatattgttacatattcagcctgtatgagaactgggatattgttgttacatgtatttgtataaacattaggagatgatttccatggcttttttttttttttttttaggaagtcttgctctgttgcccagctggagtgcagtgatgtgatctcggctcactgcaacccctgcttcccaggttcaagcgattctcctgcctcagcctccccagtagctgggattacgggcacaccaccatgcccagcttttatttatttatttatttattttggatttttagtagagatggggttttgccctgttggccaggctggtcttgaactcctgacctcaagtgatccgccctcattggcctcccaaagttctgggattacaggtgtgagagctgccgcgcctagcccttcatgaggttttatagtgaatgaattatttttctataaagtttatcaatatttattttggaaagctgctgaaaatgtctttttcaaaattaattatgcttaagatgtatggcattaaattcaattttatgaggctttctgacatatttactaaaaaaacctggaactgagactgaatttggaagacatttaattttgtagtgagatatctatattgtagatattgtacttttaaaacctgtcattaagtgtttggcatgtggttaatactttctctttagtcacaactggtattttaataaatgttataaacgtaagtgccaagatatgcatcactaactgttctatgaaatttgtctacttctcctttatgttcccaaagtcacagagaaagcagtgtactttatgacagtatatttatctttttatcattatgaattataagcagtgttaattttgagaaataaaagtccaaaaagaa

SEQ ID NO: 15800 - DNA, 2805 bp, Homo sapiens
  source 1..2805: mol_type = unassigned DNA
gtgtacttctctgaagtaagatgatttgtcaaaaattctgtgtggttttgttacattgggaatttatttatgtgataactgcgtttaacttgtcatatccaattactccttggagatttaagttgtcttgcatgccaccaaattcaacctatgactacttccttttgcctgctggactctcaaagaatacttcaaattcgaatggacattatgagacagctgttgaacctaagtttaattcaagtggtactcacttttctaacttatccaaaacaactttccactgttgctttcggagtgagcaagatagaaactgctccttatgtgcagacaacattgaaggaaagacatttgtttcaacagtaaattctttagtttttcaacaaatagatgcaaactggaacatacagtgctggctaaaaggagacttaaaattattcatctgttatgtggagtcattatttaagaatctattcaggaattataactataaggtccatcttttatatgttctgcctgaagtgttagaagattcacctctggttccccaaaaaggcagttttcagatggttcactgcaattgcagtgttcatgaatgttgtgaatgtcttgtgcctgtgccaacagccaaactcaacgacactctccttatgtgtttgaaaatcacatctggtggagtaattttccagtcacctctaatgtcagttcagcccataaatatggtgaagcctgatccaccattaggtttgcatatggaaatcacagatgatggtaatttaaagatttcttggtccagcccaccattggtaccatttccacttcaatatcaagtgaaatattcagagaattctacaacagttatcagagaagctgacaagattgtctcagctacatccctgctagtagacagtatacttcctgggtcttcgtatgaggttcaggtgaggggcaagagactggatggcccaggaatctggagtgactggagtactcctcgtgtctttaccacacaagatgtcatatactttccacctaaaattctgacaagtgttgggtctaatgtttcttttcactgcatctataagaaggaaaacaagattgttccctcaaaagagattgtttggtggatgaatttagctgagaaaattcctcaaagccagtatgatgttgtgagtgatcatgttagcaaagttacttttttcaatctgaatgaaaccaaacctcgaggaaagtttacctatgatgcagtgtactgctgcaatgaacatgaatgccatcatcgctatgctgaattatatgtgattgatgtcaatatcaatatctcatgtgaaactgatgggtacttaactaaaatgacttgcagatggtcaaccagtacaatccagtcacttgcggaaagcactttgcaattgaggtatcataggagcagcctttactgttctgatattccatctattcatcccatatctgagcccaaagattgctatttgcagagtgatggtttttatgaatgcattttccagccaatcttcctattatctggctacacaatgtggattaggatcaatcactctctaggttcacttgactctccaccaacatgtgtccttcctgattctgtggtgaagccactgcctccatccagtgtgaaagcagaaattactataaacattggattattgaaaatatcttgggaaaagccagtctttccagagaataaccttcaattccagattcgctatggtttaagtggaaaagaagtacaatggaagatgtatgaggtttatgatgcaaaatcaaaatctgtcagtctcccagttccagacttgtgtgcagtctatgctgttcaggtgcgctgtaagaggctagatggactgggatattggagtaattggagcaatccagcctacacagttgtcatggatataaaagttcctatgagaggacctgaattttggagaataattaatggagatactatgaaaaaggagaaaaatgtcactttactttggaagcccctgatgaaaaatgactcattgtgcagtgttcagagatatgtgataaaccatcatacttcctgcaatggaacatggtcagaagatgtgggaaatcacacgaaattcactttcctgtggacagagcaagcacatactgttacggttctggccatcaattcaattggtgcttctgttgcaaattttaatttaaccttttcatggcctatgagcaaagtaaatatcgtgcagtcactcagtgcttatcctttaaacagcagttgtgtgattgtttcctggatactatcacccagtgattacaagctaatgtattttattattgagtggaaaaatcttaatgaagatggtgaaataaaatggcttagaatctcttcatctgttaagaagtattatatccatgatcattttatccccattgagaagtaccagttcagtctttacccaatatttatggaaggagtgggaaaaccaaagataattaatagtttcactcaagatgatattgaaaaacaccagagtgatgcaggtttatatgtaattgtgccagtaattatttcctcttccatcttattgcttggaacattattaatatcacaccaaagaatgaaaaagctattttgggaagatgttccgaaccccaagaattgttcctgggcacaaggacttaattttcagaagaaaatgcctggcacaaaggaactactgggtggaggttggttgacttaggaaatgcttgtagactacgtcctacctcgctgccgcacctgctctccctgaggtgtgcacaatg

SEQ ID NO: 15801 - DNA, 3079 bp, Homo sapiens
  source 1..3079: mol_type = unassigned DNA
ccggtctggcttgggcaggctgcccgggccgtggcaggaagccggaagcagccgcggccccagttcgggagacatggcgggcgttaaagctctcgtggcattatccttcagtggggctattggactgacttttcttatgctgggatgtgccttagaggattatgggtgtacttctctgaagtaagatgatttgtcaaaaattctgtgtggttttgttacattgggaatttatttatgtgataactgcgtttaacttgtcatatccaattactccttggagatttaagttgtcttgcatgccaccaaattcaacctatgactacttccttttgcctgctggactctcaaagaatacttcaaattcgaatggacattatgagacagctgttgaacctaagtttaattcaagtggtactcacttttctaacttatccaaaacaactttccactgttgctttcggagtgagcaagatagaaactgctccttatgtgcagacaacattgaaggaaagacatttgtttcaacagtaaattctttagtttttcaacaaatagatgcaaactggaacatacagtgctggctaaaaggagacttaaaattattcatctgttatgtggagtcattatttaagaatctattcaggaattataactataaggtccatcttttatatgttctgcctgaagtgttagaagattcacctctggttccccaaaaaggcagttttcagatggttcactgcaattgcagtgttcatgaatgttgtgaatgtcttgtgcctgtgccaacagccaaactcaacgacactctccttatgtgtttgaaaatcacatctggtggagtaattttccagtcacctctaatgtcagttcagcccataaatatggtgaagcctgatccaccattaggtttgcatatggaaatcacagatgatggtaatttaaagatttcttggtccagcccaccattggtaccatttccacttcaatatcaagtgaaatattcagagaattctacaacagttatcagagaagctgacaagattgtctcagctacatccctgctagtagacagtatacttcctgggtcttcgtatgaggttcaggtgaggggcaagagactggatggcccaggaatctggagtgactggagtactcctcgtgtctttaccacacaagatgtcatatactttccacctaaaattctgacaagtgttgggtctaatgtttcttttcactgcatctataagaaggaaaacaagattgttccctcaaaagagattgtttggtggatgaatttagctgagaaaattcctcaaagccagtatgatgttgtgagtgatcatgttagcaaagttacttttttcaatctgaatgaaaccaaacctcgaggaaagtttacctatgatgcagtgtactgctgcaatgaacatgaatgccatcatcgctatgctgaattatatgtgattgatgtcaatatcaatatctcatgtgaaactgatgggtacttaactaaaatgacttgcagatggtcaaccagtacaatccagtcacttgcggaaagcactttgcaattgaggtatcataggagcagcctttactgttctgatattccatctattcatcccatatctgagcccaaagattgctatttgcagagtgatggtttttatgaatgcattttccagccaatcttcctattatctggctacacaatgtggattaggatcaatcactctctaggttcacttgactctccaccaacatgtgtccttcctgattctgtggtgaagccactgcctccatccagtgtgaaagcagaaattactataaacattggattattgaaaatatcttgggaaaagccagtctttccagagaataaccttcaattccagattcgctatggtttaagtggaaaagaagtacaatggaagatgtatgaggtttatgatgcaaaatcaaaatctgtcagtctcccagttccagacttgtgtgcagtctatgctgttcaggtgcgctgtaagaggctagatggactgggatattggagtaattggagcaatccagcctacacagttgtcatggatataaaagttcctatgagaggacctgaattttggagaataattaatggagatactatgaaaaaggagaaaaatgtcactttactttggaagcccctgatgaaaaatgactcattgtgcagtgttcagagatatgtgataaaccatcatacttcctgcaatggaacatggtcagaagatgtgggaaatcacacgaaattcactttcctgtggacagagcaagcacatactgttacggttctggccatcaattcaattggtgcttctgttgcaaattttaatttaaccttttcatggcctatgagcaaagtaaatatcgtgcagtcactcagtgcttatcctttaaacagcagttgtgtgattgtttcctggatactatcacccagtgattacaagctaatgtattttattattgagtggaaaaatcttaatgaagatggtgaaataaaatggcttagaatctcttcatctgttaagaagtattatatccatgatcattttatccccattgagaagtaccagttcagtctttacccaatatttatggaaggagtgggaaaaccaaagataattaatagtttcactcaagatgatattgaaaaacaccagagtgatgcaggtttatatgtaattgtgccagtaattatttcctcttccatcttattgcttggaacattattaatatcacaccaaagaatgaaaaagctattttgggaagatgttccgaaccccaagaattgttcctgggcacaaggacttaattttcagaagatgcttgaaggcagcatgttcgttaagagtcatcaccactccctaatctcaagtacccagggacacaaacactgcggaaggccacagggtcctctgcataggaaaaccagagacctttgttcacttgtttatctgctgaccctccctccactattgtcctatgaccctgccaaatccccctctgtgagaaacacccaagaatgatcaataaaaaaaaaaaa

SEQ ID NO: 15802 - DNA, 5135 bp, Homo sapiens
  source 1..5135: mol_type = unassigned DNA
ccggtctggcttgggcaggctgcccgggccgtggcaggaagccggaagcagccgcggccccagttcgggagacatggcgggcgttaaagctctcgtggcattatccttcagtggggctattggactgacttttcttatgctgggatgtgccttagaggattatgggtgtacttctctgaagtaagatgatttgtcaaaaattctgtgtggttttgttacattgggaatttatttatgtgataactgcgtttaacttgtcatatccaattactccttggagatttaagttgtcttgcatgccaccaaattcaacctatgactacttccttttgcctgctggactctcaaagaatacttcaaattcgaatggacattatgagacagctgttgaacctaagtttaattcaagtggtactcacttttctaacttatccaaaacaactttccactgttgctttcggagtgagcaagatagaaactgctccttatgtgcagacaacattgaaggaaagacatttgtttcaacagtaaattctttagtttttcaacaaatagatgcaaactggaacatacagtgctggctaaaaggagacttaaaattattcatctgttatgtggagtcattatttaagaatctattcaggaattataactataaggtccatcttttatatgttctgcctgaagtgttagaagattcacctctggttccccaaaaaggcagttttcagatggttcactgcaattgcagtgttcatgaatgttgtgaatgtcttgtgcctgtgccaacagccaaactcaacgacactctccttatgtgtttgaaaatcacatctggtggagtaattttccagtcacctctaatgtcagttcagcccataaatatggtgaagcctgatccaccattaggtttgcatatggaaatcacagatgatggtaatttaaagatttcttggtccagcccaccattggtaccatttccacttcaatatcaagtgaaatattcagagaattctacaacagttatcagagaagctgacaagattgtctcagctacatccctgctagtagacagtatacttcctgggtcttcgtatgaggttcaggtgaggggcaagagactggatggcccaggaatctggagtgactggagtactcctcgtgtctttaccacacaagatgtcatatactttccacctaaaattctgacaagtgttgggtctaatgtttcttttcactgcatctataagaaggaaaacaagattgttccctcaaaagagattgtttggtggatgaatttagctgagaaaattcctcaaagccagtatgatgttgtgagtgatcatgttagcaaagttacttttttcaatctgaatgaaaccaaacctcgaggaaagtttacctatgatgcagtgtactgctgcaatgaacatgaatgccatcatcgctatgctgaattatatgtgattgatgtcaatatcaatatctcatgtgaaactgatgggtacttaactaaaatgacttgcagatggtcaaccagtacaatccagtcacttgcggaaagcactttgcaattgaggtatcataggagcagcctttactgttctgatattccatctattcatcccatatctgagcccaaagattgctatttgcagagtgatggtttttatgaatgcattttccagccaatcttcctattatctggctacacaatgtggattaggatcaatcactctctaggttcacttgactctccaccaacatgtgtccttcctgattctgtggtgaagccactgcctccatccagtgtgaaagcagaaattactataaacattggattattgaaaatatcttgggaaaagccagtctttccagagaataaccttcaattccagattcgctatggtttaagtggaaaagaagtacaatggaagatgtatgaggtttatgatgcaaaatcaaaatctgtcagtctcccagttccagacttgtgtgcagtctatgctgttcaggtgcgctgtaagaggctagatggactgggatattggagtaattggagcaatccagcctacacagttgtcatggatataaaagttcctatgagaggacctgaattttggagaataattaatggagatactatgaaaaaggagaaaaatgtcactttactttggaagcccctgatgaaaaatgactcattgtgcagtgttcagagatatgtgataaaccatcatacttcctgcaatggaacatggtcagaagatgtgggaaatcacacgaaattcactttcctgtggacagagcaagcacatactgttacggttctggccatcaattcaattggtgcttctgttgcaaattttaatttaaccttttcatggcctatgagcaaagtaaatatcgtgcagtcactcagtgcttatcctttaaacagcagttgtgtgattgtttcctggatactatcacccagtgattacaagctaatgtattttattattgagtggaaaaatcttaatgaagatggtgaaataaaatggcttagaatctcttcatctgttaagaagtattatatccatgatcattttatccccattgagaagtaccagttcagtctttacccaatatttatggaaggagtgggaaaaccaaagataattaatagtttcactcaagatgatattgaaaaacaccagagtgatgcaggtttatatgtaattgtgccagtaattatttcctcttccatcttattgcttggaacattattaatatcacaccaaagaatgaaaaagctattttgggaagatgttccgaaccccaagaattgttcctgggcacaaggacttaattttcagaagagaacggacattctttgaagtctaatcatgatcactacagatgaacccaatgtgccaacttcccaacagtctatagagtattagaagatttttacattttgaagaaggggagcaaatctaaaaaaaattcagttgaacttctgagagttaacatatggtggattatgttgatttagaacttaaaatagatgtgtaaatttgggttcaaaatgtagatttgagtccagtttggatgtgtgattaattttcaaatcatctaaagtttaaaagtagtattcatgatttctggcttttgatttgtcatattcctggtcataaaacattaagaaaattatggctgttgctgtcattacatatctattaaatgtcatcaaatatgtagtagacaatgctgtaattaggtgaactctaaaactgcaacatctgacaaatagctttaaaaatacaatgattataagtatggaatcagtgaaaatatttagtttgtatttttatgtccaaacttttccattttagattcctttatagacacgtcagcctaaaaatcagcctattcgggtgttcttttgaatatctcctggcatttttgtatctaactttgttcaatctgggaatttcagttttcaatatccttgaaaatggcttaagtgataacttccgtttcagttaaaaggaagcccgaagttgtgtttgtgctgcccacaggacagtgggagttacagttcatatcaggatgaccctacatacccaggtcagattgacgggaccagaagggaacatcgacttctaatccagctttcttgtttaattatgacctaaatctaatttacttccactgaaccatccaagacctctggcaggcagggaaatgggcagtgatgcaaaaaagggagactctttggagcttttatgaatagttcatggtgaggacagaacttttctactttcagacagactgcttgctagttttatgaattcagcacacgaattatgctgcgttgctcacattcaaaccaaaccaacgactatgtttaatgaactcagtattcaaatttattatatatgcgtatatatgtatatatggatcccttatatttagatttaactcgtagttttatttgaaagtagaaaagaactctacaaaaacgggaagaatgtgtctttcttcccttcttgacttctaataggtgtcattgaaatgtaaaatctaagtatgaaattatgaaaggacattctttaattactgcccactcaacacatatttaatatgtgcccagattattctaaaatcttaaaaaaagatgcatatagtgaaattttttaaatggatatacttttaataaagttttataactcactgacaaaacatatttcaatagtatatgagtatgagatttcttatcaattatgagtgaaatattctatctgaatgcattggaaggcatttacagtatttgctttcaacagttactgagtatgacattttagcatgaaatatatcaaacacatcatttgaaggacatatgtaatcttgactatggttatggtttttttgtatgtattccttgttttcatattgatagcatctaattcttttgacaatcttaatatgtaggttcatttaaattttaagacagttcagtgcatatatagtagaagccttaagaaaaaagaaaatgagcaagcaaatatttgaagaaatgtataaaaccatagatttctttcagaaaaaaaaaacaggcataggaacagttttctcttcatatattatgattatgaataataggaaagttgtattaattcagtatttgtcattatgcagtattttaatacctacataagtctattccattattatattttgcgcttggcatatttattcctttatgcttttaatcactaacatattttacttaagagtataaaactatgctaaataaattgtattgtatatggaatatgcttgccattatgaagaacagctgggtataccattatttcaagtaataaatctgaattctattagtttaaaaattgtaaaattcaagttaaatgacgtgtatgatatataagctgaacacattttctatagcccttaatttagttgtgttaatttttcaaggtgatgtatcaacagctttttttattttgcatttgttttttcaatgtgtttacattgtatgaattgagctttttgcccacagattcttgatttgtagttgtttggcaggatttttctttgtgatataatcacttctataaaaaatatgatgtaca

SEQ ID NO: 15803 - DNA, 1523 bp, Homo sapiens
  source 1..1523: mol_type = unassigned DNA
gagacatggcgggcgttaaagctctcgtggcattatccttcagtggggctattggactgacttttcttatgctgggatgtgccttagaggattatgggtgtacttctctgaagtaagatgatttgtcaaaaattctgtgtggttttgttacattgggaatttatttatgtgataactgcgtttaacttgtcatatccaattactccttggagatttaagttgtcttgcatgccaccaaattcaacctatgactacttccttttgcctgctggactctcaaagaatacttcaaattcgaatggacattatgagacagctgttgaacctaagtttaattcaagtggtactcacttttctaacttatccaaaacaactttccactgttgctttcggagtgagcaagatagaaactgctccttatgtgcagacaacattgaaggaaagacatttgtttcaacagtaaattctttagtttttcaacaaatagatgcaaactggaacatacagtgctggctaaaaggagacttaaaattattcatctgttatgtggagtcattatttaagaatctattcaggaattataactataaggtccatcttttatatgttctccagaaacgtttgagcatctttttatcaagcatacagcatcagtgacatgtggtcctcttcttttggagcctgaaacaatttcagaagatatcagtgttgatacatcatggaaaaataaagatgagatgatgccaacaactgtggtctctctactttcaacaacagatcttgaaaagggttctgtttgtattagtgaccagttcaacagtgttaacttctctgaggctgagggtactgaggtaacctatgaggacgaaagccagagacaaccctttgttaaatacgccacgctgatcagcaactctaaaccaagtgaaactggtgaagaacaagggcttataaatagttcagtcaccaagtgcttctctagcaaaaattctccgttgaaggattctttctctaatagctcatgggagatagaggcccaggcattttttatattatcagatcagcatcccaacataatttcaccacacctcacattctcagaaggattggatgaacttttgaaattggagggaaatttccctgaagaaaataatgataaaaagtctatctattatttaggggtcacctcaatcaaaaagagagagagtggtgtgcttttgactgacaagtcaagggtatcgtgcccattcccagccccctgtttattcacggacatcagagttctccaggacagttgctcacactttgtagaaaataatatcaacttaggaacttctagtaagaagacttttgcatcttacatgcctcaattccaaacttgttctactcagactcataagatcatggaaaacaagatgtgtgacctaactgtgtaatttcactgaagaaaccttcagatttgtgttataatgggtaatataaagtgtaatagattatagttgtgggtgggagagagaaaagaa

SEQ ID NO: 15804 - DNA, 4622 bp, Homo sapiens
  source 1..4622: mol_type = unassigned DNA
gttctgcaccggcgggggcggggctctgcgtggccggggcgggctcgggatccgcggggcgactcccggtctggcttgggcaggctgcccgggccgtggcaggaagccggaagcagccgcggccccagttcgggagacatggcgggcgttaaagctctcgtggcattatccttcagtggggctattggactgacttttcttatgctgggatgtgccttagaggattatggcgtttactggcccttattcgtcctgattttccacgccatctcccccatcccccatttcattgccaaaagagtcacctatgactcagatgcaaccagtagtgcctgtcgggaactggcatatttcttcactactggaattgttgtttctgcctttggatttcctgttattcttgctcgtgtggctgtgatcaaatggggagcctgcggccttgtgttggcaggcaatgcagtcattttccttacaattcaagggtttttccttatatttggaagaggagatgattttagctgggagcagtggtagcactttattctgattacagtgcattgaatttcttagaactcatactatctgtatacatgtgcacatgcggcattttactatgaaatttaatatgctgggttttttaatacctttatatatcatgttcactttaagaaagacttcataagtaggagatgagttttattctcagcaaatagacctgtcaaatttagattatgttactcaaattatgttacttgtttggctgttcatgtagtcacggtgctctcagaaaatatattaacgcagtcttgtaggcagctgccaccttatgcagtgcatcgaaaccttttgcttggggatgtgcttggagaggcagataacgctgaagcaggcctctcatgacccaggaaggccggggtggatccctctttgtgttgtagtccatgctattaaaagtgtggcccacagaccaagagcctcaacatttcctagagccttattagaaatgcagaatctgaagccccactctggacccaggacattttgatgagatccaaaggagttgtatgcacatgaaagtttgagaagcatcatcatagagaagtaaacatcacacccaacttccttatctttccagtggctaaaccacttaacctctctgggtgttacctgctcatttgtttaaaaaaaaaaaaaaagtctcacctgctttcatgctgaggacaagttcagatgttcaagcctataatatttaggcagttcctcaaatttatgaaaagtgttctcagaattgggagacagtcaaagggtacaaagcctcagttaggaggaataagtgtgatttttttttaaagatcacttgcacagcatgctaaatataggaataattgaatgtatatttcaatattgctaagagagtaaatttctaatgttctcataaaaaagttaaatatttgagatcatatgttaattagtgtaatcattccaccttatattcaaaaatcataaaaccgtattgtaccctataaaaatatacaataatttgtcaatatataatcaaaataaaaaacaaaacatactctctcccccaaaaaaacatctcagtggggaacagatgtatcttttcatctgaaagacaatgctgggggaagagctccactgagatgcgggcagggaggctgggctcgagccagcccctgcgttagcaggagggggagaacagataggtaactcttttacatttcctttatgatctggcacttctccccagctccttccctctgccccccacccctactcctcaacagttctggtttgccctgacttctctacggctctggcttcttcccgaagagatataggagccatgtaagcacgcagtgggtgaactgcttaatttcactacgtgttgatgtacttgtcttccgtcctgtaggtcttttctatataactttatgccacccttaaatgaatcattgggtatacctgtcatgttggatcctgtaatcacagttttccctgctcacctttttgtctaagatctattgagaaagggaaatatgggaaggagaaccatttgatcagaatacaaccaatagtctttaagcattgttaaagtatgaaactgaaatacattcaaaacacttaatccttgaggcttgtgatctgagtaattagcaggtatgatgctgggactggaaaatagaaagtaataactaaagggttaatgtgcaacgttattttttggccttgttcatgattttatgttttcagtgtcctgtgtacatatagaattgttaaagttgtcatttccaatatttatattagaaaaattatttagatactttataattttaaccggcatttttaataatgacacttgcatttattgtattgtaataaatttcacttttaactttaaaagtttaactttaaaatttttttgtgatgttgccttgcctgaaaagataacaaaaatgagagaatttcttgatgttttaaaatgggcagttttgagcaataatctgtcctaacagaacagtagcaataagttttaggataccatcttgaatgtctagttggtgtgcaatagcttttctttctaagatggcaataatgattcatttctactacattttgcaaaagtgtttttgttgcttatacacattttcaataaccaaggtagccttcatatgtagccttaaagcattacctcttgattgtatctttagattgatataaagtacttgcatatagagtatttgaagtgatagattattagatttgctctatgtctgaaaagagagctattctgcagtgcctaaatatcatttaaacagtaaatattaataggaaatattgctatatctgaatatataatacaaaagtttgatcatggtgacacaaatgttggacatttttttccttataaaaggctctttttttatatattgtacaatatatttggagattcagagcatagtgactatagtcgaaaactgagattgcacttccaaaattggccacaagtaaataatcttatgaagggattctttatcatgtttcaaacaagtgggttacaagcagactttgagacacttttccacagaaacaatactatgaattggtgattgagttcccaggccaagcctccctcaacaggttcaactctaatatacctaacctgtgatactgaaggtgcctgcctgagttttgggtctctgagacagggtagtgtgagtagtttggaggaaggacagtgcaactttccaccccttttcctaagaacaaggtctttctccttttaatttttccactcattttcacctcctaatgcccttgagatccaggtacactcctgggagttttgttcacctctcccaactgagaaccttcccactgggctccatcctccctcctgaggttcttcatattccagagtcacccacccttctcctcccattagtcagttctctaagtacagctgatgtcatgtggtgctgagaagaaagcagatcacacttcatcacagaaagaatgccttgtgattatcttctccacatctgaaattccttttgacacctgcattgggccgactgccattcccatgactgctgcacctgcgtttttagagaatgcctcataacccactgattctcattcacagagaatgggagaacggaatgaagaaagattccagcagcttatagaaggatagcaatattttgggacagggaaaatcctgtcatacctcatctcttcctcaggaggagttctgagctggtcctgcttttcatagttgtttcttttcttccacttaagaactcatagatttttcttactgtcctaaggaagtccttacctctgaggtatctcctcaatgaatactgttttcaaggctgaaatagttcattatgttaataaccttctttatgttctcagggaaatgcttaggtggtgtcacaaaatgtgccttttcttttctttttttttttttttttttgaggcagagtctcgctctgttgcccaggctggagtgcagtggtgcgatcttggctcactgcaagctccgcctcccgggttcacgccattctcctgcctcagcctcccaaggagctgggactacaggctcccgccaccacgcctggctaatttttttgtatttttagtaaagacgggtttcatcgtgttagccaggatggtctcgatctcctgacctcatgatccgcccgcctctgcctcccaaagtgctgggattacaggcctgagccactgtgcccagccaaaatgtgcctttgcaaagtttgcgaaatcagattttgtatcccaatagaaccaaaatatttatgaggatgctagcattttccaagcatagtaattagttcacaactgagaaatattatgtctgtagtagataaatattagttgtgcattttaatttaattctcctttttccattttgtctcatgaagtaccttattgcaaaaatcccactgagtaatagctcataaattataatctttcaaatagccatgctaccagcgtacaacagtgatacatgtaaccccaaatgtgatgtgagaggacgattactttgtaaataaaacttgttattgacattttaa

SEQ ID NO: 15805 - DNA, 3173 bp, Homo sapiens
  source 1..3173: mol_type = unassigned DNA
gctgcgtcgcgcacttccgggtgttgtctggccgccgtagcgcgtcttgggtctcccggctgccgctgctgccgccgccgcctcgggtcgtggagccaggagcgacgtcaccgccatggcaggcatcaaagctttgattagtttgtcctttggaggagcaatcggactgatgtttttgatgcttggatgtgcccttccaatatacaacaaatactggcccctctttgttctatttttttacatcctttcacctattccatactgcatagcaagaagattagtggatgatacagatgctatgagtaacgcttgtaaggaacttgccatctttcttacaacgggcattgtcgtgtcagcttttggactccctattgtatttgccagagcacatctgattgagtggggagcttgtgcacttgttctcacaggaaacacagtcatctttgcaactatactaggctttttcttggtctttggaagcaatgacgacttcagctggcagcagtggtgaaaagaaattactgaactattgtcaaatggacttcctgtcatttgttggccattcacgcacacaggagatggggcagttaatgctgaatggtatagcaagcctcttgggggtattttaggtgctcccttctcacttttattgtaagcatactattttcacagagacttgctgaaggattaaaaggattttctcttttggaaaagcttgactgatttcacacttatctatagtatgctttttgtggtgtcctgctgaatttaaatatttatgtgtttttcctgttaggttgattttttttggaatcaatatgcaatgttaaacacttttttaatgtaatcatttgcattggttaggaattcagaattccgccggctctattactggtcaagtacatcttttctcttaaaattatttagcctccattattacaaaaaattataaaaataagttttcagtcagtcaggatgacatcactcccaatgttatgcagacatacagacggttggcatacgttatagactgtatactcagtgcaaatatagctgcatttatacctcagaggggccaagtgttaatgcccatgccctccgttaagggttgttggttttactggtagacagatgttttgtggattgaaaattattttatggaattgctacagaggagtgcttttcttctcaattgttagaagaatttatgttaaactttaaggtaagggtgtaaaaacatttttgagataaggtttttatttatgtttattattgttagagtgagttgcaatgtgggaagaaatgacattgaaattccagtttttgaatcctgtttctatttataagtgaaatttgtgatctcctatcaacctttcatgttttaccctgttaaaatggacatacatggaaccactactgatgagggacagttgtatgtttgcatcatatatgccagaaaaccttcctctgcttcctccttttgacttatttggtatgttgtatatattacataaaataacttttcaaatatagtttaataacacttagaagtgtttacttacctggaaaataattgctatgccgtacattcagagtgccccctcccctgcaaggccttgccatgattaacaagtaacttgttagtcttacagataattcatgcattaacagtttaagatttagaccatggtaatagtagttcttattctctaaggttatatcatatgtaatttaaaagtatttttaagacaagtttcctgtatacctctgaactgttttgattttgagttcatcatgatagatctgctgtttccttataaaaggcatttgttgtgtgagttaatgcaaagtagccaagtccagctatatagcagcttcagaaacatacctgaccaaaaaattcccagtaaccaggcatgatcaatttatagtggtcgtttacatctaataattatcaggacttttttcaggagtgggttataaaaacattcaagttggtctgacagtattttgttaaggatatttgtttgtatgtttattcagtatacttacataaaaattatttcgccatcagccaaaactcagtaatcatgacagctgtctgttgttttatgaagtttatttctcaagaaaatgggaataaatttgggatttgttcagcttttttactaaagatgcctaaagccacaggttttattgcctaacttaagccatgacttttagatatgagatgacgggaagcaggacgaaatatcggcgtgtggctggagccttcccactggaggctgaaagtggcttgtggtattataatgttcagatttcaagaggaaggtgcaggtacacatgagttagagagctggtgagacagttgggaactctttgtgcttgtgatctactggacttttttttgcaggaagtgcattctctggtccttccctattttctgttctggatgtcagtgcagtgcactgctactgttttatccacttggccacagactttttctaacagctgcgtattatttctatatactaactgcattggcagcattgtgtctttgaccttgtatactagcttgacatagtgctgtctctgatttctaggctagttacttgagatatgaattttccatagaatatgcactgatacaatattaccattcttctatggaaagaaaacttttgatgatgaaacaataaagattttaaatatctattttagtttgtgggtgtttttgaaatgaaaatatatggcacactttcattctgaagtgcattaacattctaataaggtgatgtaaagcaagatgacattggtgtaatgttagagttgcagaagtttccattccaaaataaaatggaaaccatagttacagatattacaatgcagccctgtaattttgagctgtagtaaaaggattggtaatctgggaagtagaatttttacaaaatcttttacaaaaatagtcataaaaggttttgttgacatttaagactactactgatctaaaggcaaggtcctacttcttaaattttcagaacatttttatgacttcttattatgtatttattaccactcattattatagcatgttactttttgcaaacattttaaacaaaaaatatttctgtttggtacactgtgaagagagaaaagtactgttctgtattttc

SEQ ID NO: 15806 - DNA, 1389 bp, Homo sapiens
  source 1..1389: mol_type = unassigned DNA
tcgggtcgtggagccaggagcgacgtcaccgccatggcaggcatcaaagctttgattagtttgtcctttggaggagcaatcggactgatgtttttgatgcttggatgtgcccttccaatatacaacaaatactggcccctctttgttctatttttttacatcctttcacctattccatactgcatagcaagaagattagtggatgatacagatgctatgagtaacgcttgtaaggaacttgccatctttcttacaacgggcattgtcgtgtcagcttttggactccctattgtatttgccagagcacatctgatggggcgcctacccttcttcagcaagatgggaacagctgagtctgaaggaagagaaacactgacacagcagctgcctctcccagcagccgccatgagaagattgttacctgcaagcagagtgtccactcaacccgtgctgaggctggcagacagtgctgagtcacttctgggcaggcctgctctgtgggctctaggattcctgctttgccctccctctcaggcacaatgacaactactgctcagtgccagacactgcaccatgtaggcaacacgtggcagtgatgattagtcacaaaatcacatttatattcattctaatgaaactgccattgcaaaattataactgagacagtgaaagaagtctgacctaaccaactccatcttgcttctaacctccaagctgtccttgttcattcccgggactcattttgggaggaacttagttaatagcttacagtttaaaacaaagacaatcacagacctttcccaaaacaaacccccttcttgcctggaaactagactgcctttgtaggattaacaaattagccgaaagattagaaattatggtttaggagtcatgcagctggagatgacaagattctgacactcctccaattgctcctggggataacattactattctaaggcctaacatcagtgcttgagatgttttgtagaccctgcccttgatggatcagctggtactacccagaccgataaactggctcgtcttatcttgtggcccccacccaggagctgactcaatgcaagaagactgttctgactccctatgatttcatctccaacccaaccaagcggcactgtcaactcactggcctccccctacccaccaaattatccttaaaaactcagatccccaaatgctcagggaaactgattatgattaccccaaagcttggagtaataataaaactggcctgtctcccgcacagccagctctctgtgaattactctttctttactgcaattcccctgtttgtctaggcagtggagaaggtgaacccactgggcggttacactaacattcacaacaatcttgcaacacagtattgtt

SEQ ID NO: 15807 - DNA, 4260 bp, Homo sapiens
  source 1..4260: mol_type = unassigned DNA
cgcctggcgccccgcccgcgccttaggacccgcggggccgcgcggcgcatcctgcgggcggcggcggcgggcgaggcgcctgcagccgggcgcaagatgatgaagtttcggttccggcggcagggcgccgacccgcagcgcgagaagctcaagcaggagcttttcgccttcaacaagactgtggagcatggcttccccaatcagcccagcgccctggccttcgacccggaacttcgcatcatggccatcggcaccaggtctggggctgtcaagatctatggtgcacctggcgtggagttcacaggcctgcaccgggatgcagccactgtcacacagatgcacttcttgaccggccagggccgcctcctgtccctgcttgatgacagcagtctgcatctctgggagattgtccaccataatggctgtgcccacctggaagaagcactcagtttccagctgcccagccggcccggctttgatggtgccagtgctccgctcagccttacccgagtcacagtggtcctgctggtggctgccagcgacatagcagccctgggcactgagggcagcagtgtcttcttcctggatgttaccaccctgaccctgctcgaggggcagacgcttgccccaggcgaggttctgcgcagcgtgccagacgactaccgctgtgggaaggcactgggccccgtggagtcactccagggacacctgcgggaccccacaaagattctcattggctacagccggggcctgctggtcatctggaaccaggcctcgcagtgtgtggaccacatcttcctggggaaccagcagctggagagcctatgctgggggcgtgatagcagcactgtggtcagctcacacagcgatggcagctatgctgtctggtctgtggatgccggcagcttcccaacgctgcagcccacggtagccaccacaccttacggcccctttccctgcaaggccattaacaagattctgtggcggaactgtgaatctgggggccactttatcatcttcagcggtggcatgccccgtgccagctatggtgaccgccactgtgtaagtgtgcttcgagccgagacattggtgacgctggacttcacttcccgcatcatcgacttcttcacagtgcacagcacacggcccgaggatgaatttgatgacccccaggccctggctgtgctgctggaagaggagctggtggtgctggacctgcagactcctggctggccagctgtgcctgccccatacctggccccgctgcactcctctgcaatcacttgctcggcccacgtggccagtgtccccgccaagctgtgggcccgcattgtgagcgctggcgagcagcagagcccccagcctgtctccagtgccttgagctggcccatcactgggggccgaaacctggcccaggagccgtcacagcgagggctgctgctgacgggccatgaggacggcaccgtgaggttctgggatgcctcgggtgtggcgctgcggccgctctataagctgagcacagctggcctcttccagacagactgtgagcacgctgacagcctggcccaggctgccgaggacgactggccacccttccgcaaggtgggctgcttcgatccctacagtgacgatccccggcttggcgtgcagaaggttgctctctgcaagtatacagcccagatggtggtggctggcactgcaggccaggtgctggtactggagcttagtgatgtgccggtggagcaggcggtcagcgtggccatcatagacctcctccaggaccgcgagggcttcacatggaagggccacgagcggctgagcccacgcacggggccgctgccctggcctgctggcttccagccccgtgtcctggtgcagtgcctgccgccagctgctgtaaccgctgtcacactccacaccgagtggagcctcgtggcttttggcaccagtcatggctttggcctcttcgactaccagcgcaagagccctgtgctggccaggtgcactcttcaccccaatgactccctggccatggagggtccgctctcccgggtgaagtctctcaagaagtcactgcgccagtctttccggcgcattcgcaagagtcgtgtctctggcaagaagcgggctgctaatgccagcagcaagttgcaggaagccaatgcacagctggctgagcaggcctgcccccacgacgtggagatgacgcccgtgcagcgccgcattgagccccgctctgccgatgactccttgtcgggtgtcgtgcgttgcctatactttgccgacacattccttcgagatggggcccaccacgggcccaccatgtgggctggcaccaactcaggctctgtgttcgcctatgcactggaggtgccggcagcagcagtgggtggtgagaagcggcctgagcaagcggtggaggccgtgctgggcaaggaggtgcagctgatgcaccgggcgcctgtggtggccattgccgtgttggacgggcgtggccgcccactgcccgagccctacgaggcctcacgggacctggcgcaggcacctgacatgcagggtggtcacgctgtgctcatcgcatctgaggagcagttcaaggtgttcacactgcccaaggtgagcgcgaagaccaagttcaagctgacggcccatgagggctgtcgtgtgcgcaaggtggcactggccacgtttgccagtgtggcctgcgaggactatgctgagacctgcctggcctgcctcaccaacctgggtgacgtccacgtcttctcggtgcctggcctgcggccccaggtgcactattcctgcatccggaaggaggacatcagcggcatcgcttcgtgcgtctttacgcgccatggccagggcttttacctgatatccccatcagaatttgaacgcttctccctaagtgcccggaacatcacagagccgctctgctctctggacattaactggccccgcgatgccacccaggccagttacaggatccgagagtcacccaagctgagccaggctaacgggaccccaagcatcctgctggccccacagagccttgatggaagccctgatccagcccacagcatgggacctgacaccccggagccacccgaggctgcactctcacccatgtccatcgactcagccaccagtgctgacaccacgctggacacgacaggggacgtcacagtggaagatgtgaaggatttcctgggctcctctgaggagtcagagaagaacctgaggaacctggcagaagacgaggcccacgcctgtgccatcctgatcaaatgaggaaggccagaactatcccgacctccacctgccctgctcggagctggagtgctggatccctggcacctgcctggccccttaacatagaaccacgcctgctaacctgtaggctccactgggacctgctgtcctgtcccgcctgaccctgggccctggagcagcaccagccccagggtgtgggcctgggacctgggccagaactgagccctcctgcaggcatttggctgccctgggggcccactgcctagggaagaggacaggtggggcccagcacctgtgccacctccccccctccacacaccatccttccccctcactttgcagagtatttttccttttttttttttttcttaaagacggagtcttgctctgtcgcccaggctggagtgcagtggccccatctctgctcactgcaagccccgccttctgggttcccgccattcttctgcctcagcctcccaagtagctgggactacaggcgcccaccaccacgcccagctaattttttctgtatttttagtagagatggggtttcaccatgttagccaggatggtctcgatctcctgacctcgtgatccacccacctcagcctcccaaagtgctgggattacaggcgtgagccaccatgcccagccctgcaaagagtatttttctagcgcctgggctggacagttgtttctaaaactaaactattttggtacctgcttctgggccagtccccagcctgtcatgagtgtgtgtgtgcgggcatggatgtgactgggagctctgctgggcacccacatctggggcctagtcaggtgtgtgtgtccggcggggggggggggcaggggggggggtcaagatgagtttccctgtagattgtaccttggggtttttttctgtcgttttgttaaaattagcgccattttaatattaaaaatactgatttttaatattgaaaataaaagcatttaatatctcttaaa

SEQ ID NO: 15808 - DNA, 1260 bp, Homo sapiens
  source 1..1260: mol_type = unassigned DNA
gaactgccatcagcagcgcccgacagcactctcctcctcactgcccaacactgggtggcaaatcttttcatcttggccactctgataggctggacagtgaggtccttcttcctagggcgcatggaaacctgttgcagtcacctgggtttgcggagtgggaggaggtttgcagtaagcattggctactggcatgacccttacatacagcactttgtgagactgtctaaagagaggaaagcccctgaaatcaacagaggatattttgctcgagtccatggtgtcagtcagcttataaaggcatttctacggaagacagaatgtcattgtcaaattgtcaaccttggggcaggcatggataccaccttctggagattaaaggatgaagatcttctcccaagtaaatattttgaggttgactttccaatgattgtcacgagaaagctgcacagtatcaaatgcaagcctcccctatccagccccattctagaactgcattcagaggacacacttcagatggatggacacatactggattcaaagagatatgccgttattggagcagatctccgagacctgtctgaactggaagagaagctaaagaaatgtaacatgaatacacaattgccaacactcctgatagctgaatgtgtgctggtttacatgactccagagcagtccgcaaacctcctgaagtgggcagccaacagttttgagagagccatgttcataaactacgaacaggtgaacatgggtgatcggtttgggcagatcatgattgaaaacctgcggagacgccagtgtgacctggcgggagtggagacctgcaagtcattagagtcacagaaagaacggctcctgtcgaatgggtgggaaacagcatcggccgtcgacatgatggagttgtacaacaggttacctcgagctgaagtgagcaggatagaatcacttgaattcctggatgaaatggagctgctggagcagctcatgcggcattactgcctttgctgggcaaccaaaggaggaaatgagcttgggctgaaggagataacttattaatctgtcgaaggcttatgccgagccagaagccgaagccacttgccctcctggaggagacctgcaagctccctgagcggtgggcgggcctcgtccgcaggtctcatcccacactcttgagaagccttggtcactacagtggtcgcacatgttcctcttcctgttcctgttgacatgtcgttgtttaaataaatctcacttgccacc

SEQ ID NO: 15809 - DNA, 1205 bp, Homo sapiens
  source 1..1205: mol_type = unassigned DNA
agccggcgtgggcggcgtcactgagccgcgccagctgagccaggtagggccctaccctcttctgttgctttctccctgtggctcgcgccgtcccccgccgcccgtcgaccccgcttccatgtccctggcggacacagctcccaggaacctccacgcccatggccactaggcagagggaatcctctatcacctcctgctgttccacctcgagctgcgacgcagacgacgagggcgtgcgcggcacctgcgaagatgcttccctgtgcaagaggtttgcagtaagcattggctactggcatgacccttacatacagcactttgtgagactgtctaaagagaggaaagcccctgaaatcaacagaggatattttgctcgagtccatggtgtcagtcagcttataaaggcatttctacggaagacagaatgtcattgtcaaattgtcaaccttggggcaggcatggataccaccttctggagattaaaggatgaagatcttctcccaagtaaatattttgaggttgactttccaatgattgtcacgagaaagctgcacagtatcaaattgccaacactcctgatagctgaatgtgtgctggtttacatgactccagagcagtccgcaaacctcctgaagtgggcagccaacagttttgagagagccatgttcataaactacgaacaggtgaacatgggtgatcggtttgggcagatcatgattgaaaacctgcggagacgccagtgtgacctggcgggagtggagacctgcaagtcattagagtcacagaaagaacggctcctgtcgaatgggtgggaaacagcatcggccgtcgacatgatggagttgtacaacaggttacctcgagctgaagtgagcaggatagaatcacttgaattcctggatgaaatggagctgctggagcagctcatgcggcattactgcctttgctgggcaaccaaaggaggaaatgagcttgggctgaaggagataacttattaatctgtcgaaggcttatgccgagccagaagccgaagccacttgccctcctggaggagacctgcaagctccctgagcggtgggcgggcctcgtccgcaggtctcatcccacactcttgagaagccttggtcactacagtggtcgcacatgttcctcttcctgttcctgttgacatgtcgttgtttaaataaatctcacttgccaccagt

SEQ ID NO: 15810 - DNA, 1370 bp, Homo sapiens
  source 1..1370: mol_type = unassigned DNA
agccggcgtgggcggcgtcactgagccgcgccagctgagccaggtagggccctaccctcttctgttgctttctccctgtggctcgcgccgtcccccgccgcccgtcgaccccgcttccatgtccctggcggacacagctcccaggaacctccacgcccatggccactaggcagagggaatcctctatcacctcctgctgttccacctcgagctgcgacgcagacgacgagggcgtgcgcggcacctgcgaagatgcttccctgtgcaagaggtttgcagtaagcattggctactggcatgacccttacatacagcactttgtgagactgtctaaagagaggaaagcccctgaaatcaacagaggatattttgctcgagtccatggtgtcagtcagcttataaaggcatttctacggaagacagaatgtcattgtcaaattgtcaaccttggggcaggcatggataccaccttctggagattaaaggatgaagatcttctcccaagtaaatattttgaggttgactttccaatgattgtcacgagaaagctgcacagtatcaaatgcaagcctcccctatccagccccattctagaactgcattcagaggacacacttcagatggatggacacatactggattcaaagagatatgccgttattggagcagatctccgagacctgtctgaactggaagagaagctaaagaaatgtaacatgaatacacaattgccaacactcctgatagctgaatgtgtgctggtttacatgactccagagcagtccgcaaacctcctgaagtgggcagccaacagttttgagagagccatgttcataaactacgaacaggtgaacatgggtgatcggtttgggcagatcatgattgaaaacctgcggagacgccagtgtgacctggcgggagtggagacctgcaagtcattagagtcacagaaagaacggctcctgtcgaatgggtgggaaacagcatcggccgtcgacatgatggagttgtacaacaggttacctcgagctgaagtgagcaggatagaatcacttgaattcctggatgaaatggagctgctggagcagctcatgcggcattactgcctttgctgggcaaccaaaggaggaaatgagcttgggctgaaggagataacttattaatctgtcgaaggcttatgccgagccagaagccgaagccacttgccctcctggaggagacctgcaagctccctgagcggtgggcgggcctcgtccgcaggtctcatcccacactcttgagaagccttggtcactacagtggtcgcacatgttcctcttcctgttcctgttgacatgtcgttgtttaaataaatctcacttgccaccagt

SEQ ID NO: 15811 - DNA, 2993 bp, Homo sapiens
  source 1..2993: mol_type = unassigned DNA
ggtggcgggtggctggcggttccgttaggtctgagggagcgatggcggtacgcgcgttgaagctgctgaccacactgctggctgtcgtggccgctgcctcccaagccgaggtcgagtccgaggcaggatggggcatggtgacgcctgatctgctcttcgccgaggggaccgcagcctacgcgcgcggggactggcccggggtggtcctgagcatggaacgggcgctgcgctcccgggcagccctccgcgcccttcgcctgcgctgccgcacccagtgtgccgccgacttcccgtgggagctggaccccgactggtcccccagcccggcccaggcctcgggcgccgccgccctgcgcgacctgagcttcttcgggggccttctgcgtcgcgctgcctgcctgcgccgctgcctcgggccgccggccgcccactcgctcagcgaagagatggagctggagttccgcaagcggagcccctacaactacctgcaggtcgcctacttcaagatcaacaagttggagaaagctgttgctgcagcacacaccttcttcgtgggcaatcctgagcacatggaaatgcagcagaacctagactattaccaaaccatgtctggagtgaaggaggccgacttcaaggatcttgagactcaaccccatatgcaagaatttcgactgggagtgcgactctactcagaggaacagccacaggaagctgtgccccacctagaggcggcgctgcaagaatactttgtggcctatgaggagtgccgtgccctctgcgaagggccctatgactacgatggctacaactaccttgagtacaacgctgacctcttccaggccatcacagatcattacatccaggtcctcaactgtaagcagaactgtgtcacggagcttgcttcccacccaagtcgagagaagccctttgaagacttcctcccatcgcattataattatctgcagtttgcctactataacattgggaattatacacaggctgttgaatgtgccaagacctatcttctcttcttccccaatgacgaggtgatgaaccaaaatttggcctattatgcagctatgcttggagaagaacacaccagatccatcggcccccgtgagagtgccaaggagtaccgacagcgaagcctactggaaaaagaactgcttttcttcgcttatgatgtttttggaattccctttgtggatccggattcatggactccagaagaagtgattcccaagagattgcaagagaaacagaagtcagaacgggaaacagccgtacgcatctcccaggagattgggaaccttatgaaggaaatcgagacccttgtggaagagaagaccaaggagtcactggatgtgagcagactgacccgggaaggtggccccctgctgtatgaaggcatcagtctcaccatgaactccaaactcctgaatggttcccagcgggtggtgatggacggcgtaatctctgaccacgagtgtcaggagctgcagagactgaccaatgtggcagcaacctcaggagatggctaccggggtcagacctccccacatactcccaatgaaaagttctatggtgtcactgtcttcaaagccctcaagctggggcaagaaggcaaagttcctctgcagagtgcccacctgtactacaacgtgacggagaaggtgcggcgcatcatggagtcctacttccgcctggatacgcccctctacttttcctactctcatctggtgtgccgcactgccatcgaagaggtccaggcagagaggaaggatgatagtcatccagtccacgtggacaactgcatcctgaatgccgagaccctcgtgtgtgtcaaagagcccccagcctacaccttccgcgactacagcgccatcctttacctaaatggggacttcgatggcggaaacttttatttcactgaactggatgccaagaccgtgacggcagaggtgcagcctcagtgtggaagagccgtgggattctcttcaggcactgaaaacccacatggagtgaaggctgtcaccagggggcagcgctgtgccatcgccctgtggttcaccctggaccctcgacacagcgagcgggtgagagcagctcgagcgggtgagagcagctggtgctgtggtgacccgttcccagagcgcccttggtttgcctttctcttccccaaatcccattgccagtggctgagacacgaaaggagcacttgggacaccagctccaacgccctgtcattatggtcacattgccttgtcctccctgggcctgctgtgaacgggatccaggtggggaaagaggtcaagacagggagcgatgctgagttcttggttccctccttgggccccacttcagctgtccttttccagagagtaggacctgctgggaaggagatgagcctggggccattaaggaaccttccttgtcccctgggaagtagcagctgagagatagcgagtgtctggagcggaggcctctctgaatgggcaggggtttgtccttgcaggacagggtgcaggcagatgacctggtgaagatgctcttcagcccagaagagatggacctctcccaggagcagcccctggatgcccagcagggtccccccgaacctgcacaagagtctctctcaggcagtgaatcgaagcccaaggatgagctatgacagcgtccaggtcagacggatgggtgactagacccatggagaggaactcttctgcactctgagctggccagcccctcggggctgcagagcagtgagcctacatctgccactcagccgaggggaccctgctcacagccttctacatggtgctactgctcttggagtggacatgaccagacaccgcaccccctggatctggctgagggctcaggacacaggcccagccacccccaggggcctccacaggccgctgcatgacagcgatacagtacttaagtgtctgtgtagacaaccaaagaataaatgattcatggtttttttt

SEQ ID NO: 15812 - DNA, 2585 bp, Homo sapiens
  source 1..2585: mol_type = unassigned DNA
actccggccttggtggcgggtggctggcggttccgttaggtctgagggagcgatggcggtacgcgcgttgaagctgctgaccacactgctggctgtcgtggccgctgcctcccaagccgaggtcgagtccgaggcaggatggggcatggtgacgcctgatctgctcttcgccgaggggaccgcagcctacgcgcgcggggactggcccggggtggtcctgagcatggaacgggcgctgcgctcccgggcagccctccgcgcccttcgcctgcgctgccgcacccagtgtgccgccgacttcccgtgggagctggaccccgactggtcccccagcccggcccaggcctcgggcgccgccgccctgcgcgacctgagcttcttcgggggccttctgcgtcgcgctgcctgcctgcgccgctgcctcgggccgccggccgcccactcgctcagcgaagagatggagctggagttccgcaagcggagcccctacaactacctgcaggtcgcctacttcaagatcaacaagttggagaaagctgttgctgcagcacacaccttcttcgtgggcaatcctgagcacatggaaatgcagcagaacctagactattaccaaaccatgtctggagtgaaggaggccgacttcaaggatcttgagactcaaccccatatgcaagaatttcgactgggagtgcgactctactcagaggaacagccacaggaagctgtgccccacctagaggcggcgctgcaagaatactttgtggcctatgaggagtgccgtgccctctgcgaagggccctatgactacgatggctacaactaccttgagtacaacgctgacctcttccaggccatcacagatcattacatccaggtcctcaactgtaagcagaactgtgtcacggagcttgcttcccacccaagtcgagagaagccctttgaagacttcctcccatcgcattataattatctgcagtttgcctactataacattgggaattatacacaggctgttgaatgtgccaagacctatcttctcttcttccccaatgacgaggtgatgaaccaaaatttggcctattatgcagctatgcttggagaagaacacaccagatccatcggcccccgtgagagtgccaaggagtaccgacagcgaagcctactggaaaaagaactgcttttcttcgcttatgatgtttttggaattccctttgtggatccggattcatggactccagaagaagtgattcccaagagattgcaagagaaacagaagtcagaacgggaaacagccgtacgcatctcccaggagattgggaaccttatgaaggaaatcgagacccttgtggaagagaagaccaaggagtcactggatgtgagcagactgacccgggaaggtggccccctgctgtatgaaggcatcagtctcaccatgaactccaaactcctgaatggttcccagcgggtggtgatggacggcgtaatctctgaccacgagtgtcaggagctgcagagactgaccaatgtggcagcaacctcaggagatggctaccggggtcagacctccccacatactcccaatgaaaagttctatggtgtcactgtcttcaaagccctcaagctggggcaagaaggcaaagttcctctgcagagtgcccacctgtactacaacgtgacggagaaggtgcggcgcatcatggagtcctacttccgcctggatacgcccctctacttttcctactctcatctggtgtgccgcactgccatcgaagaggtccaggcagagaggaaggatgatagtcatccagtccacgtggacaactgcatcctgaatgccgagaccctcgtgtgtgtcaaagagcccccagcctacaccttccgcgactacagcgccatcctttacctaaatggggacttcgatggcggaaacttttatttcactgaactggatgccaagaccgtgacggcagaggtgcagcctcagtgtggaagagccgtgggattctcttcaggcactgaaaacccacatggagtgaaggctgtcaccagggggcagcgctgtgccatcgccctgtggttcaccctggaccctcgacacagcgagcgggacagggtgcaggcagatgacctggtgaagatgctcttcagcccagaagagatggacctctcccaggagcagcccctggatgcccagcagggtccccccgaacctgcacaagagtctctctcaggcagtgaatcgaagcccaaggatgagctatgacagcgtccaggtcagacggatgggtgactagacccatggagaggaactcttctgcactctgagctggccagcccctcggggctgcagagcagtgagcctacatctgccactcagccgaggggaccctgctcacagccttctacatggtgctactgctcttggagtggacatgaccagacaccgcaccccctggatctggctgagggctcaggacacaggcccagccacccccaggggcctccacaggccgctgcatgacagcgatacagtacttaagtgtctgtgtagacaaccaaagaataaatgattcatggtttttttt

SEQ ID NO: 15813 - DNA, 2705 bp, Homo sapiens
  source 1..2705: mol_type = unassigned DNA
atgcgccgcccggcttggaaggtggggcttcgcccgggggcgggccttcgccgggggtaggactccggccttggtggcgggtggctggcggttccgttaggtctgagggagcgatggcggtacgcgcgttgaagctgctgaccacactgctggctgtcgtggccgctgcctcccaagccgaggtcgagtccgaggcaggatggggcatggtgacgcctgatctgctcttcgccgaggggaccgcagcctacgcgcgcggggactggcccggggtggtcctgagcatggaacgggcgctgcgctcccgggcagccctccgcgcccttcgcctgcgctgccgcacccagtgtgccgccgacttcccgtgggagctggaccccgactggtcccccagcccggcccaggcctcgggcgccgccgccctgcgcgacctgagcttcttcgggggccttctgcgtcgcgctgcctgcctgcgccgctgcctcgggccgccggccgcccactcgctcagcgaagagatggagctggagttccgcaagcggagcccctacaactacctgcaggtcgcctacttcaagatcaacaagttggagaaagctgttgctgcagcacacaccttcttcgtgggcaatcctgagcacatggaaatgcagcagaacctagactattaccaaaccatgtctggagtgaaggaggccgacttcaaggatcttgagactcaaccccatatgcaagaatttcgactgggagtgcgactctactcagaggaacagccacaggaagctgtgccccacctagaggcggcgctgcaagaatactttgtggcctatgaggagtgccgtgccctctgcgaagggccctatgactacgatggctacaactaccttgagtacaacgctgacctcttccaggccatcacagatcattacatccaggtcctcaactgtaagcagaactgtgtcacggagcttgcttcccacccaagtcgagagaagccctttgaagacttcctcccatcgcattataattatctgcagtttgcctactataacattgggaattatacacaggctgttgaatgtgccaagacctatcttctcttcttccccaatgacgaggtgatgaaccaaaatttggcctattatgcagctatgcttggagaagaacacaccagatccatcggcccccgtgagagtgccaaggagtaccgacagcgaagcctactggaaaaagaactgcttttcttcgcttatgatgtttttggaattccctttgtggatccggattcatggactccagaagaagtgattcccaagagattgcaagagaaacagaagtcagaacgggaaacagccgtacgcatctcccaggagattgggaaccttatgaaggaaatcgagacccttgtggaagagaagaccaaggagtcactggatgtgagcagactgacccgggaaggtggccccctgctgtatgaaggcatcagtctcaccatgaactccaaactcctgaatggttcccagcgggtggtgatggacggcgtaatctctgaccacgagtgtcaggagctgcagagactgaccaatgtggcagcaacctcaggagatggctaccggggtcagacctccccacatactcccaatgaaaagttctatggtgtcactgtcttcaaagccctcaagctggggcaagaaggcaaagttcctctgcagagtgcccacctgtactacaacgtgacggagaaggtgcggcgcatcatggagtcctacttccgcctggatacgcccctctacttttcctactctcatctggtgtgccgcactgccatcgaagaggtccaggcagagaggaaggatgatagtcatccagtccacgtggacaactgcatcctgaatgccgagaccctcgtgtgtgtcaaagagcccccagcctacaccttccgcgactacagcgccatcctttacctaaatggggacttcgatggcggaaacttttatttcactgaactggatgccaagaccgtgacggcagaggtgcagcctcagtgtggaagagccgtgggattctcttcaggcactgaaaacccacatggagtgaaggctgtcaccagggggcagcgctgtgccatcgccctgtggttcaccctggaccctcgacacagcgagcgggtgagagcagctcgagcgggacagggtgcaggcagatgacctggtgaagatgctcttcagcccagaagagatggacctctcccaggagcagcccctggatgcccagcagggtccccccgaacctgcacaagagtctctctcaggcagtgaatcgaagcccaaggatgagctatgacagcgtccaggtcagacggatgggtgactagacccatggagaggaactcttctgcactctgagctggccagcccctcggggctgcagagcagtgagcctacatctgccactcagccgaggggaccctgctcacagccttctacatggtgctactgctcttggagtggacatgaccagacaccgcaccccctggatctggctgagggctcaggacacaggcccagccacccccaggggcctccacaggccgctgcatgacagcgatacagtacttaagtgtctgtgtagacaaccaaagaataaatgattcatggttttttttacttggtttgttcagacaatggaaatttgcccattctgtc

SEQ ID NO: 15814 - DNA, 453 bp, Homo sapiens
  source 1..453: mol_type = unassigned DNA
agaacgggaaacagccgtacgcatctcccaggagattgggaaccttatgaaggaaatcgagacccttgtggaagagaagaccaaggagtcactggatgtgagcagactgacccgggaaggtggccccctgctgtatgaaggcatcagtctcaccatgaactccaaactcctgaatggttcccagcgggtggtgatggacggcgtaatctctgaccacgagtgtcaggagctgcagagactgaccaatgtggcagcaacctcaggagatggctaccggggtcagacctccccacatactcccaatgaaaagttctatggtgtcactgtcttcaaagccctcaagaggggcgttgtgttagtccgttttcacactgctgataaagacgtacccgagactgggcaatttacaaaagaaagaggtttacttggacttacagttccatgtggctgggg

SEQ ID NO: 15815 - DNA, 2451 bp, Homo sapiens
  source 1..2451: mol_type = unassigned DNA
aggtctgagggagcgatggcggtacgcgcgttgaagctgctgaccacactgctggctgtcgtggccgctgcctcccaagccgaggtcgagtccgaggcaggatggggcatggtgacgcctgatctgctcttcgcctgcgctgccgcacccagtgtgccgccgacttcccgtgggagctggaccccgactggtcccccagcccggcccaggcctcgggcgccgccgccctgcgcgacctgagcttcttcgggggccttctgcgtcgcgctgcctgcctgcgccgctgcctcgggccgccggccgcccactcgctcagcgaagagatggagctggagttccgcaagcggagcccctacaactacctgcaggtcgcctacttcaagatcaacaagttggagaaagctgttgctgcagcacacaccttcttcgtgggcaatcctgagcacatggaaatgcagcagaacctagactattaccaaaccatgtctggagtgaaggaggccgacttcaaggatcttgagactcaaccccatatgcaagaatttcgactgggagtgcgactctactcagaggaacagccacaggaagctgtgccccacctagaggcggcgctgcaagaatactttgtggcctatgaggagtgccgtgccctctgcgaagggccctatgactacgatggctacaactaccttgagtacaacgctgacctcttccaggccatcacagatcattacatccaggtcctcaactgtaagcagaactgtgtcacggagcttgcttcccacccaagtcgagagaagccctttgaagacttcctcccatcgcattataattatctgcagtttgcctactataacattgggaattatacacaggctgttgaatgtgccaagacctatcttctcttcttccccaatgacgaggtgatgaaccaaaatttggcctattatgcagctatgcttggagaagaacacaccagatccatcggcccccgtgagagtgccaaggagtaccgacagcgaagcctactggaaaaagaactgcttttcttcgcttatgatgtttttggaattccctttgtggatccggattcatggactccagaagaagtgattcccaagagattgcaagagaaacagaagtcagaacgggaaacagccgtacgcatctcccaggagattgggaaccttatgaaggaaatcgagacccttgtggaagagaagaccaaggagtcactggatgtgagcagactgacccgggaaggtggccccctgctgtatgaaggcatcagtctcaccatgaactccaaactcctgaatggttcccagcgggtggtgatggacggcgtaatctctgaccacgagtgtcaggagctgcagagactgaccaatgtggcagcaacctcaggagatggctaccggggtcagacctccccacatactcccaatgaaaagttctatggtgtcactgtcttcaaagccctcaagctggggcaagaaggcaaagttcctctgcagagtgcccacctgtactacaacgtgacggagaaggtgcggcgcatcatggagtcctacttccgcctggatacgcccctctacttttcctactctcatctggtgtgccgcactgccatcgaagaggtccaggcagagaggaaggatgatagtcatccagtccacgtggacaactgcatcctgaatgccgagaccctcgtgtgtgtcaaagagcccccagcctacaccttccgcgactacagcgccatcctttacctaaatggggacttcgatggcggaaacttttatttcactgaactggatgccaagaccgtgacggcagaggtgcagcctcagtgtggaagagccgtgggattctcttcaggcactgaaaacccacatggagtgaaggctgtcaccagggggcagcgctgtgccatcgccctgtggttcaccctggaccctcgacacagcgagcgggacagggtgcaggcagatgacctggtgaagatgctcttcagcccagaagagatggacctctcccaggagcagcccctggatgcccagcagggtccccccgaacctgcacaagagtctctctcaggcagtgaatcgaagcccaaggatgagctatgacagcgtccaggtcagacggatgggtgactagacccatggagaggaactcttctgcactctgagctggccagcccctcggggctgcagagcagtgagcctacatctgccactcagccgaggggaccctgctcacagccttctacatggtgctactgctcttggagtggacatgaccagacaccgcaccccctggatctggctgagggctcaggacacaggcccagccacccccaggggcctccacaggccgctgcatgacagcgatacagtacttaagtgtctgtgtagacaaccaaagaataaatgattcatggtttttttt

SEQ ID NO: 15816 - DNA, 4370 bp, Homo sapiens
  source 1..4370: mol_type = unassigned DNA
ccgagcccgactcagcccgcggccacctgcgccccgcccctgtcggccgcgcccgagcccagcgccgcgagccgctccccggcgggctggctcctggccccggaagcgcgagcgttcacttagcggcgagtggctccgtctccgcggacagagcgcgcgccccctggcccggcccgcgaggggctcccggcgcggtccccgagcatttcccgccgggtggagcgggccgagcccggcaggatgaccagccccgcggccgctcaaagccgggagatcgactgtttgagcccggaagcgcagaagctggcggaagcccggctcgctgcaaaacgggcggcccgcgcggaggctcgcgagatccgcatgaaggagctggagcggcagcagaaggaggaagacagtgagcgctactctcgtagatccagaagaaacacatcggcttctgatgaagacgagcgcatgtcagtgggtagtcgtggaagcctgagggtagaagagagaccagaaaaagattttactgagaaggggtctcgtaacatgccgggcctgtctgcagccacgctggcctctctgggtgggacttcctctcggagaggcagcggagacacctccatctccatcgacaccgaggcatccatcagggaaatcaaggactctctagcagaagttgaagagaaatataagaaggctatggtttccaatgctcagctagacaatgaaaagacaaacttcatgtaccaggttgataccctaaaagatatgttgctggagcttgaagaacagctggctgaatctaggcggcagtacgaagagaaaaacaaagaatttgaaagggaaaaacacgcccacagtatactgcaatttcagtttgctgaagtcaaggaggccctgaagcaaagagaggaaatgctcgagaaacatggaataatcctaaattcagaaatagctaccaatggagagacttccgacaccctcaataatgttggataccaaggtcctaccaagatgacaaaagaagagttaaatgccctcaagtcgacaggggatgggaccctaggaagagccagtgaagtggaggtgaaaaatgaaatcgtggcgaatgtggggaaaagagaaatcttgcacaatactgagaaagaacaacacacagaggacacagtgaaggactgtgtggacatagaggtattccctgctggtgagaataccgaggaccagaaatcctctgaagacactgccccattcctaggaaccttagcaggtgctacctatgaggaacaggttcaaagccaaattcttgagagcagttctctccctgaaaacacagtacaggttgagtcaaatgaggtcatgggtgcaccagatgacaggaccagaactccccttgagccatccaactgttggagtgacttagatggtgggaaccacacagagaatgtgggagaggcagcagtgactcaggttgaagagcaggcaggcacagtggcctcgtgtcctttagggcatagtgatgacacagtttatcatgatgacaaatgtatggtagaggtcccccaagagttagagacaagcacagggcatagtttagagaaagaattcaccaaccaggaagcagctgagcccaaggaggttccagcgcacagtacagaagtaggtagggatcacaacgaagaagagggtgaagaaacaggattaagggacgagaaaccaatcaagacagaagttcctggttctccagcaggaactgagggcaactgtcaggaagcgacaggtccaagtacagtagacactcaaaatgaacccttagatatgaaagagcccgatgaagaaaagagtgaccaacagggagaggcattggactcatcgcagaagaagacaaagaacaagaaaaagaaaaacaagaagaaaaaatccccagtacccgtagaaacccttaaagatgttaaaaaagagttaacgtatcagaacacagatttaagtgaaattaaggaagaagagcaggtaaagtctactgacagaaagtcagcagtggaagcccaaaacgaggtgactgaaaatccaaaacagaaaattgcagcagaaagcagtgaaaatgttgattgtccggagaatcctaaaattaagttggatggaaaacttgaccaagaaggtgatgatgtacaaacagcagctgaggaggtactagctgatggagacacattagattttgaggatgacaccgttcaatcatcaggcccgagggctggtggtgaagaattagatgaaggtgttgcaaaagataatgctaaaatagatggtgccactcaaagcagtcctgcagaaccaaagagcgaagacgcagatcgctgcaccctgcccgaacatgaaagtccctcacaggacattagtgatgcctgtgaagcagaaagtacagagaggtgtgagatgtcagaacatccaagtcagaccgtcaggaaagctttagacagcaatagcctagagaacgatgacttgtcggcaccaggaagagagccagggcacttcaatccagaaagcagagaagataccagaggagggaatgagaagggcaaaagcaaagaagactgtaccatgtcctaagctgaggcaggcggcaggcgcggtgcacaggaagtctcagtgtgaaggggtcttttctctccactgccaatgtaagtagaatgttctaaattcatagagaggcactgtatgacaattaccaggtgctctactgctttaagttatagactgttacttgtagatttccatgtaatcattgaggttatcacccagattagaaagacatatttgttatcagtgtacgttctaattgagagcattccagtagtatcaaacaataatgtctactgtttatagtccacttaataaaaatagaggcatttactatttgccttaggctgataggaatgtgggttttcttgaccaaatatatcagcatctaattgaaatgaccaaatagcattcttagacttctgtattatgaatataattgatatttaaattaatgtcttgttcacatatgtgtactttcatatttgattttaaaatgtacattataacctgtatggtattttatttaaaggagataaacagccaaatagcaaataggtcactgaatgataagatttgcaccttagaacaataatcattttaaggataacaagtaaatgtctgaaagcatgaggggctttatttgcctttacctcatatgagtctttgatcttgaaccgatacttttggatctcattgttgatatacctgaatttactttgtaagagattttaacttcacttcatgctgatgatgtatcaaattcattttatagaaagatttaaagtttttttctggaagtgatatatgtcaaattacatttcctactgcagtatttgagcagggacagtcattttttaaatgtttttggccgggcgtggtggctcatgcctgtaatctcagtacattgggaggccaaggcaggtggatcacctgaggtcaagagttcgaggccagcctggccaacatggtgaaaccctgtctctactaaaaatacaaaaaattggccgggcgtgatggtgggcgcctgtaatcccagccactccagaggctgaggcaggagaatcgcttgaacctgcgaggcagagattgcagtgagccaagatcaagccattgtactccagcctggacaacaagagcgaaactctgtctaaaaaaaaaaaaaaaaacacacacacacacaacacaatgttttcacgcctgtaaacctagcacattgggaagccaaggtgggaggattgcttgaggccaggagttcaaggctgcagtgagctatgattgcacactgtactctagcctgggagacagagtgagacactgtctctaaaaaaaaaaaaaaaaaaaaaaaaagtttttgaaccttaaaatactttgtttgaatttctaatcatcattcaaaagagcagtaaaaaatggttacttgttcttgtacaagctactaattagactatagtaggatattttaaagagctgaatcacttttggtattttggtataaatattttcatttgttatgtcccagtatattcttactggaaaattcttgttttgatctgcctgaagaaaatatctgttttctatataaaaaaattttttaaaataattgtaaagttagatttaaaattgtaaaatataaaatcacaaaggaatgtaccttatgaatgttgttgacattttatgaaattatgtggattcatattactgttacaagatagaattgaatgcaaaaagaccaaaacctcaataaaatttgaggaaaacgtgttattatgtaattgaaataaaaacattttataattgtgcaa

SEQ ID NO: 15817 - DNA, 3709 bp, Homo sapiens
  source 1..3709: mol_type = unassigned DNA
gcgtggggggcggggcgggccgtgggacgggcggaggcgcccgagtcccgcttccccggcgcccttccaccccgagcccgactcagcccgcggccacctgcgccccgcccctgtcggccgcgcccgagcccagcgccgcgagccgctccccggcgggctggctcctggccccggaagcgcgagcgttcacttagcggcgagtggctccgtctccgcggacagagcgcgcgccccctggcccggcccgcgaggggctcccggcgcggtccccgagcatttcccgccgggtggagcgggccgagcccggcaggatgaccagccccgcggccgctcaaagccgggagatcgactgtttgagcccggaagcgcagaagctggcggaagcccggctcgctgcaaaacgggcggcccgcgcggaggctcgcgagatccgcatgaaggagctggagcggcagcagaaggaggtagaagagagaccagaaaaagattttactgagaaggggtctcgtaacatgccgggcctgtctgcagccacgctggcctctctgggtgggacttcctctcggagaggcagcggagacacctccatctccatcgacaccgaggcatccatcagggaaatcaaggactctctagcagaagttgaagagaaatataagaaggctatggtttccaatgctcagctagacaatgaaaagacaaacttcatgtaccaggttgataccctaaaagatatgttgctggagcttgaagaacagctggctgaatctaggcggcagtacgaagagaaaaacaaagaatttgaaagggaaaaacacgcccacagtatactgcaatttcagtttgctgaagtcaaggaggccctgaagcaaagagaggaaatgctcgagaaacatggaataatcctaaattcagaaatagctaccaatggagagacttccgacaccctcaataatgttggataccaaggtcctaccaagatgacaaaagaagagttaaatgccctcaagtcgacaggggatgggaccctaggaagagccagtgaagtggaggtgaaaaatgaaatcgtggcgaatgtggggaaaagagaaatcttgcacaatactgagaaagaacaacacacagaggacacagtgaaggactgtgtggacatagaggtattccctgctggtgagaataccgaggaccagaaatcctctgaagacactgccccattcctaggaaccttagcaggtgctacctatgaggaacaggttcaaagccaaattcttgagagcagttctctccctgaaaacacagtacaggttgagtcaaatgaggtcatgggtgcaccagatgacaggaccagaactccccttgagccatccaactgttggagtgacttagatggtgggaaccacacagagaatgtgggagaggcagcagtgactcaggttgaagagcaggcaggcacagtggcctcgtgtcctttagggcatagtgatgacacagtttatcatgatgacaaatgtatggtagaggtcccccaagagttagagacaagcacagggcatagtttagagaaagaattcaccaaccaggaagcagctgagcccaaggaggttccagcgcacagtacagaagtaggtagggatcacaacgaagaagagggtgaagaaacaggattaagggacgagaaaccaatcaagacagaagttcctggttctccagcaggaactgagggcaactgtcaggaagcgacaggtccaagtacagtagacactcaaaatgaacccttagatatgaaagagcccgatgaagaaaagagtgaccaacagggagaggcattggactcatcgcagaagaagacaaagaacaagaaaaagaaaaacaagaagaaaaaatccccagtacccgtagaaacccttaaagatgttaaaaaagagttaacgtatcagaacacagatttaagtgaaattaaggaagaagagcaggtaaagtctactgacagaaagtcagcagtggaagcccaaaacgaggtgactgaaaatccaaaacagaaaattgcagcagaaagcagtgaaaatgttgattgtccggagaatcctaaaattaagttggatggaaaacttgaccaagaaggtgatgatgtacaaacagcagctgaggaggtactagctgatggagacacattagattttgaggatgacaccgttcaatcatcaggcccgagggctggtggtgaagaattagatgaaggtgttgcaaaagataatgctaaaatagatggtgccactcaaagcagtcctgcagaaccaaagagcgaagacgcagatcgctgcaccctgcccgaacatgaaagtccctcacaggacattagtgatgcctgtgaagcagaaagtacagagaggtgtgagatgtcagaacatccaagtcagaccgtcaggaaagctttagacagcaatagcctagagaacgatgacttgtcggcaccaggaagagagccagggcacttcaatccagaaagcagagaagataccagaggagggaatgagaagggcaaaagcaaagaagactgtaccatgtcctaagctgaggcaggcggcaggcgcggtgcacaggaagtctcagtgtgaaggggtcttttctctccactgccaatgtaagtagaatgttctaaattcatagagaggcactgtatgacaattaccaggtgctctactgctttaagttatagactgttacttgtagatttccatgtaatcattgaggttatcacccagattagaaagacatatttgttatcagtgtacgttctaattgagagcattccagtagtatcaaacaataatgtctactgtttatagtccacttaataaaaatagaggcatttactatttgccttaggctgataggaatgtgggttttcttgaccaaatatatcagcatctaattgaaatgaccaaatagcattcttagacttctgtattatgaatataattgatatttaaattaatgtcttgttcacatatgtgtactttcatatttgattttaaaatgtacattataacctgtatggtattttatttaaaggagataaacagccaaatagcaaataggtcactgaatgataagatttgcaccttagaacaataatcattttaaggataacaagtaaatgtctgaaagcatgaggggctttatttgcctttacctcatatgagtctttgatcttgaaccgatacttttggatctcattgttgatatacctgaatttactttgtaagagattttaacttcacttcatgctgatgatgtatcaaattcattttatagaaagatttaaagtttttttctggaagtgatatatgtcaaattacatttcctactgcagtatttgagcagggacagtcattttttaaatgtttttggccgggcgtggtggctcatgcctgtaatctcagtacattgggaggccaaggcaggtggatcacctgaggtcaagagttcgaggccagcctggccaacatggtgaaaccctgtctctactaaaaatacaaaaaattggccgggcgtgatggtgggcgcctgtaatcccagccactccagaggctgaggcaggagaatcgcttgaacctgcgaggcagagattgcagtgagccaagatcaagccattgtactccagcctggacaacaagagcgaaactctgtctaaaaaaaaaaaaaaaaa

SEQ ID NO: 15818 - DNA, 4298 bp, Homo sapiens
  source 1..4298: mol_type = unassigned DNA
ccgtgggacgggcggaggcgcccgagtcccgcttccccggcgcccttccaccccgagcccgactcagcccgcggccacctgcgccccgcccctgtcggccgcgcccgagcccagcgccgcgagccgctccccggcgggctggctcctggccccggaagcgcgagcgttcacttagcggcgagtggctccgtctccgcggacagagcgcgcgccccctggcccggcccgcgaggggctcccggcgcggtccccgagcatttcccgccgggtggagcgggccgagcccggcaggatgaccagccccgcggccgctcaaagccgggagatcgactgtttgagcccggaagcgcagaagctggcggaagcccggctcgctgcaaaacgggcggcccgcgcggaggctcgcgagatccgcatgaaggagctggagcggcagcagaaggaggtgacttctgcccaagagaaatattatgggctggatacaaaatggggtgacatcgagcagtggatggaagacagtgagcgctactctcgtagatccagaagaaacacatcggcttctgatgaagacgagcgcatgtcagtgggtagtcgtggaagcctgaggtcgcagcctgacttggagtatgggggtccttacgcctggacaaatggttatgatggagaattgtatggatcacagtccctgaatagaagatctggcaggccctcctgtctgtacagcgctgcccggccttcggggagttaccgggcgtctgtgttggatgaaggcagcttcggtgggacccgacggggcagcacctccggctcccgtgctccctcggagtacagcggccacctcaactccagctcccgcgcctcctccagggccagctcggcccgggccagccctgtggtagaagagagaccagaaaaagattttactgagaaggggtctcgtaacatgccgggcctgtctgcagccacgctggcctctctgggtgggacttcctctcggagaggcagcggagacacctccatctccatcgacaccgaggcatccatcagggaaatcaaggaactcaatgagttaaaggaccagattcaggatgtagaaggcaaatacatgcagggattgaaagagatgaaggactctctagcagaagttgaagagaaatataagaaggctatggtttccaatgctcagctagacaatgaaaagacaaacttcatgtaccaggttgataccctaaaagatatgttgctggagcttgaagaacagctggctgaatctaggcggcagtacgaagagaaaaacaaagaatttgaaagggaaaaacacgcccacagtatactgcaatttcagtttgctgaagtcaaggaggccctgaagcaaagagaggaaatgctcgaggaaatccgacagctacagcagaaacaggcgagttctatcagggagatttctgatcttcaggaaacaatagagtggaaagacaaaaagataggggcattagagaggcagaaagagttctttgattccgtaaggagtgaacgggatgatcttagagaagaagtagtcatgctgaaagaggaattaaagaaacatggaataatcctaaattcagaaatagctaccaatggagagacttccgacaccctcaataatgttggataccaaggtcctaccaagatgacaaaagaagagttaaatgccctcaagtcgacaggggatgggaccctagatattaggttgaaaaagctggttgatgaacgggaatgcttattggaacagattaagaaactcaaagggcagctggaggagagacagaagattggcaaactagacaatcttcgatctgaagatgatgtcttggaaaacgggacagacatgcatgtaatggacctacaaagggatgccaacagacagatcagcgacctcaaatttaaacttgcaaaatctgagcaagagataactgcattagaacaaaatgtaataaggttagagagtcaagtatcacgttacaaatcagcggctgaaaatgcagaaaaaatagaagatgaacttaaggcagaaaaacggaaactccaaagagagctccgctctgcattggataaaacagaagagctcgaggtgagcaacggccacttagtgaagcgtctggaaaaaatgaaagcaaatcggagtgcactcttgtcccagcagtaaattccagctctgatcaggcaactggttggtgactggagagcattgtttcataggcttttctctgtcctatctgggagcgctgcttcttcccctgccttccgagagacgaagaccgtggcgagcttggcgcttaggggctcccgtgccatggctcaccccagggagccccagcagccaccaggtgcctctgtctgcagacccctggcccgggctggcgccgacgctcagaacctgcaggtacttcataagcacacaggggcctcgagggagctctgtgtctgaccgcacagcagcctctgaatgccgctggaagtgatgatcaaagtaaagattcagttgggacttgagttttttttttttttcatgtgtcttgctgaagattaaggggaaatgttacagtgttgggacttcctttcatggcagaatctacaatttgagcgacttcagtagtatctcttagtctacgcttttcatacacaaaacactgtggaaccacaagccattaccaagcaaaactctttcactggaaacaagggggcagtctagaagtaaaagtgaccttaagaagactctttacaggcaacaaatgaagcttttctaagggatttttgcatcagttcagtcataagaatacttttttccagggtaattaggcaatagcttcactgaaaatgacagcttttcattgcattatttaatccttatatttggaattgaagtcgttaacttcttttaaagaatgtactattagaaaaattaaaaatgaaatgttgagagacttcagcaatgtggttctaatttttttccactgagaaagaagatctttaatttcatattaatggttctgtatattttgggtcatctttttattttttaagaatatcaagtcaattcatttttctttccctatttaaaaaaaaaggtgttttcacagaatgagtgcacttaaaaagtgaagtgaaggaggaggtaacagtagagacgatggcaatatcatcaaggacaaaagtaaaaacgtttagctacctgctgatttttagtgactgttcatatatgttgtatttcaagtatggctggtgaagccagtcagcttttcgggacgttagcaagtggaaactgagtcagtatcatccaaaaccatatctagtcttaacacatggagaatgctggagtgagggttgtgagttcagggtatataatcaagaaaacactcccagcataatgctaggggtcaccagtgtccatcccccagaactgtatggatctaggatatacacagctgcgttgcattaagaaagagatgaaatctctattaaaatacacaagatttttgtatctccttgtgcagaggatatttgccactgcccattgggaagcagacaagttatagggggctgggggccaacactggcaagtaggaaaccacgggtcggacaggtgagcaaaatgtgctggcaggtgggcaccactgggagacccacactgcacacccgggcaccgtatgaacaggaaagaggaaggaagctggacgaagcccctcagggaccctgtgctgaccatgctgggcccaccggcaaaagggagatattcagttccttgtctcatccttaaggtttcttccacaacatctgaatacaagcatgtttaactgggaaaatgtctatgtcatgcgtgaataacaccagcagcaaacactcacacatcacgcagacacggccggcagcatgctgacgcttttaggtatttttcactcatgcaattttcacatattttcactcatttcatttgcacggaaattctatgaggtagatgctgttatcaaatccacattacagatgagggacccagggtccaggaaggtgaactggcagaagtctcccagctggtagaacagggctgcaaggcatcgattcccaggtgtctcacagccctgagaagatggcgttttccctatcagtggctctgaggaagtcaagccttcagtctctacctctcccaccaattcttttggaaacagcaaaccaatgttacacacacttcctaatccagaggaagctagaacacgatttttaaatttatttagtaaaataaaactttttttgcagatgtaacg

SEQ ID NO: 15819 - DNA, 3365 bp, Homo sapiens
  source 1..3365: mol_type = unassigned DNA
cggcgagtggctccgtctccgcggacagagcgcgcgccccctggcccggcccgcgaggggctcccggcgcggtccccgagcatttcccgccgggtggagcgggccgagcccggcaggatgaccagccccgcggccgctcaaagccgggagatcgactgtttgagcccggaagcgcagaagctggcggaagcccggctcgctgcaaaacgggcggcccgcgcggaggctcgcgagatccgcatgaaggagctggagcggcagcagaaggaggaagacagtgagcgctactctcgtagatccagaagaaacacatcggcttctgatgaagacgagcgcatgtcagtgggtagtcgtggaagcctgagggtagaagagagaccagaaaaagattttactgagaaggggtctcgtaacatgccgggcctgtctgcagccacgctggcctctctgggtgggacttcctctcggagaggcagcggagacacctccatctccatcgacaccgaggcatccatcagggaaatcaaggaactcaatgagttaaaggaccagattcaggatgtagaaggcaaatacatgcagggattgaaagagatgaaggactctctagcagaagttgaagagaaatataagaaggctatggtttccaatgctcagctagacaatgaaaagacaaacttcatgtaccaggttgataccctaaaagatatgttgctggagcttgaagaacagctggctgaatctaggcggcagtacgaagagaaaaacaaagaatttgaaagggaaaaacacgcccacagtatactgcaatttcagtttgctgaagtcaaggaggccctgaagcaaagagaggaaatgctcgagaaacatggaataatcctaaattcagaaatagctaccaatggagagacttccgacaccctcaataatgttggataccaaggtcctaccaagatgacaaaagaagagttaaatgccctcaagtcgacaggggatgggaccctaggaagagccagtgaagtggaggtgaaaaatgaaatcgtggcgaatgtggggaaaagagaaatcttgcacaatactgagaaagaacaacacacagaggacacagtgaaggactgtgtggacatagaggtattccctgctggtgagaataccgaggaccagaaatcctctgaagacactgccccattcctaggaaccttagcaggtgctacctatgaggaacaggttcaaagccaaattcttgagagcagttctctccctgaaaacacagtacaggttgagtcaaatgaggtcatgggtgcaccagatgacaggaccagaactccccttgagccatccaactgttggagtgacttagatggtgggaaccacacagagaatgtgggagaggcagcagtgactcaggttgaagagcaggcaggcacagtggcctcgtgtcctttagggcatagtgatgacacagtttatcatgatgacaaatgtatggtagaggtcccccaagagttagagacaagcacagggcatagtttagagaaagaattcaccaaccaggaagcagctgagcccaaggaggttccagcgcacagtacagaagtaggtagggatcacaacgaagaagagggtgaagaaacaggattaagggacgagaaaccaatcaagacagaagttcctggttctccagcaggaactgagggcaactgtcaggaagcgacaggtccaagtacagtagacactcaaaatgaacccttagatatgaaagagcccgatgaagaaaagagtgaccaacagggagaggcattggactcatcgcagaagaagacaaagaacaagaaaaagaaaaacaagaagaaaaaatccccagtacccgtagaaacccttaaagatgttaaaaaagagttaacgtatcagaacacagatttaagtgaaattaaggaagaagagcaggtaaagtctactgacagaaagtcagcagtggaagcccaaaacgaggtgactgaaaatccaaaacagaaaattgcagcagaaagcagtgaaaatgttgattgtccggagaatcctaaaattaagttggatggaaaacttgaccaagaaggtgatgatgtacaaacagcagctgaggaggtactagctgatggagacacattagattttgaggatgacaccgttcaatcatcaggcccgagggctggtggtgaagaattagatgaaggtgttgcaaaagataatgctaaaatagatggtgccactcaaagcagtcctgcagaaccaaagagcgaagacgcagatcgctgcaccctgcccgaacatgaaagtccctcacaggacattagtgatgcctgtgaagcagaaagtacagagaggtgtgagatgtcagaacatccaagtcagaccgtcaggaaagctttagacagcaatagcctagagaacgatgacttgtcggcaccaggaagagagccagggcacttcaatccagaaagcagagaagataccagaggagggaatgagaagggcaaaagcaaagaagactgtaccatgtcctaagctgaggcaggcggcaggcgcggtgcacaggaagtctcagtgtgaaggggtcttttctctccactgccaatgtaagtagaatgttctaaattcatagagaggcactgtatgacaattaccaggtgctctactgctttaagttatagactgttacttgtagatttccatgtaatcattgaggttatcacccagattagaaagacatatttgttatcagtgtacgttctaattgagagcattccagtagtatcaaacaataatgtctactgtttatagtccacttaataaaaatagaggcatttactatttgccttaggctgataggaatgtgggttttcttgaccaaatatatcagcatctaattgaaatgaccaaatagcattcttagacttctgtattatgaatataattgatatttaaattaatgtcttgttcacatatgtgtactttcatatttgattttaaaatgtacattataacctgtatggtattttatttaaaggagataaacagccaaatagcaaataggtcactgaatgataagatttgcaccttagaacaataatcattttaaggataacaagtaaatgtctgaaagcatgaggggctttatttgcctttacctcatatgagtctttgatcttgaaccgatacttttggatctcattgttgatatacctgaatttactttgtaagagattttaacttcacttcatgctgatgatgtatcaaattcattttatagaaagatttaaagtttttttctggaagtgatatatgtcaaattacatttcctactgcagtatttgagcagggacagt

SEQ ID NO: 15820 - DNA, 2775 bp, Homo sapiens
  source 1..2775: mol_type = unassigned DNA
ggggccgggccggggcggcgcgagcggctggagcaacgggccccgcggcagctgcgggcgacgcggtcgatggacatgggcacccagggatcggggcgcaagcggctccccaaccgggagcggctcacggcggaggacgacgcgctcaaccagatcgcgcgggaggcggaagcccggctcgctgcaaaacgggcggcccgcgcggaggctcgcgagatccgcatgaaggagctggagcggcagcagaaggagatctatcaggtccaaaagaaatattatgggctggatacaaaatggggtgacatcgagcagtggatggaagacagtgagcgctactctcgtagatccagaagaaacacatcggcttctgatgaagacgagcgcatgtcagtgggtagtcgtggaagcctgaggtcgcagcctgacttggagtatgggggtccttacgcctggacaaatggttatgatggagaattgtatggatcacagtccctgaatagaagatctggcaggccctcctgtctgtacagcgctgcccggccttcggggagttaccgggcgtctgtgttggatgaaggcagcttcggtgggacccgacggggcagcacctccggctcccgtgctccctcggagtacagcggccacctcaactccagctcccgcgcctcctccagggccagctcggcccgggccagccctgtggtagaagagagaccagaaaaagattttactgagaaggggtctcgtaacatgccgggcctgtctgcagccacgctggcctctctgggtgggacttcctctcggagaggcagcggagacacctccatctccatcgacaccgaggcatccatcagggaaatcaaggaactcaatgagttaaaggaccagattcaggatgtagaaggcaaatacatgcagggattgaaagagatgaaggactctctagcagaagttgaagagaaatataagaaggctatggtttccaatgctcagctagacaatgaaaagacaaacttcatgtaccaggttgataccctaaaagatatgttgctggagcttgaagaacagctggctgaatctaggcggcagtacgaagagaaaaacaaagaatttgaaagggaaaaacacgcccacagtatactgcaatttcagtttgctgaagtcaaggaggccctgaagcaaagagaggaaatgctcgaggaaatccgacagctacagcagaaacaggcgagttctatcagggagatttctgatcttcaggaaacaatagagtggaaagacaaaaagataggggcattagagaggcagaaagagttctttgattccgtaaggagtgaacgggatgatcttagagaagaagtagtcatgctgaaagaggaattaaagaaacatggaataatcctaaattcagaaatagctaccaatggagagacttccgacaccctcaataatgttggataccaaggtcctaccaagatgacaaaagaagagttaaatgccctcaagtcgacaggggatgggaccctagatattaggttgaaaaagctggttgatgaacgggaatgcttattggaacagattaagaaactcaaagggcagctggaggagagacagaagattggcaaactagacaatcttcgatctgaagatgatgtcttggaaaacgggacagacatgcatgtaatggacctacaaagggatgccaacagacagatcagcgacctcaaatttaaacttgcaaaatctgagcaagagataactgcattagaacaaaatgtaataaggttagagagtcaagtatcacgttacaaatcagcggctgaaaatgcagaaaaaatagaagatgaacttaaggcagaaaaacggaaactccaaagagagctccgctctgcattggataaaacagaagagctcgaggtgagcaacggccacttagtgaagcgtctggaaaaaatgaaagcaaatcggagtgcactcttgtcccagcagtaaattccagctctgatcaggcaactggttggtgactggagagcattgtttcataggcttttctctgtcctatctgggagcgctgcttcttcccctgccttccgagagacgaagaccgtggcgagcttggcgcttaggggctcccgtgccatggctcaccccagggagccccagcagccaccaggtgcctctgtctgcagacccctggcccgggctggcgccgacgctcagaacctgcaggtacttcataagcacacaggggcctcgagggagctctgtgtctgaccgcacagcagcctctgaatgccgctggaagtgatgatcaaagtaaagattcagttgggacttgagttttttttttttttcatgtgtcttgctgaagattaaggggaaatgttacagtgttgggacttcctttcatggcagaatctacaatttgagcgacttcagtagtatctcttagtctacgcttttcatacacaaaacactgtggaaccacaagccattaccaagcaaaactctttcactggaaacaagggggcagtctagaagtaaaagtgaccttaagaagactctttacaggcaacaaatgaagcttttctaagggatttttgcatcagttcagtcataagaatacttttttccagggtaattaggcaatagcttcactgaaaatgacagcttttcattgcattatttaatccttatatttggaattgaagtcgttaacttcttttaaagaatgtactattagaaaaattaaaaatgaaatgttgagagacttca

SEQ ID NO: 15821 - DNA, 3208 bp, Homo sapiens
  source 1..3208: mol_type = unassigned DNA
tggaaaggagagctaccatcactaagggctgaaaacacagttaaatcactttcaaagttaaaagactattaagaacacaagatggggactcctgcttctggaaggaaaagaacacctgtgaaagaccgattttctgcagaagatgaagctttgagtaacattgccagagaggcagaggcaaggctggcagcaaaacgggctgcccgggcagaagcaagagatatacgcatgagagaactggaacgacaacaaaaagagtactctcttcattcctttgatcggaagtggggacagattcagaagtggctggaagattcggaaagggccaggtattcccaccggtccagtcaccatcgtccttatctgggagttgaggatgcattgtccattcgaagtgttggcagtcacaggtatgatatgttcaaggatagatcatcaagactttcatcattaaatcattcttacagtcactctcatggaatgaagaagaggtcttctgattctcataaagacctactgagtggcctctactttgaccagagaaactatagcagtcttagacatagcaaacccacctctgcctactacactcggcagtcttcttccctgtacagtgaccctctggcaacatataagagtgacagggcctctcctactgcaaattctggtctgctgagaagtgccagtctggcatcattgtacaatggtggattatataacccttatggtcctcgaactccatctgaatgcagttattattcatcaagaataagttcagcccgaagcagtccagggtttaccaacgatgacactgcaagcattgtgtcttctgatcgtgccagtcgtggacgaagggagagtgtggtatctgccgctgattatttcagtcgctccaatcgtaggggaagtgttgtctctgaggtggatgatatcagtatcccagatttgtccagcttggatgaaaaatctgacaaacagtatgctgaaaattatacaagaccttcatctcgaaattctgcctcagcaacaacccctctaagtggaaactcatccagacgaggaagtggggacaccagcagcttaatagatccagacacttcattaagtgaattgcgggatatctatgaccttaaggaccagatacaggatgtagaagggagatacatgcaggggcttaaagaactaaaggaatctttgtctgaagtggaagaaaaatacaagaaagccatggtttccaatgcacagttagacaatgagaagaacaatttgatctaccaagtagacacactcaaggatgttattgaagagcaggaggaacagatggcagaattttatagagaaaatgaagaaaaatcaaaggagttagaaaggcagaaacatatgtgtagtgtgctgcagcataagatggaagaacttaaagaaggcctgcggcaaagagatgagcttattgaggagaagcagcgcatgcagcagaaaatagacaccatgacaaaagaggtgtttgacctccaggagacacttctttggaaagataaaaaaattggggccctagagaaacagaaagaatacattgcctgccttaggaatgagcgagatatgctcagagaggagctggctgacctgcaggagacagtgaagacgggagagaaacatggcttagttataatccccgatggcactcccaatggtgatgtcagtcatgaaccagtggctggagccatcactgttgtgtctcaggaagctgctcaggtcttggagtcagcaggagaagggccattagatgtaaggctacgaaaacttgctggagagaaggaagaactactgtcacagattagaaaactgaagcttcagttagaggaggaacgacagaaatgctccaggaatgatggcacagtgggtgacctggcaggactgcagaatggctcagacttgcagttcatcgaaatgcagagagatgccaatagacaaattagcgaatacaaatttaagctttcaaaagcagaacaggatataactaccttggagcaaagtattagccggcttgagggacaggttctgagatataaaactgctgctgagaatgctgagaaagttgaagatgaattgaaagcagaaaaacggaagctacaacgagagttacgaacagcactggacaagattgaggagatggagatgaccaacagccacctggccaagcggctggagaagatgaaggccaataggacagcacttctggcccagcagtaggaaaaccacccttcaacctgggtgatgctccttggggccctacctagagggactgacttttgtccattgacacaaaccccttttagtactgttttgagttttgtcattaaaacagccacctttgtattttataatttatgacagaatgaagtcattttgaatctacatgaatgaacactttggattttgttgtagtttgattctagggtagaaccagtccatgctgtttttattttttatctccgtaattgtagaatcatgtttactcaacgtttttccccagctgcctcagtaactgggcactcggaggccttggcacgggttctggaggacagacagcaattctatgagtgctcactgagatacttgctggagacctcagaaaacacaagtgccttctccacggtgcaattcagacttcagtgatctccagtggtcaaaagacatttacccttaatatcagacaacatttatattttagtgaagaaacaagttctcgggtggggaatctatgtttcactcagatttatatgtttggaggaaaaaagcctttttttgtaaaatatttaaatttatataagaaaatgttagaaaaaaatatggggagtgtatataaaacttgctttattgcatggggcaggggaagtccaggcctaatactcctaaagtaagagttgggtcctttttttcttcaatacaactgtgctgtaccttgtaaagtattttatctgctgcttatttgtggaatgaaacctcaaacaaacccaaagggggagggtagggcagggcaggcagattggaaatctgcctgcagattctattaaatacacccttttgccaaccacaattggctactgacatgttcattttgttataggagactttaaaacaaatcatggcaaccacatccctcttcttttgtctccttctcaaggaaaaacaatctggaatgtagaacttt

SEQ ID NO: 15822 - DNA, 2821 bp, Homo sapiens
  source 1..2821: mol_type = unassigned DNA
gtcgtcgaccctgtggccccgcccatccttcgcctcctcagtcggccgctcaggctgcggctcctcccggggccggttcccgctgtctcagccgcggcgcagagggcacatcggcctgaccgactagccggctgccagtgccgggagccgccgcgtccatccccgcccgcctggccggggacccaggactgagtcgtccagctgcgcccctcgcccatagccccagcgggcgccgggcgggcgagcagctcttcggcccttcccggacagcgacgcagtcgcagcgcgcgccctaacacagatgtgggaagataaatgaaggggtctagatgtaaatgtcagtggaaaggagagctaccatcactaagggctgaaaacacagttaaatcactttcaaagttaaaagactattaagaacacaagatggggactcctgcttctggaaggaaaagaacacctgtgaaagaccgattttctgcagaagatgaagctttgagtaacattgccagagaggcagaggcaaggctggcagcaaaacgggctgcccgggcagaagcaagagatatacgcatgagagaactggaacgacaacaaaaagagttggatgaaaaatctgacaaacagtatgctgaaaattatacaagaccttcatctcgaaattctgcctcagcaacaacccctctaagtggaaactcatccagacgaggaagtggggacaccagcagcttaatagatccagacacttcattaagtgaattgcgggaatctttgtctgaagtggaagaaaaatacaagaaagccatggtttccaatgcacagttagacaatgagaagaacaatttgatctaccaagtagacacactcaaggatgttattgaagagcaggaggaacagatggcagaattttatagagaaaatgaagaaaaatcaaaggagttagaaaggcagaaacatatgtgtagtgtgctgcagcataagatggaagaacttaaagaaggcctgcggcaaagagatgagcttattgagaaacatggcttagttataatccccgatggcactcccaatggtgatgtcagtcatgaaccagtggctggagccatcactgttgtgtctcaggaagctgctcaggtcttggagtcagcaggagaagggccattagatgtaaggctacgaaaacttgctggagagaaggaagaactactgtcacagattagaaaactgaagcttcagttagaggaggaacgacagaaatgctccaggaatgatggcacagtgggtgacctggcaggactgcagaatggctcagacttgcagttcatcgaaatgcagagagatgccaatagacaaattagcgaatacaaatttaagctttcaaaagcagaacaggatataactaccttggagcaaagtattagccggcttgagggacaggttctgagatataaaactgctgctgagaatgctgagaaagttgaagatgaattgaaagcagaaaaacggaagctacaacgagagttacgaacagcactggacaagattgaggagatggagatgaccaacagccacctggccaagcggctggagaagatgaaggccaataggacagcacttctggcccagcagtaggaaaaccacccttcaacctgggtgatgctccttggggccctacctagagggactgacttttgtccattgacacaaaccccttttagtactgttttgagttttgtcattaaaacagccacctttgtattttataatttatgacagaatgaagtcattttgaatctacatgaatgaacactttggattttgttgtagtttgattctagggtagaaccagtccatgctgtttttattttttatctccgtaattgtagaatcatgtttactcaacgtttttccccagctgcctcagtaactgggcactcggaggccttggcacgggttctggaggacagacagcaattctatgagtgctcactgagatacttgctggagacctcagaaaacacaagtgccttctccacggtgcaattcagacttcagtgatctccagtggtcaaaagacatttacccttaatatcagacaacatttatattttagtgaagaaacaagttctcgggtggggaatctatgtttcactcagatttatatgtttggaggaaaaaagcctttttttgtaaaatatttaaatttatataagaaaatgttagaaaaaaatatggggagtgtatataaaacttgctttattgcatggggcaggggaagtccaggcctaatactcctaaagtaagagttgggtcctttttttcttcaatacaactgtgctgtaccttgtaaagtattttatctgctgcttatttgtggaatgaaacctcaaacaaacccaaagggggagggtagggcagggcaggcagattggaaatctgcctgcagattctattaaatacacccttttgccaaccacaattggctactgacatgttcattttgttataggagactttaaaacaaatcatggcaaccacatccctcttcttttgtctccttctcaaggaaaaacaatctggaatgtagaacttttaaagacttgagtttcacctttagaggtaccctgtccaagaggtttttttaaaatcatggagtgcaactactttgcagaatttatgattctcttttgctcttagtacccaggtggttttatagaaatgattattgtatctttaaagtgcttacacagaaaatatattgggggaaaatctagtgactaaaggcacataagataataaaactagactttaaaaaggtaactcaaaa

SEQ ID NO: 15823 - DNA, 3814 bp, Homo sapiens
  source 1..3814: mol_type = unassigned DNA
gtcgtcgaccctgtggccccgcccatccttcgcctcctcagtcggccgctcaggctgcggctcctcccggggccggttcccgctgtctcagccgcggcgcagagggcacatcggcctgaccgactagccggctgccagtgccgggagccgccgcgtccatccccgcccgcctggccggggacccaggactgagtcgtccagctgcgcccctcgcccatagccccagcgggcgccgggcgggcgagcagctcttcggcccttcccggacagcgacgcagtcgcagcgcgcgccctaacacagatgtgggaagataaatgaaggggtctagatgtaaatgtcagtggaaaggagagctaccatcactaagggctgaaaacacagttaaatcactttcaaagttaaaagactattaagaacacaagatggggactcctgcttctggaaggaaaagaacacctgtgaaagaccgattttctgcagaagatgaagctttgagtaacattgccagagaggcagaggcaaggctggcagcaaaacgggctgcccgggcagaagcaagagatatacgcatgagagaactggaacgacaacaaaaagagtactctcttcattcctttgatcggaagtggggacagattcagaagtggctggaagattcggaaagggccaggtattcccaccggtccagtcaccatcgtccttatctgggagttgaggatgcattgtccattcgaagtgttggcagtcacaggtatgatatgttcaaggatagatcatcaagactttcatcattaaatcattcttacagtcactctcatggaatgaagaagaggtcttctgattctcataaagacctactgagtggcctctactttgaccagagaaactatagcagtcttagacatagcaaacccacctctgcctactacactcggcagtcttcttccctgtacagtgaccctctggcaacatataagagtgacagggcctctcctactgcaaattctggtctgctgagaagtgccagtctggcatcattgtacaatggtggattatataacccttatggtcctcgaactccatctgaatgcagttattattcatcaagaataagttcagcccgaagcagtccagggtttaccaacgatgacactgcaagcattgtgtcttctgatcgtgccagtcgtggacgaagggagagtgtggtatctgccgctgattatttcagtcgctccaatcgtaggggaagtgttgtctctgaggtggatgatatcagtatcccagatttgtccagcttggatgaaaaatctgacaaacagtatgctgaaaattatacaagaccttcatctcgaaattctgcctcagcaacaacccctctaagtggaaactcatccagacgaggaagtggggacaccagcagcttaatagatccagacacttcattaagtgaattgcgggatatctatgaccttaaggaccagatacaggatgtagaagggagatacatgcaggggcttaaagaactaaaggaatctttgtctgaagtggaagaaaaatacaagaaagccatggtttccaatgcacagttagacaatgagaagaacaatttgatctaccaagtagacacactcaaggatgttattgaagagcaggaggaacagatggcagaattttatagagaaaatgaagaaaaatcaaaggagttagaaaggcagaaacatatgtgtagtgtgctgcagcataagatggaagaacttaaagaaggcctgcggcaaagagatgagcttattgaggagaagcagcgcatgcagcagaaaatagacaccatgacaaaagaggtgtttgacctccaggagacacttctttggaaagataaaaaaattggggccctagagaaacagaaagaatacattgcctgccttaggaatgagcgagatatgctcagagaggagctggctgacctgcaggagacagtgaagacgggagagaaacatggcttagttataatccccgatggcactcccaatggtgatgtcagtcatgaaccagtggctggagccatcactgttgtgtctcaggaagctgctcaggtcttggagtcagcaggagaagggccattagatgtaaggctacgaaaacttgctggagagaaggaagaactactgtcacagattagaaaactgaagcttcagttagaggaggaacgacagaaatgctccaggaatgatggcacagtgggtgacctggcaggactgcagaatggctcagacttgcagttcatcgaaatgcagagagatgccaatagacaaattagcgaatacaaatttaagctttcaaaagcagaacaggatataactaccttggagcaaagtattagccggcttgagggacaggttctgagatataaaactgctgctgagaatgctgagaaagttgaagatgaattgaaagcagaaaaacggaagctacaacgagagttacgaacagcactggacaagattgaggagatggagatgaccaacagccacctggccaagcggctggagaagatgaaggccaataggacagcacttctggcccagcagtaggaaaaccacccttcaacctgggtgatgctccttggggccctacctagagggactgacttttgtccattgacacaaaccccttttagtactgttttgagttttgtcattaaaacagccacctttgtattttataatttatgacagaatgaagtcattttgaatctacatgaatgaacactttggattttgttgtagtttgattctagggtagaaccagtccatgctgtttttattttttatctccgtaattgtagaatcatgtttactcaacgtttttccccagctgcctcagtaactgggcactcggaggccttggcacgggttctggaggacagacagcaattctatgagtgctcactgagatacttgctggagacctcagaaaacacaagtgccttctccacggtgcaattcagacttcagtgatctccagtggtcaaaagacatttacccttaatatcagacaacatttatattttagtgaagaaacaagttctcgggtggggaatctatgtttcactcagatttatatgtttggaggaaaaaagcctttttttgtaaaatatttaaatttatataagaaaatgttagaaaaaaatatggggagtgtatataaaacttgctttattgcatggggcaggggaagtccaggcctaatactcctaaagtaagagttgggtcctttttttcttcaatacaactgtgctgtaccttgtaaagtattttatctgctgcttatttgtggaatgaaacctcaaacaaacccaaagggggagggtagggcagggcaggcagattggaaatctgcctgcagattctattaaatacacccttttgccaaccacaattggctactgacatgttcattttgttataggagactttaaaacaaatcatggcaaccacatccctcttcttttgtctccttctcaaggaaaaacaatctggaatgtagaacttttaaagacttgagtttcacctttagaggtaccctgtccaagaggtttttttaaaatcatggagtgcaactactttgcagaatttatgattctcttttgctcttagtacccaggtggttttatagaaatgattattgtatctttaaagtgcttacacagaaaatatattgggggaaaatctagtgactaaaggcacataagataataaaactagactttaaaaaggtaactcaaaagtgaataaaatctctaatatttgttccttt

SEQ ID NO: 15824 - DNA, 718 bp, Homo sapiens
  source 1..718: mol_type = unassigned DNA
gtttaaaataatattttttcaagataacattttattttgaggataaatctatatgaaaaagtgcagttattggagaatgcagtgttgcaaatagaattagttggcagggactccacggttgttgtggtttgaatatcttgcagcactaaccctgtttaaccaacgtcatgctctgtttaacagatgcagagataatgacctagtattataatatgtagaataagaatttcagaaagtgtgattcatttcgaaggtagatcactcactttgtgaatcattgctatgaatctgaaaattgaaatagaggaaacctaagttcgtatctgcctaatgagatggcattctttactcattttataggaagtgttgtattatgttttgttaggtctgttgctggatatttatcatcgtgaagaatgatgtgggaagataaatgaaggggtctagatgtaaatgtcagtggaaaggagagctaccatcactaagggctgaaaacacagttaaatcactttcaaagttaaaagactattaagaacacaagatggggactcctgcttctggaaggaaaagaacacctgtgaaagaccgattttctgcagaagatgaagctttgagtaacattgccagagaggcagaggcaaggctggcagcaaaacgggctgcccgggcagaagcaagagatatacgcatgagagaactggaacgacaacaaaaagag

SEQ ID NO: 15825 - DNA, 389 bp, Homo sapiens
  source 1..389: mol_type = unassigned DNA
gaagagaatgtggatgtagtaatgaaacaagagagaaggagagcgggatgtgggaagataaatgaaggggtctagatgtaaatgtcagtggaaaggagagctaccatcactaaggtttatattctgcaagatcctgaagatactttccttcttttctggctgaaaacacagttaaatcactttcaaagttaaaagactattaagaacacaagatggggactcctgcttctggaaggaaaagaacacctgtgaaagaccgattttctgcagaagatgaagctttgagtaacattgccagagaggcagaggcaaggctggcagcaaaacgggctgcccgggcagaagcaagagatatacgcatgagagaactggaacgacaacaaaaagag

SEQ ID NO: 15826 - DNA, 352 bp, Homo sapiens
  source 1..352: mol_type = unassigned DNA
taatgggaagagaatgtggatgtagtaatgaaacaagagagaaggagagcgggatgtgggaagataaatgaaggggtctagatgtaaatgtcagtggaaaggagagctaccatcactaagggctgaaaacacagttaaatcactttcaaagttaaaagactattaagaacacaagatggggactcctgcttctggaaggaaaagaacacctgtgaaagaccgattttctgcagaagatgaagctttgagtaacattgccagagaggcagaggcaaggctggcagcaaaacgggctgcccgggcagaagcaagagatatacgcatgagagaactggaacgacaacaaaaagag

SEQ ID NO: 15827 - DNA, 2522 bp, Homo sapiens
  source 1..2522: mol_type = unassigned DNA
catccttcgcctcctcagtcggccgctcaggctgcggctcctcccggggccggttcccgctgtctcagccgcggcgcagagggcacatcggcctgaccgactagccggctgccagtgccgggagccgccgcgtccatccccgcccgcctggccggggacccaggactgagtcgtccagctgcgcccctcgcccatagccccagcgggcgccgggcgggcgagcagctcttcggcccttcccggacagcgacgcagtcgcagcgcgcgccctaacacagatgtgggaagataaatgaaggggtctagatgtaaatgtcagtggaaaggagagctaccatcactaagggctgaaaacacagttaaatcactttcaaagttaaaagactattaagaacacaagatggggactcctgcttctggaaggaaaagaacacctgtgaaagaccgattttctgcagaagatgaagctttgagtaacattgccagagaggcagaggcaaggctggcagcaaaacgggctgcccgggcagaagcaagagatatacgcatgagagaactggaacgacaacaaaaagagttggatgaaaaatctgacaaacagtatgctgaaaattatacaagaccttcatctcgaaattctgcctcagcaacaacccctctaagtggaaactcatccagacgaggaagtggggacaccagcagcttaatagatccagacacttcattaagtgaattgcgggatatctatgaccttaaggaccagatacaggatgtagaagggagatacatgcaggggcttaaagaactaaaggaatctttgtctgaagtggaagaaaaatacaagaaagccatggtttccaatgcacagttagacaatgagaagaacaatttgatctaccaagtagacacactcaaggatgttattgaagagcaggaggaacagatggcagaattttatagagaaaatgaagaaaaatcaaaggagttagaaaggcagaaacatatgtgtagtgtgctgcagcataagatggaagaacttaaagaaggcctgcggcaaagagatgagcttattgagaaacatggcttagttataatccccgatggcactcccaatggtgatgtcagtcatgaaccagtggctggagccatcactgttgtgtctcaggaagctgctcaggtcttggagtcagcaggagaagggccattagatgtaaggctacgaaaacttgctggagagaaggaagaactactgtcacagattagaaaactgaagcttcagttagaggaggaacgacagaaatgctccaggaatgatggcacagtgggtgacctggcaggactgcagaatggctcagacttgcagttcatcgaaatgcagagagatgccaatagacaaattagcgaatacaaatttaagctttcaaaagcagaacaggatataactaccttggagcaaagtattagccggcttgagggacaggttctgagatataaaactgctgctgagaatgctgagaaagttgaagatgaattgaaagcagaaaaacggaagctacaacgagagttacgaacagcactggacaagattgaggagatggagatgaccaacagccacctggccaagcggctggagaagatgaaggccaataggacagcacttctggcccagcagtaggaaaaccacccttcaacctgggtgatgctccttggggccctacctagagggactgacttttgtccattgacacaaaccccttttagtactgttttgagttttgtcattaaaacagccacctttgtattttataatttatgacagaatgaagtcattttgaatctacatgaatgaacactttggattttgttgtagtttgattctagggtagaaccagtccatgctgtttttattttttatctccgtaattgtagaatcatgtttactcaacgtttttccccagctgcctcagtaactgggcactcggaggccttggcacgggttctggaggacagacagcaattctatgagtgctcactgagatacttgctggagacctcagaaaacacaagtgccttctccacggtgcaattcagacttcagtgatctccagtggtcaaaagacatttacccttaatatcagacaacatttatattttagtgaagaaacaagttctcgggtggggaatctatgtttcactcagatttatatgtttggaggaaaaaagcctttttttgtaaaatatttaaatttatataagaaaatgttagaaaaaaatatggggagtgtatataaaacttgctttattgcatggggcaggggaagtccaggcctaatactcctaaagtaagagttgggtcctttttttcttcaatacaactgtgctgtaccttgtaaagtattttatctgctgcttatttgtggaatgaaacctcaaacaaacccaaagggggagggtagggcagggcaggcagattggaaatctgcctgcagattctattaaatacacccttttgccaaccacaa

SEQ ID NO: 15828 - DNA, 3381 bp, Homo sapiens
  source 1..3381: mol_type = unassigned DNA
atggctccaggacccttctcctcggccctcctctcgccgccgcccgctgccctgccctttctgctgctgctctgggcgggggcatctcgtggccagccctgccccggccgctgcatctgccagaacgtggcgcccacactgacaatgctgtgcgccaagaccggcttgctctttgtgccgcccgccatcgaccggcgcgtggtggagctgcggctcaccgacaacttcatcgccgccgtgcgccgccgagacttcgccaacatgaccagcctggtgcacctcactctctcccggaacaccatcggccaggtggcagctggcgccttcgccgacctgcgtgccctccgggccctgcacctggacagcaaccgcctggcggaggtgcgcggcgaccagctccgcggcctgggcaacctccgccacctgatccttggaaacaaccagatccgccgggtggagtcggcggcctttgacgccttcctgtccaccgtggaggacctggatctgtcctacaacaacctggaggccctgccgtgggaggcggtgggccagatggtgaacctaaacaccctcacgctggaccacaacctcatcgaccacatcgcggaggggaccttcgtgcagcttcacaagctggtccgtctggacatgacctccaaccgcctgcataaactcccgcccgacgggctcttcctgaggtcgcagggcaccgggcccaagccgcccaccccgctgaccgtcagcttcggcggcaaccccctgcactgcaactgcgagctgctctggctgcggcggctgacccgcgaggacgacttagagacctgcgccacgcccgaacacctcaccgaccgctacttctggtccatccccgaggaggagttcctgtgtgagcccccgctgatcacacggcaggcggggggccgggccctggtggtggaaggccaggcggtgagcctgcgctgccgagcggtgggtgaccccgagccggtggtgcactgggtggcacctgatgggcggctgctggggaactccagccggacccgggtccggggggacgggacgctggatgtgaccatcaccaccttgagggacagtggcaccttcacttgtatcgcctccaatgctgctggggaagcgacggcgcccgtggaggtgtgcgtggtacctctgcctctgatggcacccccgccggctgccccgccgcctctcaccgagcccggctcctctgacatcgccacgccgggcagaccaggtgccaacgattctgcggctgagcgtcggctcgtggcagccgagctcacctcgaactccgtgctcatccgctggccagcccagaggcctgtgcccggaatacgcatgtaccaggttcagtacaacagttccgttgatgactccctcgtctacaggatgatcccgtccaccagtcagaccttcctggtgaatgacctggcggcgggccgtgcctacgacttgtgcgtgctggcggtctacgacgacggggccacagcgctgccggcaacgcgagtggtgggctgtgtacagttcaccaccgctggggatccggcgccctgccgcccgctgagggcccatttcttgggcggcaccatgatcatcgccatcgggggcgtcatcgtcgcctcggtcctcgtcttcatcgttctgctcatgatccgctataaggtgtatggcgacggggacagccgccgcgtcaagggctccaggtcgctcccgcgggtcagccacgtgtgctcgcagaccaacggcgcaggcacaggcgcggcacaggccccggccctgccggcccaggaccactacgaggcgctgcgcgaggtggagtcccaggctgcccccgccgtcgccgtcgaggccaaggccatggaggccgagacggcatccgcggagccggaggtggtccttggacgttctctgggcggctcggccacctcgctgtgcctgctgccatccgaggaaacttccggggaggagtctcgggccgcggtgggccctcgaaggagccgatccggcgccctggagccaccaacctcggcgccccctactctagctctagttcctgggggagccgcggcccggccgaggccgcagcagcgctattcgttcgacggggactacggggcactattccagagccacagttacccgcgccgcgcccggcggacaaagcgccaccggtccacgccgcacctggacggggctggagggggcgcggccggggaggatggagacctggggctgggctccgccagggcgtgcctggctttcaccagcaccgagtggatgctggagagtaccgtgtgagcggcgggcgggcgccgggacgcctgggtgccgcagaccaaacgcccagccgcacggacgctggggcgggactgggagaaagcgcagcgccaagacattggaccagagtggagacgcgcccttgtccccgggagggggcggggcagcctcgggctgcggctcgaggccacgcccccgtgcccagggcggggttcggggaccggctgccggcctcccttcccctatggactcctcgacccccctcctacccctcccctcgcgcgctcgcggacctcgctggagccggtgccttacacagcgaagcgcggggaggggcagggccccctgacactgcagcactgagacacgagccccctcccccagcccgtcacccggggccggggcgaggggcccatttcttgtatctggctggactagatcctattctgtcccgcggcggcctccaaagcctcccaccccaccccacgcacattcctggtccggtcgggtctggcttggggtccccctttctctgtttccctcgtttgtctctatcccgccctcttgtcgtctctctgtagtgcctgtctttccctatttgcctctcctttctctctgtcctgtcgtctcttgtccctcggccctccctggttttgtctagtctccctgtctctcctgatttcttctctttactcattctcccgggcaggtcccactggaaggaccagactctcccaaataaatccccacacgaacaaaatccaaaaccaaatccccctccctaccggagccgggaccctccgccgcagcagaattaaacttttttctgtgtctgaggccctgctgacctgtgtgtgtgtctgtatgtgtgtccgcgtgtagtgtgtgtgtgtgtgtgtgtgtgtgtgtgtgtgtgtgtgtgttgggggagggtgacctagattgcagcataaggactctaagtgagactgaaggaagatgggaagatgactaactggggccggaggagactggcagacaggcttttatcctctgagagacttagaggtggggaataatcacaaaaataaaatgatcataatagct

SEQ ID NO: 15829 - DNA, 3270 bp, Homo sapiens
  source 1..3270: mol_type = unassigned DNA
tatgcgcgcgcgcgtggggggcagtgtgcatgcggggagtacgggggagtgtgtttgtgtgtgcgtgtgggtgtgagtgcctggctccctctcgctgagacacacatacactcacacatacacaacccggcaggctcgtctgaacttgaagacaccccacattccaagatgcccgaggttcctgggaatgcctggggttcttcgatccggaaaatcctaccggcatcctcctagggagggattattattattatttttctttaatctggaagagaagagaacaagttgtgcttttccccccttcttcttgctaaatgccatggatataactgaataagcggctcagggctttccccgcgtggacgtccgaggccaccatctgcctgcattcgccggagccgccggagggtttagctcgagtctgtctcgggcggggaaggatgcgtggccgagccggggagcccgggcgccccgcggagccggcctcggtgccacccagccgggggtagatgctgcctcgcccaggcgctgagtgaccagaccatggagaccctgcttggtggcctgctagcgtttggcatggcgtttgccgtggtcgacgcctgccccaagtactgtgtctgccagaatctgtctgagtcactggggaccctgtgcccctccaaggggctgctctttgtaccccctgatattgaccggcggacagtggagctgcgcctgggcggcaacttcatcatccacatcagccgccaggactttgccaacatgacggggctggtggacctgaccctgtccaggaacaccatcagccacatccagcccttttcctttctggacctcgagagcctccgctccctgcatcttgacagcaatcggctgccaagccttggggaggacaccctccggggcctggtcaacctgcagcaccttatcgtgaacaacaaccagctgggcggcatcgcagatgaggcttttgaggacttcctgctgacattggaggatctggacctctcctacaacaacctccatggcctgccgtgggactccgtgcgacgcatggtcaacctccaccagctgagcctggaccacaacctgctggatcacatcgccgagggcacctttgcagacctgcagaaactggcccgcctggatctcacctccaatcggctgcagaagctgccccctgatcccatctttgcccgctcccaggcttcggctttgacagccacaccctttgccccacccttgtcctttagttttgggggtaacccacttcactgcaattgtgagcttctctggctgcggaggctcgagcgggacgatgacctggaaacctgtggctccccagggggcctcaagggtcgctacttctggcatgtgcgtgaggaggagtttgtgtgcgagccgcctctcatcacccagcacacacacaagttgctggttctggagggccaggcggccacactcaagtgcaaagccattggggaccccagcccccttatccactgggtagcccccgatgaccgcctggtagggaactcctcaaggaccgctgtctatgacaatggcaccctggacatcttcatcaccacatctcaggacagtggtgccttcacctgcattgctgccaatgctgccggagaggccacggccatggtggaggtctccatcgtccagctgccacacctcagcaacagcaccagccgcactgcaccccccaagtcccgcctctcagacatcactggctccagcaagaccagccggggaggtggaggcagtgggggcggagagcctcccaaaagccccccggaacgggctgtgcttgtgtctgaagtgaccaccacctcggccctggtcaagtggtctgtcagcaagtcagcaccccgggtgaagatgtaccagctgcagtacaactgctctgacgatgaggtactgatttacaggatgatcccagcctccaacaaggccttcgtggtcaacaacctggtgtcagggactggctacgacttgtgtgtgctggccatgtgggatgacacagccacgacactcacggccaccaacatcgtgggctgcgcccagttcttcaccaaggctgactacccgcagtgccagtccatgcacagccagattctgggcggcaccatgatcctggtcatcgggggcatcatcgtggccacgctgctggtcttcatcgtcatcctcatggtgcgctacaaggtctgcaaccacgaggcccccagcaagatggcagcggccgtgagcaatgtgtactcgcagaccaacggcgcccagccaccgcctccaagcagcgcaccagccggggccccgccgcagggcccgccgaaggtggtggtgcgcaacgagctcctggacttcaccgccagcctggcccgcgccagtgactcctcttcctccagctccctgggcagtggggaggctgcggggctgggacgggccccctggaggatcccaccctccgccccgcgccccaagcccagccttgaccgcctgatgggggccttcgcctccctggacctcaagagtcagagaaaggaggagctgctggactccaggactccagccgggagaggggctgggacgtcggcccggggccaccactcggaccgagagccactgctggggccccctgcggcccgggccaggagcctgctccccttgccgttggagggcaaggccaaacgcagccactccttcgacatgggggactttgctgctgcggcggcgggaggggtcgtgccgggcggctacagtcctcctcggaaggtctcgaacatctggacgaagcgcagcctctctgtcaacggcatgctcttgccctttgaggagagtgacctggtgggggcccgggggacttttggcagctccgaatgggtgatggagagcacggtctaggtgggggtgggcatgctccctttcctgtgcgcagggtgggagaaggggaaagaatctcactggcaagtgtttgtggagtttccatggtgatgtttacatccagggacagtttcgtctccctgtcaatggcctcgtgtccccccctaccccgcaacacccacatcacctccccaccacccggccggggtgtgctcagggaatgtggactcgctcaaatgccggactgagccctgagtgtttggaaaggcgagactccgcctttctaatcacaaatgtagcctacaagcaagcggctttggattgcttatgggtctagtgttgtttttatttcttaatttattttttttccatttccca

SEQ ID NO: 15830 - DNA, 2513 bp, Homo sapiens
  source 1..2513: mol_type = unassigned DNA
ccaaggggcctgaacccgagtttgggcctgaagtccttgctgcagacctgagtgcttaaatctggggcttgagacctcccaatcttgactcagcaccccaatatctgaatgcagaaccccgggatcggatctcagactctaaaccccaccgtttggctgcttagcatcccaagactggacctgggagaccctgaccctgaacaacccaaactggacccgtaaaactggaccctagaggcccaatatttaggggtctggaaccccgagtattaaggtctggagactccgttgccacagatttgagccgagtcaggacacagtccctctacagaagccttggggacaggaaaagcatgaccagatgctccctccagagccctgacctctgactcccctggagctaggactctgctccctggggctgcttctagctcaggacacccctgcccgcgatggccatcctcccgttgctcctgtgcctgctgccgctggcccctgcctcatccccaccccagtcagccacacccagcccatgtccccgccgctgccgctgccagacacagtcgctgcccctaagcgtgctgtgcccaggggcaggcctcctgttcgtgccaccctcgctggaccgccgggcagccgagctgcggctggcagacaacttcatcgcctccgtgcgccgccgcgacctggccaacatgacaggcctgctgcatctgagcctgtcgcggaacaccatccgccacgtggctgccggcgccttcgccgacctgcgggccctgcgtgccctgcacctggatggcaaccggctgacctcactgggcgagggccagctgcgcggcctggtcaacttgcgccacctcatcctcagcaacaaccagctggcagcgctggcggccggcgccctggatgattgtgccgagacactggaggacctcgacctctcctacaacaacctcgagcagctgccctgggaggccctgggccgcctgggcaacgtcaacacgttgggcctcgaccacaacctgctggcttctgtgcccgccggcgctttttcccgcctgcacaagctggcccggctggacatgacctccaaccgcctgaccacaatcccacccgacccactcttctcccgcctgcccctgctcgccaggccccggggctcgcccgcctctgccctggtgctggcctttggcgggaaccccctgcactgcaactgcgagctggtgtggctgcgtcgcctggcgcgggaggacgacctcgaggcctgcgcgtccccacctgctctgggcggccgctacttctgggcggtgggcgaggaggagtttgtctgcgagccgcccgtggtgactcaccgctcaccacctctggctgtgcccgcaggtcggccggctgccctgcgctgccgggcagtgggggacccagagccccgtgtgcgttgggtgtcaccccagggccggctgctaggcaactcaagccgtgcccgcgccttccccaatgggacgctggagctgctggtcaccgagccgggtgatggtggcatcttcacctgcattgcggccaatgcagctggcgaggccacagctgctgtggagctgactgtgggtcccccaccacctcctcagctagccaacagcaccagctgtgaccccccgcgggacggggatcctgatgctctcaccccaccctccgctgcctctgcttctgccaaggtggccgacactgggccccctaccgaccgtggcgtccaggtgactgagcacggggccacagctgctcttgtccagtggccggatcagcggcctatcccgggcatccgcatgtaccagatccagtacaacagctcggctgatgacatcctcgtctacaggatgatcccggcggagagccgctcgttcctgctgacggacctggcgtcaggccggacctacgatctgtgcgtgctcgccgtgtatgaggacagcgccacggggctcacggccacgcggcctgtgggctgcgcccgcttctccaccgaacctgcgctgcggccatgcggggcgccgcacgctcccttcctgggcggcacgatgatcatcgcgctgggcggcgtcatcgtagcctcggtactggtcttcatcttcgtgctgctaatgcgctacaaggtgcacggcggccagccccccggcaaggccaagattcccgcgcctgttagcagcgtttgctcccagaccaacggcgccctgggccccacgcccacgcccgccccgcccgccccggagcccgcggcgctcagggcccacaccgtggtccagctggactgcgagccctgggggcccggccacgaacctgtgggaccctagccaggcgcccccccctctaagggtcctctggccccacggacagcaggacccggacaccctgtgggacctggcctcaaactcaccaaatcgctcatggtttttaaaactctgatggggagggtgtcggggacaccggggcaaaacaagaaagtcctatttttccaagcttgggcg

SEQ ID NO: 15831 - DNA, 3689 bp, Homo sapiens
  source 1..3689: mol_type = unassigned DNA
ctccatgttggccaggctggtctccaacgcctgatctcaaaagatccgcccgccttggcctcccaacgagccgggattacaggcgtgagccaccgcccccggctgtcagtgtgtcttgaggtctttccctaatcccagatggcacaagttttccctcttgcaggcagagaaaggagccttgggaaggagcccctctggcctgaaagatcaagcctattgctgggcatggccagattgaatcgggaattccggaaacccgagcctggaaccctgatctgggaccagcaccccgagatccggccgtggaaccccaagatctggagcctgaaccccagtatatggggctggaatctcaacatcggtcactgggacctcaatatttggagccggaaccccacaatttggaacacagaccccaatatttggagcagaaccccaagatttgacatctaaaacctcaagcctggagctgaactctgaattctgggcctgggaccttgaaatctgggactggatttccagtactgtaccctggaacccactcttggggacctgaaccctgggattcaggcctcaaattccaagatctggactgtgggattccaaggggcctgaacccgagtttgggcctgaagtccttgctgcagacctgagtgcttaaatctggggcttgagacctcccaatcttgactcagcaccccaatatctgaatgcagaaccccgggatcggatctcagactctaaaccccaccgtttggctgcttagcatcccaagactggacctgggagaccctgaccctgaacaacccaaactggacccgtaaaactggaccctagaggcccaatatttaggggtctggaaccccgagtattaaggtctggagactccgttgccacagatttgagccgagtcaggacacagtccctctacagaagccttggggacaggaaaagcatgaccagatgctccctccagagccctgacctctgactcccctggagctaggactctgctccctggggctgcttctagctcaggacacccctgcccgcgatggccatcctcccgttgctcctgtgcctgctgccgctggcccctgcctcatccccaccccagtcagccacacccagcccatgtccccgccgctgccgctgccagacacagtcgctgcccctaagcgtgctgtgcccaggggcaggcctcctgttcgtgccaccctcgctggaccgccgggcagccgagctgcggctggcagacaacttcatcgcctccgtgcgccgccgcgacctggccaacatgacaggcctgctgcatctgagcctgtcgcggaacaccatccgccacgtggctgccggcgccttcgccgacctgcgggccctgcgtgccctgcacctggatggcaaccggctgacctcactgggcgagggccagctgcgcggcctggtcaacttgcgccacctcatcctcagcaacaaccagctggcagcgctggcggccggcgccctggatgattgtgccgagacactggaggacctcgacctctcctacaacaacctcgagcagctgccctgggaggccctgggccgcctgggcaacgtcaacacgttgggcctcgaccacaacctgctggcttctgtgcccgccggcgctttttcccgcctgcacaagctggcccggctggacatgacctccaaccgcctgaccacaatcccacccgacccactcttctcccgcctgcccctgctcgccaggccccggggctcgcccgcctctgccctggtgctggcctttggcgggaaccccctgcactgcaactgcgagctggtgtggctgcgtcgcctggcgcgggaggacgacctcgaggcctgcgcgtccccacctgctctgggcggccgctacttctgggcggtgggcgaggaggagtttgtctgcgagccgcccgtggtgactcaccgctcaccacctctggctgtgcccgcaggtcggccggctgccctgcgctgccgggcagtgggggacccagagccccgtgtgcgttgggtgtcaccccagggccggctgctaggcaactcaagccgtgcccgcgccttccccaatgggacgctggagctgctggtcaccgagccgggtgatggtggcatcttcacctgcattgcggccaatgcagctggcgaggccacagctgctgtggagctgactgtgggtcccccaccacctcctcagctagccaacagcaccagctgtgaccccccgcgggacggggatcctgatgctctcaccccaccctccgctgcctctgcttctgccaaggtggccgacactgggccccctaccgaccgtggcgtccaggtgactgagcacggggccacagctgctcttgtccagtggccggatcagcggcctatcccgggcatccgcatgtaccagatccagtacaacagctcggctgatgacatcctcgtctacaggatgatcccggcggagagccgctcgttcctgctgacggacctggcgtcaggccggacctacgatctgtgcgtgctcgccgtgtatgaggacagcgccacggggctcacggccacgcggcctgtgggctgcgcccgcttctccaccgaacctgcgctgcggccatgcggggcgccgcacgctcccttcctgggcggcacgatgatcatcgcgctgggcggcgtcatcgtagcctcggtactggtcttcatcttcgtgctgctaatgcgctacaaggtgcacggcggccagccccccggcaaggccaagattcccgcgcctgttagcagcgtttgctcccagaccaacggcgccctgggccccacgcccacgcccgccccgcccgccccggagcccgcggcgctcagggcccacaccgtggtccagctggactgcgagccctgggggcccggccacgaacctgtgggaccctagccaggcgcccccccctctaagggtcctctggccccacggacagcaggacccggacaccctgtgggacctggcctcaaactcaccaaatcgctcatggtttttaaaactctgatggggagggtgtcggggacaccggggcaaaacaagaaagtcctatttttccaagcttgggcgaagacccttgccctcgtctctgtctatgggggttgggggacggagcaggggtctggagctggggaatgcctcctttggggagacaccccctccccgcccagttcagtctgaggaccccggaggaggctgaggatggcgatccattcagacaatagatgttccctgcgtgtcggctctgagcatgccctgggttgggggatgctgtggtgatccagatagccctgagccctgcccgcaggggcctaaagtcaaatgggagacagacacatccccagacagtgatagcacagagtgaccagggatgtggggatgagggaagcctgggggattgtgacagtccagaagaggtacccttgctcagccccaggtgtggtcagggagggcttcctggaggaggacacatgtgatctgagaatgacatatgaaggagataactgggcaaagagcagaaggaaagctctttcaggcagagggcacagcacaagcaaggtggtggtgtgccctgggcactgggggtgctatggtagaggtgaggcaggagggttgagcagggtctaggacctccaggctgagg

SEQ ID NO: 15832 - DNA, 2431 bp, Homo sapiens
  source 1..2431: mol_type = unassigned DNA
cttgtccccagcgcctggactcccccttaactgcttgggaaatgtgacctttgctctggggggcctggccctgcaggccccaaccttccctcatctctggcggccctcttgggcctctgacccagcccctccccgggccaggctcacagaagctggcttctgggactgtcctgggcccaagtgggcacctgcgccagccccacctgtgcctgggctgtggccccttcctacagggcgctcaccatggccccgccgctcctgctgctgctgctggccagtggagcggccgcctgcccgctgccctgcgtctgccagaacctgtccgagtcgctcagcaccctctgtgcccaccgaggcctgctgtttgtgccgcccaacgtggaccggcgcacagtggagctgcggctggctgacaacttcatccaggccctggggccccctgacttccgcaacatgacgggactggtggacctgacactgtctcgcaatgccatcacccgcattggggcccgcgcctttggggacctcgagagcctgcgttccctccaccttgacggcaacaggctggtggagctgggcaccgggagcctccggggccccgtcaatctgcagcacctcatcctcagcggcaaccagctgggccgcatcgcgccgggagccttcgacgacttcctagagagcctggaggacctggacctgtcctacaacaacctccggcaggtgccctgggccggcatcggcgccatgcctgccctgcacaccctcaacctggaccataaccttattgacgcactgcccccaggcgccttcgcccagctcggtcagctctcccgcctggacctcacctccaaccgcctggccacgctggctccggacccgcttttctctcgtgggcgtgatgcagaggcctctcccgcccccctggtgctgagctttagcgggaaccccctgcactgcaactgtgagctgctgtggctgcggcggctggcgcggccggacgacctggaaacgtgcgcctccccgcccggcctggccggccgctacttctgggcagtgcccgagggcgagttctcctgtgagccgcccctcattgcccgccacacgcagcgcctctgggtgctggaaggccagcgggccacgctgcggtgccgggccctgggtgaccccgcgcctaccatgcactgggtcggtcctgacgaccggttggttggcaactcctcccgagcccgggctttccccaacgggaccttagagattggggtgaccggcgctggggacgctgggggctacacctgcatcgccaccaaccctgctggtgaggccacagcccgagtagaactgcgggtgctggccttgccccatggtgggaacagcagtgccgaggggggccgccccgggccctcggacatcgccgcctccgctcgcactgctgccgagggtgaggggacgctggagtctgagccagccgtgcaggtgacggaggtgaccgccacctcagggctggtgagctggggtcccgggcggccagccgacccagtgtggatgttccaaatccagtacaacagcagcgaagatgagaccctcatctaccggattgtcccagcctccagccaccacttcctgctgaagcacctcgtccccggcgctgactatgacctctgcctgctggccttgtcaccggccgctgggccctctgacctcacggccaccaggctgctgggctgtgcccatttctccacgctgccggcctcgcccctgtgccacgccctgcaggcccacgtgctgggcgggaccctgaccgtggccgtggggggtgtgctggtggctgccttactggtcttcactgtggccttgctggttcggggccggggggccggaaatggccgcctccccctcaagctcagccacgtccagtcccagaccaatggaggccccagccccacacccaaggcccacccgccgcggagccccccgccccggccgcagcgcagctgctctctggacctgggagatgccgggtgctacggttatgccaggcgcctgggaggagcttgggcccgacggagccactctgtgcatggggggctgctcggggcagggtgccggggggtaggaggcagcgccgagcggctggaagagagtgtggtgtgatggacgggcagcttcctgtgtgctccaagggatgagcctcgtggggcagagggcccggggccgccgcctggcctgggagtccctccctggtttttattctcagtacctcaggctcccctgtgtacttggaggggcagggagccctttcctcggttctggcctccagaccagggtaagggcaggcccctccaacaggtgctcacagccaccgaggcaggggctgcagccacccactgggagtcttgtttttatttataataaaattgttggggacacctca

SEQ ID NO: 15833 - DNA, 3723 bp, Homo sapiens
  source 1..3723: mol_type = unassigned DNA
atttgactgtcttttatccaactgcccagaagcaaatgtgttaactcggcgatgccccttcatgcccgggttcttgcagagctctgaggacgcccagacccattttcctggctggatttggagcggctgctgggctgtggacccaggtgtgtggatcgctttacccagaagcttggaaagcgccaatattaacctgcttccaggtacatcacaaggtcaagagagtgtcttgcagccctcttgtttccgtgtatctacaccttcttctcttggccagaaggatatttacgttttggttcacagcatttgaagccaaaagttcagcccttcgaactggtttgctatacaaaacaaaacaaaacaaataaggtaatgaggattgcttattaaactgcttaacaaaatccccgactcttcctcagccctttctcggctccctcctccccaccaaaatgtcaccagctcttgaattacgtggattcgggttggaggagaacttgaaggaaacgtgattaaagggctatgcgagaacgctctctttgctgcccgcggtccggtgggcttcgaagccaatcgtgagaaggaccggttccctccgtgctgcttcctccccgtgcagtgctgggtgtgcgtgtgcgagtgtgagtgcaagtgcgcgcgcgcccgggtgcgagtgtgtgtgagtgtgagcgtgtgtctgtgtgtgcgtgcgcggccgccctgcctctgcccgctccccgggcgcggagccgcgggtttcatggggcgattgcagcgattcccccacccagagcgacctgcgggcagcggcggcagtggcaggagccgcctttccgattccctacgatgcgggtgctgagctatggcaaagggcagcgaagtgacgagcgagacccgcgtacgactgtgaaagccacctggagccaccttgccgggattgtacctgcaggcagaaagtcttcctacgaccgtcttttcccttagaggcaccagaatccctgtaaccattcatccaggtgttgagaagatatgtagcagccgagcacccatcttttgacaccgtcctctgaaatcagctttggagatgctttcactctgtccgtcttctgcagcagccaggcagagtgccgactccttcacagccgtgaggaactcttcaggctccagaagctcttaaacctgatctacaatggaaaaaattcttttttatctgtttctcattggcatagcagtgaaagctcagatctgtccaaagcgttgtgtctgtcagattttgtctcctaatcttgcaaccctttgtgccaagaaagggcttttatttgttccaccaaacattgacagaagaactgtggaactgcggttggcagacaattttgttacaaatattaaaaggaaagattttgccaatatgaccagcttggtggacctgactctatccaggaatacaataagttttattacacctcatgctttcgctgacctacgaaatttgagggctttgcatttgaatagcaacagattgactaaaattacaaatgatatgttcagtggtctttccaatcttcatcatttgatactgaacaacaatcagctgactttaatttcctctacagcgtttgatgatgtcttcgcccttgaggagctggatctgtcctataataatctagaaaccattccttgggatgctgttgagaagatggttagcttgcatacccttagtttggatcacaatatgattgataacattcctaaggggaccttctcccatttgcacaagatgactcggttagatgtgacatcaaataaattgcagaagctaccacctgaccctctctttcagcgagctcaggtactagcaacctcaggaatcataagcccatctacttttgcattaagttttggtggaaaccccttgcattgcaattgtgaattgttgtggttgaggcgtctgtccagagaagatgacttagagacctgtgcttctcctccacttttaactggccgctacttttggtcaattcctgaagaagagtttttgtgtgagcctcctctcattactcgtcatacacatgagatgagagtcctggagggacaaagggcaacactgaggtgcaaagccaggggagaccctgagcctgcaattcactggatttctcctgaagggaagcttatttcaaatgcaacaagatctctggtgtatgataacggaacacttgacattcttatcacaactgtaaaggatacaggtgcttttacctgcattgcttccaatcctgctggggaagcaacacaaatagtggatcttcatataattaagctccctcacttactaaatagtacaaaccatatccatgagcctgatcctggttcttcagatatctcaacttctaccaagtcaggttctaatacaagcagtagtaatggtgatactaaattgagtcaagataaaattgtggtggcagaagctacatcatcaacggcactacttaaatttaattttcaaagaaatatccctggaatacgtatgtttcaaatccagtacaatggtacttatgatgacacccttgtttacagaatgatacctcctacgagcaaaacttttctggtcaataatctggctgctggaactatgtatgacttgtgtgtcttggccatatatgatgatggcatcacttccctcactgccacaagagtcgtgggttgcatccagtttactacggaacaggattatgtgcgttgccatttcatgcagtctcagtttttgggaggcaccatgattattattattggtggaatcattgtagcatctgtgctggtattcatcattattctgatgatccggtataaggtttgcaacaataatgggcaacacaaggtcaccaaggttagcaatgtttattcccaaactaacggggctcaaatacaaggctgtagtgtaacgctgccccagtccgtgtccaaacaagctgtgggacacgaagagaatgcccagtgttgtaaagctaccagtgacaatgtgattcaatcttcagaaacttgttcgagtcaggactcctctaccactacctctgctttgcctccttcctggacttcaagcacttctgtgtcccaaaagcagaaaagaaagactggcacaaagccaagtacagaaccacagaatgaagccgtcacaaatgttgaatcccaaaacactaacaggaacaactcaactgccttgcagttagctagccgtcctcccgattctgtcacagaggggcccacgtctaaaagagcacatataaagccaaatgctttgctgactaatgttgaccagattgtccaggaaacacagaggctggagttaatctgaagagcaccacttctcctctctctcctgaaaaaatttgccactgatatttttactggataaaattcaaaaatgtttcaattcacaaaggctaattgttgaactggtgtcgtagaagaaattgtctacaggagccaaggtgaaagtctctgatgacggcggaactggctccattagaccatggttcatcctcttttaaaaccaaatttttttttcttctggcctacaagtattttttttttaaaaaagaaaaaaagcctacattggcatcaagttctgtatcaatccatcttacattgccatccatgatttaacagactgtagaatcttgaataatctatatcactttaacaaataaatgttttactatgacagaa

SEQ ID NO: 15834 - DNA, 3055 bp, Homo sapiens
  source 1..3055: mol_type = unassigned DNA
gcgcggggcggacagacggacagccagccccgcgagggcgcgcggactgccgggcggaggtgtcggaggaggaggaaacggaggagggggctgggcaggggctggggcctggtcgggccggctggagagacatgcgattggtgaccgagccgagcggaccgaaggcgcgcccgagatgcaggtgagcaagaggatgctggcggggggcgtgaggagcatgcccagccccctcctggcctgctggcagcccatcctcctgctggtgctgggctcagtgctgtcaggctcggccacgggctgcccgccccgctgcgagtgctccgcccaggaccgcgctgtgctgtgccaccgcaagcgctttgtggcagtccccgagggcatccccaccgagacgcgcctgctggacctaggcaagaaccgcatcaaaacgctcaaccaggacgagttcgccagcttcccgcacctggaggagctggagctcaacgagaacatcgtgagcgccgtggagcccggcgccttcaacaacctcttcaacctccggacgctgggtctccgcagcaaccgcctgaagctcatcccgctaggcgtcttcactggcctcagcaacctgaccaagctggacatcagcgagaacaagatcgttatcctactggactacatgtttcaggacctgtacaacctcaagtcactggaggttggcgacaatgacctcgtctacatctctcaccgcgccttcagcggcctcaacagcctggagcagctgacgctggagaaatgcaacctgacctccatccccaccgaggcgctgtcccacctgcacggcctcatcgtcctgaggctccggcacctcaacatcaatgccatccgggactactccttcaagaggctgtaccgactcaaggtcttggagatctcccactggccctacttggacaccatgacacccaactgcctctacggcctcaacctgacgtccctgtccatcacacactgcaatctgaccgctgtgccctacctggccgtccgccacctagtctatctccgcttcctcaacctctcctacaaccccatcagcaccattgagggctccatgttgcatgagctgctccggctgcaggagatccagctggtgggcgggcagctggccgtggtggagccctatgccttccgcggcctcaactacctgcgcgtgctcaatgtctctggcaaccagctgaccacactggaggaatcagtcttccactcggtgggcaacctggagacactcatcctggactccaacccgctggcctgcgactgtcggctcctgtgggtgttccggcgccgctggcggctcaacttcaaccggcagcagcccacgtgcgccacgcccgagtttgtccagggcaaggagttcaaggacttccctgatgtgctactgcccaactacttcacctgccgccgcgcccgcatccgggaccgcaaggcccagcaggtgtttgtggacgagggccacacggtgcagtttgtgtgccgggccgatggcgacccgccgcccgccatcctctggctctcaccccgaaagcacctggtctcagccaagagcaatgggcggctcacagtcttccctgatggcacgctggaggtgcgctacgcccaggtacaggacaacggcacgtacctgtgcatcgcggccaacgcgggcggcaacgactccatgcccgcccacctgcatgtgcgcagctactcgcccgactggccccatcagcccaacaagaccttcgctttcatctccaaccagccgggcgagggagaggccaacagcacccgcgccactgtgcctttccccttcgacatcaagaccctcatcatcgccaccaccatgggcttcatctctttcctgggcgtcgtcctcttctgcctggtgctgctgtttctctggagccggggcaagggcaacacaaagcacaacatcgagatcgagtatgtgccccgaaagtcggacgcaggcatcagctccgccgacgcgccccgcaagttcaacatgaagatgatatgaggccggggcggggggcagggacccccgggcggccgggcaggggaaggggcctggccgccacctgctcactctccagtccttcccacctcctccctacccttctacacacgttctctttctccctcccgcctccgtcccctgctgccccccgccagccctcaccacctgccctccttctaccaggacctcagaagcccagacctggggaccccacctacacaggggcattgacagactggagttgaaagccgacgaaccgacacgcggcagagtcaataattcaataaaaaagttacgaactttctctgtaacttgggtttcaataattatggatttttatgaaaacttgaaataataaaaagagaaaaaaactatttcctatagctagtcggaatgcaaacttttgacgtcctgattgctccagggccctcttccaactcagtttcttgtttttctcttcctcctcctcctcttcttcctcctttctcttctcttccccagtggggagggatcactcaggaaaacaggaaaggaggttccagccccacccacctgcccaccccgccccaggcaccatcaggagcaggctagggggcaggcctgggcccagctccgggctggctttttgcagggcgcaggtggaggggacaggtctgccgatgggggtgggagcctgtctgctgggctgccaggcggcaccactgcaaggggtgggagcctggcttgggtgtggctgagactctggacagaggctggggtcctcctgggggacagcacagtcagtggagagagccaggggctggaggtggggcccaccccagcctctggtcccagctctgctgctcacttgctgtgtggcctcaagcaggtcactggcctctctgggcctcagtctccacatctgtacaaatgggaacattaccccctgccctgcctacctcacagggctgttgtgaggaattgatgagatgatgtatgtgaaacactttgtaacctgtaaagcgctgtgcacacgtg

SEQ ID NO: 15835 - DNA, 552 bp, Homo sapiens
  source 1..552: mol_type = unassigned DNA
attattagctccatctaagagacaggaagacggagattccaagaggctcagggacttgcccggggtcacctggctgaccagtggccttgtcaggcctccacccagggatcttatgaccatgacctggctaccttgagtctgtggggctacacagccttcagcctgcatctccagggctctgactctatccagctcctggaccagctcccaagtctactcctgaccccagcctgggccaaggggacttctcaagctttgggacccagcaggacacagcagcagtcaggtgcatgctgggaccgcgacggacaggctgccgcaccccaggcccccagaggccagtctgtttgcctcccaacgccatctgacccaggtgagcaagaggatgctggcggggggcgtgaggagcatgcccagccccctcctggcctgctggcagcccatcctcctgctggtgctgggctcagtgctgtcaggctcggccacgggctgcccgccccgctgcgagtgctccgcccaggaccgcgctgtgctgtgccaccgcaagcgctt

SEQ ID NO: 15836 - DNA, 2677 bp, Homo sapiens
  source 1..2677: mol_type = unassigned DNA
agaggataattccccattatacagagatatttagcctaatagaagccgacagatcattcagggcagtaatgtactccggcttcaagcgtgtagtttcctcagcctgaactcccagattaaaggctccttgcccagcccgccctgtgccggtgcctgtgaccttgactgcaatgatgggggatcttatgaccatgacctggctaccttgagtctgtggggctacacagccttcagcctgcatctccagggctctgactctatccagctcctggaccagctcccaagtctactcctgaccccagcctgggccaaggggacttctcaagctttgggacccagcaggacacagcagcagtcaggtgcatgctgggaccgcgacggacaggctgccgcaccccaggcccccagaggccagtctgtttgcctcccaacgccatctgacccaggtgagcaagaggatgctggcggggggcgtgaggagcatgcccagccccctcctggcctgctggcagcccatcctcctgctggtgctgggctcagtgctgtcaggctcggccacgggctgcccgccccgctgcgagtgctccgcccaggaccgcgctgtgctgtgccaccgcaagcgctttgtggcagtccccgagggcatccccaccgagacgcgcctgctggacctaggcaagaaccgcatcaaaacgctcaaccaggacgagttcgccagcttcccgcacctggaggagctggagctcaacgagaacatcgtgagcgccgtggagcccggcgccttcaacaacctcttcaacctccggacgctgggtctccgcagcaaccgcctgaagctcatcccgctaggcgtcttcactggcctcagcaacctgaccaagctggacatcagcgagaacaagatcgttatcctactggactacatgtttcaggacctgtacaacctcaagtcactggaggttggcgacaatgacctcgtctacatctctcaccgcgccttcagcggcctcaacagcctggagcagctgacgctggagaaatgcaacctgacctccatccccaccgaggcgctgtcccacctgcacggcctcatcgtcctgaggctccggcacctcaacatcaatgccatccgggactactccttcaagaggctgtaccgactcaaggtcttggagatctcccactggccctacttggacaccatgacacccaactgcctctacggcctcaacctgacgtccctgtccatcacacactgcaatctgaccgctgtgccctacctggccgtccgccacctagtctatctccgcttcctcaacctctcctacaaccccatcagcaccattgagggctccatgttgcatgagctgctccggctgcaggagatccagctggtgggcgggcagctggccgtggtggagccctatgccttccgcggcctcaactacctgcgcgtgctcaatgtctctggcaaccagctgaccacactggaggaatcagtcttccactcggtgggcaacctggagacactcatcctggactccaacccgctggcctgcgactgtcggctcctgtgggtgttccggcgccgctggcggctcaacttcaaccggcagcagcccacgtgcgccacgcccgagtttgtccagggcaaggagttcaaggacttccctgatgtgctactgcccaactacttcacctgccgccgcgcccgcatccgggaccgcaaggcccagcaggtgtttgtggacgagggccacacggtgcagtttgtgtgccgggccgatggcgacccgccgcccgccatcctctggctctcaccccgaaagcacctggtctcagccaagagcaatgggcggctcacagtcttccctgatggcacgctggaggtgcgctacgcccaggtacaggacaacggcacgtacctgtgcatcgcggccaacgcgggcggcaacgactccatgcccgcccacctgcatgtgcgcagctactcgcccgactggccccatcagcccaacaagaccttcgctttcatctccaaccagccgggcgagggagaggccaacagcacccgcgccactgtgcctttccccttcgacatcaagaccctcatcatcgccaccaccatgggcttcatctctttcctgggcgtcgtcctcttctgcctggtgctgctgtttctctggagccggggcaagggcaacacaaagcacaacatcgagatcgagtatgtgccccgaaagtcggacgcaggcatcagctccgccgacgcgccccgcaagttcaacatgaagatgatatgaggccggggcggggggcagggacccccgggcggccgggcaggggaaggggcctggccgccacctgctcactctccagtccttcccacctcctccctacccttctacacacgttctctttctccctcccgcctccgtcccctgctgccccccgccagccctcaccacctgccctccttctaccaggacctcagaagcccagacctggggaccccacctacacaggggcattgacagactggagttgaaagccgacgaaccgacacgcggcagagtcaataattcaataaaaaagttacgaactttctctgtaacttgggtttcaataattatggatttttatgaaaacttgaaataataaaaagagaaaaaaacta

SEQ ID NO: 15837 - DNA, 2368 bp, Homo sapiens
  source 1..2368: mol_type = unassigned DNA
aggtggatacatttgcaaagtggaatcctccaggtgcctttaaggagtttacagtctagtaggtatgaatccagccatcctcagcagtggcaccgatatcttcaaaagtgtcgtttgtctggctctctgccttctggatgggaagcctaccctgatgtctctcttcaaatctgataaatcatgaggaacctataacccttttggccacatgcaaaaaagcaagacccgtgaccaaggtgtagactaagaagtggagtcatgcttcacacggccatatcatgctggcagccattcctgggtctggctgtggtgttaatcttcatgggatccaccattggctgccccgctcgctgtgagtgctctgcccagaacaaatctgttagctgtcacagaaggcgattgatcgccatcccagagggcattcccatcgaaaccaaaatcttggacctcagtaaaaacaggctaaaaagcgtcaaccctgaagaattcatatcatatcctctgctggaagagatagacttgagtgacaacatcattgccaatgtggaaccaggagcattcaacaatctctttaacctgcgttccctccgcctaaaaggcaatcgtctaaagctggtccctttgggagtattcacggggctgtccaatctcactaagcttgacattagtgagaataagattgtcattttactagactacatgttccaagatctacataacctgaagtctctagaagtgggggacaatgatttggtttatatatcacacagggcattcagtgggcttcttagcttggagcagctcaccctggagaaatgcaacttaacagcagtaccaacagaagccctctcccacctccgcagcctcatcagcctgcatctgaagcatctcaatatcaacaatatgcctgtgtatgcctttaaaagattgttccacctgaaacacctagagattgactattggcctttactggatatgatgcctgccaatagcctctacggtctcaacctcacatccctttcagtcaccaacaccaatctgtctactgtacccttccttgcctttaaacacctggtatacctgactcaccttaacctctcctacaatcccatcagcactattgaagcaggcatgttctctgacctgatccgccttcaggagcttcatatagtgggggcccagcttcgcaccattgagcctcactccttccaagggctccgcttcctacgcgtgctcaatgtgtctcagaacctgctggaaactttggaagagaatgtcttctcctcccctagggctctggaggtcttgagcattaacaacaaccctctggcctgtgactgccgccttctctggatcttgcagcgacagcccaccctgcagtttggtggccagcaacctatgtgtgctggcccagacaccatccgtgagaggtctttcaaggatttccatagcactgccctttctttttactttacctgcaaaaaacccaaaatccgtgaaaagaagttgcagcatctgctagtagatgaagggcagacagtccagctagaatgcagtgcagatggagacccgcagcctgtgatttcctgggtgacaccccgaaggcgtttcatcaccaccaagtccaatggaagagccaccgtgttgggtgatggcaccttggaaatccgctttgcccaggatcaagacagcgggatgtatgtttgcatcgctagcaatgctgctgggaatgataccttcacagcctccttaactgtgaaaggattcgcttcagatcgttttctttatgcgaacaggacccctatgtacatgaccgactccaatgacaccatttccaatggcaccaatgccaatactttttccctggaccttaaaacaatactggtgtctacagctatgggctgcttcacattcctgggagtggttttattttgttttcttctcctttttgtgtggagccgagggaaaggcaagcacaaaaacagcattgaccttgagtatgtgcccagaaaaaacaatggtgctgttgtggaaggggaggtagctggacccaggaggttcaacatgaaaatgatttgaaggcccacccctcacattactgtctctttgtcaatgtgggtaatcagtaagacagtatggcacagtaaattactagattaagaggcagccatgtgcagctgcccctgtatcaaaagcagggtctatggaagcaggaggacttccaatggagactctccatcgaaaggcaggcaggcaggcatgtgtcagagcccttcacacagtgggatactaagtgtttgcgttgcaaatattggcgttctggggatctcagtaatgaacctgaatatttggctcacactcacggaca

SEQ ID NO: 15838 - DNA, 3048 bp, Homo sapiens
  source 1..3048: mol_type = unassigned DNA
tgtaggaattgatgagtgccatcagaaagctgtatcatgagctgcctgcacttctaaagtgtccagtggatttttaatcacatgagcctggaaatagggttatgagaagaagctcagagcagagcaccgaaagtggccactaccagcatgaagagcccaacaattcaaactggtgaagtgagaaaaacagaatgcagctttcaaggttggttcgtttcaagcagttggcttgtgggactctgagagatgctgctgcccatgacatgcgggaattatcatgatcaactacccagcttggatttcacccagtggccaagagctttgtgtgggagacggcaagggttggatttttcaaaagagtaaaccaggataaatcatgaggaacctataacccttttggccacatgcaaaaaagcaagacccgtgaccaaggtgtagactaagaagtggagtcatgcttcacacggccatatcatgctggcagccattcctgggtctggctgtggtgttaatcttcatgggatccaccattggctgccccgctcgctgtgagtgctctgcccagaacaaatctgttagctgtcacagaaggcgattgatcgccatcccagagggcattcccatcgaaaccaaaatcttggacctcagtaaaaacaggctaaaaagcgtcaaccctgaagaattcatatcatatcctctgctggaagagatagacttgagtgacaacatcattgccaatgtggaaccaggagcattcaacaatctctttaacctgcgttccctccgcctaaaaggcaatcgtctaaagctggtccctttgggagtattcacggggctgtccaatctcactaagcttgacattagtgagaataagattgtcattttactagactacatgttccaagatctacataacctgaagtctctagaagtgggggacaatgatttggtttatatatcacacagggcattcagtgggcttcttagcttggagcagctcaccctggagaaatgcaacttaacagcagtaccaacagaagccctctcccacctccgcagcctcatcagcctgcatctgaagcatctcaatatcaacaatatgcctgtgtatgcctttaaaagattgttccacctgaaacacctagagattgactattggcctttactggatatgatgcctgccaatagcctctacggtctcaacctcacatccctttcagtcaccaacaccaatctgtctactgtacccttccttgcctttaaacacctggtatacctgactcaccttaacctctcctacaatcccatcagcactattgaagcaggcatgttctctgacctgatccgccttcaggagcttcatatagtgggggcccagcttcgcaccattgagcctcactccttccaagggctccgcttcctacgcgtgctcaatgtgtctcagaacctgctggaaactttggaagagaatgtcttctcctcccctagggctctggaggtcttgagcattaacaacaaccctctggcctgtgactgccgccttctctggatcttgcagcgacagcccaccctgcagtttggtggccagcaacctatgtgtgctggcccagacaccatccgtgagaggtctttcaaggatttccatagcactgccctttctttttactttacctgcaaaaaacccaaaatccgtgaaaagaagttgcagcatctgctagtagatgaagggcagacagtccagctagaatgcagtgcagatggagacccgcagcctgtgatttcctgggtgacaccccgaaggcgtttcatcaccaccaagtccaatggaagagccaccgtgttgggtgatggcaccttggaaatccgctttgcccaggatcaagacagcgggatgtatgtttgcatcgctagcaatgctgctgggaatgataccttcacagcctccttaactgtgaaaggattcgcttcagatcgttttctttatgcgaacaggacccctatgtacatgaccgactccaatgacaccatttccaatggcaccaatgccaatactttttccctggaccttaaaacaatactggtgtctacagctatgggctgcttcacattcctgggagtggttttattttgttttcttctcctttttgtgtggagccgagggaaaggcaagcacaaaaacagcattgaccttgagtatgtgcccagaaaaaacaatggtgctgttgtggaaggggaggtagctggacccaggaggttcaacatgaaaatgatttgaaggcccacccctcacattactgtctctttgtcaatgtgggtaatcagtaagacagtatggcacagtaaattactagattaagaggcagccatgtgcagctgcccctgtatcaaaagcagggtctatggaagcaggaggacttccaatggagactctccatcgaaaggcaggcaggcaggcatgtgtcagagcccttcacacagtgggatactaagtgtttgcgttgcaaatattggcgttctggggatctcagtaatgaacctgaatatttggctcacactcacggacaattattcagcattttctaccactgcaaaaaacaaaagaaaaaataaaaaagaacaacctacagtgtaggatttacatattaaaaagacacatttgtctaaaacatactctacagaaaaatttgtatctatgattatcatttgttaaagccttgcatcataccatattgttggttcagtaccacaaagagatcaatatattcttttcttccttttttgaaacatatatgctgtacatgttttaaagcaatatgaatgagaggttgtgcttttagttactcaccactatagatccaagtgtgatttcaccttccgttacctacagatgaccctgagactagatccctggagttatgggcggagatattttgagagatgtgtttgtctgatgtaggatgccaagaaacaggacccaaggcaaaactgctcaactctgttaacttctgttactataaataaaggcatgtgcctagttttgatacagaa

SEQ ID NO: 15839 - DNA, 2130 bp, Homo sapiens
  source 1..2130: mol_type = unassigned DNA
ggcggcggcggcggctgctcgtgtcggctccgggcggcccccgcgccgcagcccgcgccgtgtccgcggcggagccgcccaggtgcgcaggaggatggtggcgcggccctaggcccacgctccgcaccatgacctgctggctgtgcgtcctgagcctgcccctgctcctgctgcccgcggcgccgcccccggctggaggctgcccggcccgctgcgagtgcaccgtgcagacccgcgcggtggcctgcacgcgccgccgcctgaccgccgtgcccgacggcatcccggccgagacccgcctgctggagctcagccgcaaccgcatccgctgcctgaacccgggcgacctggccgcgctgcccgcgctggaggagctggacctgagcgagaacgccatcgcgcacgtggagcccggcgccttcgccaacctgccgcgcctgcgcgtcctgcgtctccgtggcaaccagctgaagctcatcccgcccggggtcttcacgcgcctggacaacctcacgctgctggacctgagcgagaacaagctggtaatcctgctggactacactttccaggacctgcacagcctgcgccggctggaagtgggcgacaacgacctggtattcgtctcgcgccgcgccttcgcggggctgctggccctggaggagctgaccctggagcgctgcaacctcacggctctgtccggggagtcgctgggccatctgcgcagcctgggcgccctgcggctgcgccacctggccatcgcctccctggaggaccagaacttccgcaggctgcccgggctgctgcacctggagattgacaactggccgctgctggaggaggtggcggcgggcagcctgcggggcctgaacctgacctcgctgtcggtcacccacaccaacatcaccgccgtgccggccgccgcgctgcggcaccaggcgcacctcacctgcctcaatctgtcgcacaaccccatcagcacggtgccgcgggggtcgttccgggacctggtccgcctgcgcgagctgcacctggccggggccctgctggctgtggtggagccgcaggccttcctgggcctgcgccagatccgcctgctcaacctctccaacaacctgctctccacgttggaggagagcaccttccactcggtgaacacgctagagacgctgcgcgtggacgggaacccgctggcctgcgactgtcgcctgctgtggatcgtgcagcgtcgcaagaccctcaacttcgacgggcggctgccggcctgcgccaccccggccgaggtgcgcggcgacgcgctgcgaaacctgccggactccgtgctgttcgagtacttcgtgtgccgcaaacccaagatccgggagcggcggctgcagcgcgtcacggccaccgcgggcgaagacgtccgcttcctctgccgcgccgagggcgagccggcgcccaccgtggcctgggtgaccccccagcaccggccggtgacggccaccagcgcgggccgggcgcgcgtgctccccggggggacgctggagatccaggacgcgcggccgcaggacagcggcacctacacgtgcgtggccagcaacgcgggcggcaacgacacctacttcgccacgctgaccgtgcgccccgagccggccgccaaccggaccccgggcgaggcccacaacgagacgctggcggccctgcgcgcgccgctcgacctcaccaccatcctggtgtccaccgccatgggctgcatcaccttcctgggcgtggtcctcttctgcttcgtgctgctgttcgtgtggagccgcggccgcgggcagcacaaaaacaacttctcggtggagtactccttccgcaaggtggatgggccggccgccgcggcgggccagggaggcgcgcgcaagttcaacatgaagatgatctgaggggtccccagggcggaccctcccctcccctcccccgcgggccggccgctcgcgtgtccacctatgcatttcccggaggggaaggggacggctgcacggcgctccccaggcagaacttcccctttttttgtagacgcccaaccgcaggactgtttttcatcagcatgcgtcttttttgcagtttctcaagcgttttctaaagatttcaacccgtcttcctgtc

SEQ ID NO: 15840 - DNA, 3146 bp, Homo sapiens
  source 1..3146: mol_type = unassigned DNA
agagacgcccttgtcgccatgtttgttgtgggcaggcgcctgaggctgacggctggcaagcagggcaccgcggtgcgctgaagctagagattccgaaagggggttcgggtagttcgctccggagaagtctgagaagggtggctccggtgatcccagccctagctgtttcccatattcctttatccacctgcctttgaaggagaccagactccggctccgcccggcccgtgccgggtggtctgcggccccgagtccgtgaccaagccctccgagtgatcggcctgccctcgggtgcacccgcgggtcccaacgtgggggatccctccatccgcaaagccagggtcctaaagatcgctctgggaaaagggaaggatgccgctcttcttccggaagcggaaacccagtgaggaggctcggaaacgcctggagtaccagatgtgtttggcaaaagaagctggggcagatgacattctcgacatctctaaatgtgagctctcagagattccatttggagcttttgcaacatgcaaagttctgcagaagaaggtgctgatcgtccacacgaatcacctcacttccctgcttcccaaatcctgcagcctcctgagtctggcaaccatcaaggttctagatctccacgataatcagctgacagcccttcctgacgatctggggcagctgactgccctccaggtcttaaacgtggaaaggaatcaactgatgcagctcccacgttccattgggaacctgacccagctccagactctcaatgttaaagacaacaagctgaaggagcttccagacaccgtgggggagcttcgaagcctgcgtaccctcaacatcagtggaaacgagatccagagattgccgcagatgctggctcacgttcgaaccctggagatgctgagccttgacgcctcggccatggtctacccgccgcgggaggtgtgtggtgccggcactgcggccatcttgcagttcctctgcaaagagtcagggctggaatactaccccccttctcagtacttgctgccaattctggagcaagatggaatcgagaactctcgggacagccctgatgggcccacggacagattctcaagggaggagttagagtggcagaacaggttctcagactatgagaagaggaaggaacagaagatgctggagaaactcgagtttgaacggcgcctggaactggggcagcgggagcacacccagctccttcagcagagcagcagccagaaggatgagatccttcagacggtcaaggaggagcagtcccggctggagcagggcctgagtgagcaccagcgccacctcaacgcagagcggcagcggctgcaggagcagctgaagcagacggaacagaacatttccagccggatccagaagctgctgcaggacaatcagagacaaaagaaaagctccgagattttgaaatcgctggaaaatgaaagaataagaatggaacagttgatgtccataacccaggaggagactgagagcctgcggcgacgtgacgttgcctccgccatgcagcagatgctgactgagagctgtaagaaccggctcatccagatggcctacgaatctcagaggcagaacttggtccagcaggcctgttccagcatggccgaaatggatgaacgattccagcagattctgtcgtggcagcaaatggatcagaacaaagccatcagccagatcctgcaggagagcgcgatgcagaaggctgcgttcgaggcactccaggtgaagaaagacctgatgcatcggcagatcaggagccagattaagttaatagaaactgagttattgcagctgacacagctggagttaaagaggaagtccctggacacagagtcactccaggagatgatctcggagcagcgctgggccctcagctccctgctccagcagctgctcaaagagaagcagcagcgagaggaagagctccgggaaatcctgacggagttagaagccaaaagtgaaaccaggcaggaaaattactggctgattcagtatcaacggcttttgaaccagaagcccttgtccttgaagctgcaagaagaggggatggagcgccagctggtggccctcctggaggagctgtcggctgagcactacctgcccatctttgcgcaccaccgcctctcactggacctgctgagccaaatgagcccaggggacctggccaaggtgggcgtctcagaagctggcctgcagcacgagatcctccggagagtccaggaactgctggatgcagccaggatccagccagagctgaaaccaccaatgggtgaggtcgtcacccctacggccccccaggagcctcctgagtctgtgaggccatccgctccccctgcagagctggaggtgcaggcctcagagtgtgtcgtgtgcctggaacgggaggcccagatgatcttcctcaactgtggccacgtctgctgctgccagcagtgctgccagccactgcgcacctgcccgctgtgccgccaggacatcgcccagcgcctccgcatctaccacagcagctgagtgctgcccgcccacctgggcctggtcctagccctgcctcggccactgtgagccccgggctcctgctcagccttgtgccagccagactcgtatgaggctcccccctgccctgggccccttccccactgcccaggagcccccatcctaagctccaagcatgtctgggccaggcagaggtgctcctcatccatgacaccaccagtctgaatggtcctgggggctggggctggagaggccgctgcaccaccacccgagcctgggagccagcgtcccagcctaatcacggatctgctgcctcccagctgtcttgactgaaggccaccgcccctgcaggagcttgggtcctcatctgggggccatgcacaggcccgtcccaccctgcatgtgggaagggagcaggagggcctggctgggtgaggggaggccttcctgggaaggcgtgtggtgcaggcctgtgctcacagtggcaccagcaaccctgggtctccctctctgctgctccccagaaccccggggccctcctgctctccacaactgtccctccttaccccatgtagctcgatccgaagcaggagtgtcaataaacctgtcttcagtgcgct

SEQ ID NO: 15841 - DNA, 3376 bp, Homo sapiens
  source 1..3376: mol_type = unassigned DNA
gtgggcaggcgcctgaggctgacggctggcaagcagggcaccgcggtgcgctgaagctagagattccgaaagggggttcgggtagttcgctccggagaagtctgagaagggtggctccggtgatcccagccctagctgtttcccatattcctttatcgtgagtgtcaccccggtccccgtcacccaatcccagagccccgcccctcccctgaggggtccgtagtcccattccgagaccccagtaccgcggcgacccctgctccctcgagcacttgttgtgtgcactttagttatcaaaacagtctatgtggaaatccagtcccgctcttcattcggagagtccgcgattcctagagcctcagacttcgtcatcccggtctgcgtgactttatgagattctgagtttctgttcccagcacctgcctttgaaggagaccagactccggctccgcccggcccgtgccgggtggtctgcggccccgagtccgtgaccaagccctccgagtgatcggcctgccctcgggtgcacccgcgggtcccaacgtgggggatccctccatccgcaaagccagggtcctaaagatcgctctgggaaaagggaaggatgccgctcttcttccggaagcggaaacccagtgaggaggctcggaaacgcctggagtaccagatgtgtttggcaaaagaagctggggcagatgacattctcgacatctctaaatgtgagctctcagagattccatttggagcttttgcaacatgcaaagttctgcagaagaaggtgctgatcgtccacacgaatcacctcacttccctgcttcccaaatcctgcagcctcctgagtctggcaaccatcaaggttctagatctccacgataatcagctgacagcccttcctgacgatctggggcagctgactgccctccaggtcttaaacgtggaaaggaatcaactgatgcagctcccacgttccattgggaacctgacccagctccagactctcaatgttaaagacaacaagctgaaggagcttccagacaccgtgggggagcttcgaagcctgcgtaccctcaacatcagtggaaacgagatccagagattgccgcagatgctggctcacgttcgaaccctggagatgctgagccttgacgcctcggccatggtctacccgccgcgggaggtgtgtggtgccggcactgcggccatcttgcagttcctctgcaaagagtcagggctggaatactaccccccttctcagtacttgctgccaattctggagcaagatggaatcgagaactctcgggacagccctgatgggcccacggacagattctcaagggaggagttagagtggcagaacaggttctcagactatgagaagaggaaggaacagaagatgctggagaaactcgagtttgaacggcgcctggaactggggcagcgggagcacacccagctccttcagcagagcagcagccagaaggatgagatccttcagacggtcaaggaggagcagtcccggctggagcagggcctgagtgagcaccagcgccacctcaacgcagagcggcagcggctgcaggagcagctgaagcagacggaacagaacatttccagccggatccagaagctgctgcaggacaatcagagacaaaagaaaagctccgagattttgaaatcgctggaaaatgaaagaataagaatggaacagttgatgtccataacccaggaggagactgagagcctgcggcgacgtgacgttgcctccgccatgcagcagatgctgactgagagctgtaagaaccggctcatccagatggcctacgaatctcagaggcagaacttggtccagcaggcctgttccagcatggccgaaatggatgaacgattccagcagattctgtcgtggcagcaaatggatcagaacaaagccatcagccagatcctgcaggagagcgcgatgcagaaggctgcgttcgaggcactccaggtgaagaaagacctgatgcatcggcagatcaggagccagattaagttaatagaaactgagttattgcagctgacacagctggagttaaagaggaagtccctggacacagagtcactccaggagatgatctcggagcagcgctgggccctcagctccctgctccagcagctgctcaaagagaagcagcagcgagaggaagagctccgggaaatcctgacggagttagaagccaaaagtgaaaccaggcaggaaaattactggctgattcagtatcaacggcttttgaaccagaagcccttgtccttgaagctgcaagaagaggggatggagcgccagctggtggccctcctggaggagctgtcggctgagcactacctgcccatctttgcgcaccaccgcctctcactggacctgctgagccaaatgagcccaggggacctggccaaggtgggcgtctcagaagctggcctgcagcacgagatcctccggagagtccaggaactgctggatgcagccaggatccagccagagctgaaaccaccaatgggtgaggtcgtcacccctacggccccccaggagcctcctgagtctgtgaggccatccgctccccctgcagagctggaggtgcaggcctcagagtgtgtcgtgtgcctggaacgggaggcccagatgatcttcctcaactgtggccacgtctgctgctgccagcagtgctgccagccactgcgcacctgcccgctgtgccgccaggacatcgcccagcgcctccgcatctaccacagcagctgagtgctgcccgcccacctgggcctggtcctagccctgcctcggccactgtgagccccgggctcctgctcagccttgtgccagccagactcgtatgaggctcccccctgccctgggccccttccccactgcccaggagcccccatcctaagctccaagcatgtctgggccaggcagaggtgctcctcatccatgacaccaccagtctgaatggtcctgggggctggggctggagaggccgctgcaccaccacccgagcctgggagccagcgtcccagcctaatcacggatctgctgcctcccagctgtcttgactgaaggccaccgcccctgcaggagcttgggtcctcatctgggggccatgcacaggcccgtcccaccctgcatgtgggaagggagcaggagggcctggctgggtgaggggaggccttcctgggaaggcgtgtggtgcaggcctgtgctcacagtggcaccagcaaccctgggtctccctctctgctgctccccagaaccccggggccctcctgctctccacaactgtccctccttaccccatgtagctcgatccgaagcaggagtgtcaataaacctgtcttcagtgcg

SEQ ID NO: 15842 - DNA, 2849 bp, Homo sapiens
  source 1..2849: mol_type = unassigned DNA
atcaggaagggggtgcaagagggttagtgattggggagcagaaggggtcctaaagatcgctctgggaaaagggaaggatgccgctcttcttccggaagcggaaacccagtgaggaggctcggaaacgcctggagtaccagatgtgtttggcaaaagaagctggggcagatgacattctcgacatctctaaatgtgagctctcagagattccatttggagcttttgcaacatgcaaagttctgcagaagaaggtgctgatcgtccacacgaatcacctcacttccctgcttcccaaatcctgcagcctcctgagtctggcaaccatcaaggttctagatctccacgataatcagctgacagcccttcctgacgatctggggcagctgactgccctccaggtcttaaacgtggaaaggaatcaactgatgcagctcccacgttccattgggaacctgacccagctccagactctcaatgttaaagacaacaagctgaaggagcttccagacaccgtgggggagcttcgaagcctgcgtaccctcaacatcagtggaaacgagatccagagattgccgcagatgctggctcacgttcgaaccctggagatgctgagccttgacgcctcggccatggtctacccgccgcgggaggtgtgtggtgccggcactgcggccatcttgcagttcctctgcaaagagtcagggctggaatactaccccccttctcagtacttgctgccaattctggagcaagatggaatcgagaactctcgggacagccctgatgggcccacggacagattctcaagggaggagttagagtggcagaacaggttctcagactatgagaagaggaaggaacagaagatgctggagaaactcgagtttgaacggcgcctggaactggggcagcgggagcacacccagctccttcagcagagcagcagccagaaggatgagatccttcagacggtcaaggaggagcagtcccggctggagcagggcctgagtgagcaccagcgccacctcaacgcagagcggcagcggctgcaggagcagctgaagcagacggaacagaacatttccagccggatccagaagctgctgcaggacaatcagagacaaaagaaaagctccgagattttgaaatcgctggaaaatgaaagaataagaatggaacagttgatgtccataacccaggaggagactgagagcctgcggcgacgtgacgttgcctccgccatgcagcagatgctgactgagagctgtaagaaccggctcatccagatggcctacgaatctcagaggcagaacttggtccagcaggcctgttccagcatggccgaaatggatgaacgattccagcagattctgtcgtggcagcaaatggatcagaacaaagccatcagccagatcctgcaggagagcgcgatgcagaaggctgcgttcgaggcactccaggtgaagaaagacctgatgcatcggcagatcaggagccagattaagttaatagaaactgagttattgcagctgacacagctggagttaaagaggaagtccctggacacagagtcactccaggagatgatctcggagcagcgctgggccctcagctccctgctccagcagctgctcaaagagaagcagcagcgagaggaagagctccgggaaatcctgacggagttagaagccaaaagtgaaaccaggcaggaaaattactggctgattcagtatcaacggcttttgaaccagaagcccttgtccttgaagctgcaagaagaggggatggagcgccagctggtggccctcctggaggagctgtcggctgagcactacctgcccatctttgcgcaccaccgcctctcactggacctgctgagccaaatgagcccaggggacctggccaaggtgggcgtctcagaagctggcctgcagcacgagatcctccggagagtccaggaactgctggatgcagccaggatccagccagagctgaaaccaccaatgggtgaggtcgtcacccctacggccccccaggagcctcctgagtctgtgaggccatccgctccccctgcagagctggaggtgcaggcctcagagtgtgtcgtgtgcctggaacgggaggcccagatgatcttcctcaactgtggccacgtctgctgctgccagcagtgctgccagccactgcgcacctgcccgctgtgccgccaggacatcgcccagcgcctccgcatctaccacagcagctgagtgctgcccgcccacctgggcctggtcctagccctgcctcggccactgtgagccccgggctcctgctcagccttgtgccagccagactcgtatgaggctcccccctgccctgggccccttccccactgcccaggagcccccatcctaagctccaagcatgtctgggccaggcagaggtgctcctcatccatgacaccaccagtctgaatggtcctgggggctggggctggagaggccgctgcaccaccacccgagcctgggagccagcgtcccagcctaatcacggatctgctgcctcccagctgtcttgactgaaggccaccgcccctgcaggagcttgggtcctcatctgggggccatgcacaggcccgtcccaccctgcatgtgggaagggagcaggagggcctggctgggtgaggggaggccttcctgggaaggcgtgtggtgcaggcctgtgctcacagtggcaccagcaaccctgggtctccctctctgctgctccccagaaccccggggccctcctgctctccacaactgtccctccttaccccatgtagctcgatccgaagcaggagtgtcaataaacctgtcttcagtgcg

SEQ ID NO: 15843 - DNA, 3044 bp, Homo sapiens
  source 1..3044: mol_type = unassigned DNA
tgtttgttgtgggcaggcgcctgaggctgacggctggcaagcagggcaccgcggtgcgctgaagctagagattccgaaagggggttcgggtagttcgctccggagaagtctgagaagggtggctccggtgatcccagccctagctgtttcccatattcctttatccacctgcctttgaaggagaccagactccggctccgcccggcccgtgccgggtggtctgcggccccgagtccgtgaccaagccctccgagtgatcggcctgccctcgggtgcacccgcgggtcccaacgtgggggatccctccatccgcaaagccagggtcctaaagatcgctctgggaaaagggaaggatgccgctcttcttccggaagcggaaacccagtgaggaggctcggaaacgcctggagtaccagatgtgtttggcaaaagaagctggggcagatgacattctcgacatctctaaatgtgagctctcagagattccatttggagcttttgcaacatgcaaagttctgcagaagaaggtgctgatcgtccacacgaatcacctcacttccctgcttcccaaatcctgcagcctcctgagtctggcaaccatcaaggttctagatctccacgataatcagctgacagcccttcctgacgatctggggcagctgactgccctccaggtcttaaacgtggaaaggaatcaactgatgcagctcccacgttccattgggaacctgacccagctccagactctcaatgttaaagacaacaagctgaaggagcttccagacaccgtgggggagcttcgaagcctgcgtaccctcaacatcagtggaaacgagatccagagattgccgcagatgctggctcacgttcgaaccctggagatgctgagccttgacgcctcggccatggtctacccgccgcgggaggtgtgtggtgccggcactgcggccatcttgcagttcctctgcaaagagtcagggctggaatactaccccccttctcagtacttgctgccaattctggagcaagatggaatcgagaactctcgggacagccctgatgggcccacggacagattctcaagggaggagttagagtggcagaacaggttctcagactatgagaagaggaaggaacagaagatgctggagaaactcgagtttgaacggcgcctggaactggggcagcgggagcacacccagctccttcagcagagcagcagccagaaggatgagatccttcagacggtcaaggaggagcagtcccggctggagcagggcctgagtgagcaccagcgccacctcaacgcagagcggcagcggctgcaggagcagctgaagcagacggaacagaacatttccagccggatccagaagctgctgcaggacaatcagagacaaaagaaaagctccgagattttgaaatcgctggaaaatgaaagaataagaatggaacagttgatgtccataacccaggaggagactgagagcctgcggcgacgtgacgttgcctccgccatgcagcagatgctgactgagagctgtaagaaccggctcatccagatggcctacgaatctcagaggcagaacttggtccagcaggcctgttccagcatggccgaaatggatgaacgattccagcagattctgtcgtggcagcaaatggatcagaacaaagccatcagccagatcctgcaggagagcgcgatgcagaaggctgcgttcgaggcactccaggtgaagaaagacctgatgcatcggcagatcaggagccaggagatgatctcggagcagcgctgggccctcagctccctgctccagcagctgctcaaagagaagcagcagcgagaggaagagctccgggaaatcctgacggagttagaagccaaaagtgaaaccaggcaggaaaattactggctgattcagtatcaacggcttttgaaccagaagcccttgtccttgaagctgcaagaagaggggatggagcgccagctggtggccctcctggaggagctgtcggctgagcactacctgcccatctttgcgcaccaccgcctctcactggacctgctgagccaaatgagcccaggggacctggccaaggtgggcgtctcagaagctggcctgcagcacgagatcctccggagagtccaggaactgctggatgcagccaggatccagccagagctgaaaccaccaatgggtgaggtcgtcacccctacggccccccaggagcctcctgagtctgtgaggccatccgctccccctgcagagctggaggtgcaggcctcagagtgtgtcgtgtgcctggaacgggaggcccagatgatcttcctcaactgtggccacgtctgctgctgccagcagtgctgccagccactgcgcacctgcccgctgtgccgccaggacatcgcccagcgcctccgcatctaccacagcagctgagtgctgcccgcccacctgggcctggtcctagccctgcctcggccactgtgagccccgggctcctgctcagccttgtgccagccagactcgtatgaggctcccccctgccctgggccccttccccactgcccaggagcccccatcctaagctccaagcatgtctgggccaggcagaggtgctcctcatccatgacaccaccagtctgaatggtcctgggggctggggctggagaggccgctgcaccaccacccgagcctgggagccagcgtcccagcctaatcacggatctgctgcctcccagctgtcttgactgaaggccaccgcccctgcaggagcttgggtcctcatctgggggccatgcacaggcccgtcccaccctgcatgtgggaagggagcaggagggcctggctgggtgaggggaggccttcctgggaaggcgtgtggtgcaggcctgtgctcacagtggcaccagcaaccctgggtctccctctctgctgctccccagaaccccggggccctcctgctctccacaactgtccctccttaccccatgtagctcgatccgaagcaggagtgtcaataaacctgtcttcagtgcg

SEQ ID NO: 15844 - DNA, 808 bp, Homo sapiens
  source 1..808: mol_type = unassigned DNA
ccttgaagcacttccgaccgcgaagcccggcgcgagaagcgagctaacccaagagccaacaacgagcgcggagagggcagcggactgagcggagccgccggccagagcgggctcggagcccgggtctccgccgctcgggacccggctaggcggcggcgggggcggcgatgttccactgcatccccctgtggcggtgcaaccgtcatgtggagagcatcgacaagcgccactgctcgctggtctacgtccccgaggagatctaccgctatgcccggagcctggaggagctgctgctggacgccaaccagctccgcgagctgcccgagcaatttttccagctagtcaaattacgaaagcttggacttagtgataatgaaattcagcggctccctccagaaatagcaaacttcatgcagctggtggaactagatgtgtctcgaaatgagattcctgaaattccagaaagcatttcattctgtaaagcactgcaggtagctgacttcagcggaaacccactgactaggttgccagaaagctttcctgaattacagaatttaacatgtctttctgtaaatgacatctcactacagtctctacctgaaaatattggcaagcagaagacaactagctgacacctgttcagccagcaagttggtgtttttctgaaatgtacactgatgttttatctttatgccattagacttgctaattaaaaattctgcccttaaactctcaggaggagaagaagacaggaagccctcaatacactctaggtgtatggtatcagttgcagagaaaacagtggtat

SEQ ID NO: 15845 - DNA, 3180 bp, Homo sapiens
  source 1..3180: mol_type = unassigned DNA
ggaagctccgcgcggcggcgggggcggcgacggcgactggcgggtgggagtggaggcaccggctggcgggcgggggtacagggacggggcaggggctcccgctccaggttccttgaagcacttccgaccgcgaagcccggcgcgagaagcgagctaacccaagagccaacaacgagcgcggagagggcagcggactgagcggagccgccggccagagcgggctcggagcccgggtctccgccgctcgggacccggctaggcggcggcgggggcggcgatgttccactgcatccccctgtggcggtgcaaccgtcatgtggagagcatcgacaagcgccactgctcgctggtctacgtccccgaggagatctaccgctatgcccggagcctggaggagctgctgctggacgccaaccagctccgcgagctgcccgagcaatttttccagctagtcaaattacgaaagcttggacttagtgataatgaaattcagcggctccctccagaaatagcaaacttcatgcagctggtggaactagatgtgtctcgaaatgagattcctgaaattccagaaagcatttcattctgtaaagcactgcaggtagctgacttcagcggaaacccactgactaggttgccagaaagctttcctgaattacagaatttaacatgtctttctgtaaatgacatctcactacagtctctacctgaaaatattggcaatctttataacctggcttcactggaactgagagagaatcttcttacatatcttcctgactctcttacccagctgcgaagactagaagaacttgatttaggaaacaatgaaatatataatttgccagaatcaattggagccctcttacatctaaaagatctctggttggatggaaatcaactgtcagaattacctcaggaaataggaaatctgaagaacctgctgtgtttagatgtctctgaaaacaggttggaaagacttcctgaagaaatcagtggcctgacttcattaacggatttagtcatttcccagaacttattagaaacgattccggatggcattggaaaactaaagaaactgtcaatcttgaaggtggatcagaatagactcacacagttgcctgaagcagttggggaatgtgaaagtctcactgagttagttcttacagaaaatcagctcctgaccctgcctaaaagcattggaaaactaaagaagttgagcaacttgaatgcagacagaaataaattagtgtccttaccaaaagagatcggcgggtgctgcagcctcactgtgttctgtgtacgtgacaacagactaactcggatacctgcagaggtgtcacaggcaacagaacttcatgtcctggatgtggcagggaacaggttgctgcatctacctttatccctgactgccttgaagttgaaggctctgtggctatctgacaaccagtcccagcccctgcttacattccagacagacacagactacaccacaggagagaagattttaacctgtgtcttacttcctcagctgccttctgaacctacttgtcaagagaatctgcctcgctgtggtgcactggagaacttggtaaatgatgtctctgatgaagcctggaacgagcgtgctgtcaacagagtcagtgcgatccgatttgtggaggatgagaaagatgaagaagacaatgagacgagaacacttctaaggcgagccactccacacccaggggagttaaagcacatgaaaaagacagtggagaatttacggaatgacatgaatgctgctaaaggactggactcaaacaaaaacgaggtcaatcatgccattgaccgagtgaccacttctgtgtagagtttcacctccaagttttacctcctgtgtcttcctctgctgtcgagacgttcctgtctgcttcccgggagcctcacgtgctccttgtcctaaccagcccccgcgcgccatcttcccgtggagtgtggggaagctgctgtctcccaggaagtgccttactcatcccgcaaccagtcagcgcaccagtggtctcccggtgtgattttttttttttttaatttcagttgtttgtaataagtagaatacactactgtaaacatacgacctttgtttttgtcttatgttggggtaaaggaaagcaggaaggggaatttttatcctcctcccttccgtaaagtgctgggatattttgaatcccccaagttcccttggacctactgatgagagatagttttatgtatggggaaaaatggatactttttaaaccttttttggcagctcagatggtgtaaattttaaaattttgtataggtatttcataacaaaaatatgtatttcttttttgttattttatcttgaaaacggtacatattttagtatttgtgcagaaaaacaagtcctaaagtatttgtttttatttgtaccatccacttgtgccttactgtatcctgtgtcatgtccaatcagttgtaaacaatggcatctttgaacagtgtgatgagaataggaatgtggtgttttaaagcagtgttgcattttaatcagtaatctacctggtggatttgtttttaaccaaaaagatgaattatcaatgatttgtaattatatcagttgattttttttgaaaagatgaaccaaaggatttgactgctaatattttattccttacactttttttctgaataagtctctcataatgagtgcagtgtcagactgtgcctactctgatggtatgtgccatttgtaaaataaaatagagcagaaaaacacaaaaagagaacactggttcagacattcagtgggcaagtaaattatggactgcaaaataatgatttttattcaagaaagctttaaaagttttatatccagatatacaaccacaataaagcaaaataacctactatcaaaatagaaatgttgctatctttataagtgcaatttaatttgtaaatagagtttgaatcaaagtatcacaaaatactgcttcaagatttaattttaaatctgctaatttaagggatattgggaaaagttttggtgtgtttctgttgatttcttttttgtatgctgtgataaaagagaaatgaaaagtgccagtcactgtgtggtgtctaggaaaatcatatatatttttttctccaagaaataaattcatcctggacattggc

SEQ ID NO: 15846 - DNA, 2592 bp, Homo sapiens
  source 1..2592: mol_type = unassigned DNA
gttaatattttatcattagggaaaaaaacagcaaagctattttcagcttgaaatgaaaaaaggttgataaaggggattggggcttaggtgattaaaggcaagcatgtgagtcagacatggcctcccagcccctgccggactgttgcgctgtcgccggacactcaagttgctatcaggagcacttttctctgtcaaagtgactggcttttgtcatgcaatccccaagttataatgggagggtaggataggccccagagcagtcagctgagccagccccgctcagtgagtctgtcctctggggctcgccatgcccccagcctccgcatggggaacaccatcagggccctcgtggccttcatccctgctgaccgttgccagaactatgtggtcagggacctccgtgagatgccgctggacaagatggtggatctgagtgggagccagttacgccgcttccccctgcacgtgtgctccttcagggagctggtcaagctctacctgagcgacaaccacctcaatagcctgcctccggagctggggcagctacagaacctgcagattctggccttggatttcaacaacttcaaggctctgccccaggtggtgtgcaccttgaaacagctctgcatcctctacctgggcaacaacaaactctgcgacctccccagtgagctgagcctgctccagaacctcaggaccctgtggatcgaggccaactgcctcacccagctgccggatgtggtctgtgagctgagtctccttaagactctgcatgccggctccaacgccctgcgtttgctgccaggccagctccggcgcctccaggagctgaggaccatctggctctcgggcaaccggctaactgactttcccactgtgctgcttcacatgcccttcctggaggtgattgatgtggactggaacagcatccgttacttccccagcctggcgcacctgtcaagtctgaagctggtcatctatgaccacaatccttgcaggaacgcacccaaggtggccaaaggtgtgcgccgtgtggggagatgggcagaggagacgccagagcccgaccctagaaaagccaggcgctatgcgttggtcagagaggaaagccaggagctacaggcaccagtccctctacttcctcctaccaactcctgaggagcttcagttgcaagtcaatgccaaggacccaactgcagcatgttctggaagcctctccattggagtggaaaggatggctctgggtcatttgggagtggctctgctagtagagactgatggagagagccaggtggaatgccataaatcacactgagaaaatatttctggcaaacagctcctcttccagaggggagttgtgtgccaatgatggcatgacaatccagagatcataacttctttgcaagaaaacagcttctccacacatgtattttgaaacactgaagagcaaaaggggctgggacactctgaactcctgcactctccagaagtgactggtcatgaagctcatgagctcctcaaataaggtatttgccatagaactaaatattctggtggtctgtctctttgcaggacatattttctttactgtaaatgaccataaacagtatcaatgtatcactgaggccaccgaaaaggacatttctacctaggcaatcagtcagattcacagaaaaaagttgtttgttgttgtaaaggctcaagatgaaactctttccccagcagtttagtgcctgctgaaaagatccctgatggacaatacttcttggtggactccagctgccccttttattattattagagacaaggtctcactctgttgctaggctggagtgcagtggcacaatcatggctcactgcagccccgaactactgggctcaagccttcctcccgcctcagcctgcccagtaactggtactacagatgtgcacacctggctaagtctttaattttttcgtagagatgaggtcttgctatgttgcccaagctagtttcaaactcctgggctcaagcgatgctcctgcttcagcctcccaaagtgctggggttacaggcatgagccaccacacccagccttcagctgtcaccttaaacttgacagtggctcatgctgatttagttcattttccctaaaaggtttgtcccaagatctgctcccaacagttgactgtcactgacaatgttggaagtcatctggaaaagagaacctctgtggtaatgtggtctcattaaagtcaagccttgttgtgattcctgtctacctccctgaagcaaagcccttctgtttattcacactaatgagccagagctgagctaaattgaatccctgtccttggaggaaaaccacatttccagaagcatgttagtttaaaggtagtaggtgagaaatgtgttctcttgaaacaagcactttgaaatttgaataggaagttgtagtgtatataggaagtctctgcctctttcgcctagtatctctgcctttgtttcaatttgttttgatttttacagactgttttgacaatgtataaaccaaggtattttgttttttggaagtatgtaaattgtgaccttcccacaaatatataaacttt

SEQ ID NO: 15847 - DNA, 5431 bp, Homo sapiens
  source 1..5431: mol_type = unassigned DNA
tgggcgggagctacgccggcccaagccccgccggggaccagcgagccgggaggaggagcaggcgccacagccgccccgcgccccgcgcccgcttgtaatccggtccgctccttattcagccgccgggaactgcgaggaggcgtcatgtagcagcagcagcaaatccgcctcgcatttgcaactcttttttttttttttggtggggcggggggcgcgcggcaaaattctgtctccgcccccccttttcttgcccacttccatttgcaagctgcatctgcctctctaaaaaaattgaggagttcggggaagggcagggggccataaatcagagttggacctgcaataacccccacacctacagggcaaccatgaccgaggagagctctgacgttcccagggagttgatagaaagcataaaggatgttattggcagaaagataaaaatttcagtgaagaagaaagtaaagttggaagttaagggagacaaagttgaaaacaaagtgctggtccttacatcatgccgagccttccttgtaacagcgcgaatccccaccaagctcgagttaaccttcagctacttggagattcatggcgtcgtttgcagcaagtcagctcagatgattgtggaaactgagaagtgcagcatttccatgaagatggcgtcacccgaggacgtgagtgaggtgctggctcacataggcacctgcctgaggaagatatttcctggcctctctccagtgagaatcatgaaaaaagtctccatggagccatctgagcgcctggctagtctccaggcgctgtgggacagccagaccgtggctgagcagggcccctgtggtggattttctcagatgtatgcctgtgtttgtgactggcttggattttcatacagggaagaagtacaatgggatgtggatacaatttatcttacccaagacaccagggaattgaatttacaagattttagtcatcttgaccacagggacctaatacctatcattgctgctctggaatataatcagtggttcacaaaactgtcctctaaggatctaaaactgtccactgatgtctgtgaacagatcttgagggtggtgagtaggtccaatcgactggaagaattggtgttggaaaatgctggacttagaacagattttgcacaaaaactggccagtgctctagcacataatcccaactcaggactccacacaattaaccttgctggcaacccactggaggatagaggtgtgtcctctttaagtattcaatttgccaaactcccaaagggattaaagcacttaaatttatctaaaacctcattatcacctaaaggggtgaacagcctttctcagtcactcagtgccaatccattgaccgcctctacccttgtccacctcgacctctcagggaacgtccttcgtggagatgacctctcacacatgtataattttttggcccagccaaatgccattgttcatctggatttatccaatacagaatgttccctggacatggtctgtggagctcttctccgtggatgccttcaatatttagctgtgctcaacctctccagaactgtcttctctcaccggaaaggaaaagaagtacctccatctttcaagcaattttttagtagttctctggctttgatgcacatcaacctttcaggcacaaaactgtctcctgagcccttaaaagcactgttattgggcctggcttgtaatcataacttgaaaggggtttctctggatctcagcaactgtgagctgagatcaggaggtgctcaagtattagaaggttgcattgctgaaatacacaacatcaccagcttagacatctctgacaatggtttagaatctgacctatctaccttaatagtgtggctcagtaaaaacagatcaatacaacacctggcgttaggcaaaaattttaataatatgaaatccaaaaatctgacacctgtattggacaacttagtacagatgattcaagatgaagaatcacctctgcagtccttgtccctggctgactcgaaactcaagactgaggtcaccatcatcatcaatgccctgggaagcaacacctccctgaccaaagtggacattagcggcaacggaatgggggacatgggagcgaagatgctggccaaagcactgcagatcaacactaagctcaggactgtaatatgggacaagaacaacatcactgcacaaggctttcaggatatagctgttgctatggaaaagaactacacattaagatttatgccaattcctatgtatgatgcttctcaagccctaaaaacaaaccctgaaaaaacagaagacgctctgcaaaagatagaaaactacctgctacgaaatcacgagactagaaaataccttcaagagcaggcctaccgcctgcagcagggtattgtcaccagcaccacccagcagatgattgacagaatatgtgtgaaagtacaagatcatctcaactccttacgaaattgtgggggagacgctatccaggaagatttaaaatcagcagagcggctcatgcgtgatgctaagaactctaaaacgttgttaccaaatttataccatgttggtggtgcatcttgggcgggagccagtggcttactatccagtccaattcaggagaccctggaatcaatggctggagaagttacaagagtagtagatgaacaactaaaggcgttgcttgagtccatggttgatgctgctgagaatctttgtcccaatgtgatgaaaaaagcccacattcgacaagacttgattcatgccagcaccgaaaagatttctattccacgtacctttgttaaaaatgtcctgttggagcagtctggaattgatatccttaacaaaattagtgaagtaaaattgacagtggcctcgttcctgtctgatagaattgtggatgaaatcctggatgcactctcacattgccatcataaactggctgaccatttcagcagacgtggcaagacccttcctcaacaagaatccttagagatcgagctggctgaggagaagccagttaaacgttccatcatcacagtggaggagctaacagagatagagcgtttggaagatctggatacctgtatgatgacccctaaatccaaaaggaagagtatccatagccgaatgctgcggcctgtttctagggcttttgaaatggagtttgatctagataaagcgctggaagaggtaccaattcacatcgaagacccgcccttcccatccctcagacaggagaagcggagctcgggatttatctctgagttgccctctgaagaggggaagaagctggaacactttaccaagttaaggccaaaaaggaataagaagcagcaacccacccaagcagcggtctgtgctgccaacatagtctcacaagatggtgaacagaatggtctcatggggagagtggatgaaggtgtagatgaattttttaccaagaaggtgaccaaaatggattccaagaaatggtcaacaagaggctcagagtcccatgagcttaatgaaggaggagatgaaaagaaaaagcgagattctcggaaaagtagtggctttctcaatttaatcaaatcccggtccaaatccgagcgaccaccaacgatcttgatgacagaagaaccctcctcaccaaaaggggcagtcagaagtccacctgtggactgtcccaggaaggacacaaaggccgccgagcacaatggcaattctgaacggatagaggagataaaaacacctgactcctttgaagagagtcaaggggaagaaatagggaaggtggaacggagtgacagcaagagcagcccacaggcagggcggaggtatggggtccaggtgatgggcagtggtctgctggcagagatgaaagccaagcaagagaagagagctgcgtgtgcgcagaagaagcttgggaatgatgccgtatcccaggattcttccagcccagctttgagcggcgtagaacggtcggatggaggtggggcagtgcctaaactgcacccaggtcttccagagaaccgctttggtttgggaacaccagaaaagaataccaaagcagaacccaaagcggaagcaggctccaggtctcggagctcatccagcacacctacgagcccgaagcccctcctgcagtcccccaaacccagtctggcagcacggcccgtcatcccgcagaaaccaagaaccgcctcacggcctgatgacattccagactctccatctagcccgaaagttgcccttcttccacctgtcctgaaaaaagttccttcagacaaagagagagatggccagagtagcccccagcccagccccaggacattttcacaggaagtttcaaggagaagctggggccagcaggcccaggagtatcaagaacaaaagcaacggtcctccagtaaagatggccatcaaggcagcaaatctaatgactccggggaagaagcagaaaaagagtttatttttgtgtaaaggtcacccacgcagaagtcttcctgtgcagggtgctttggtagccatcagagaggaaccaagggcaacatcttttcttcccaggcgttcttctctgggtgctttattctcttctttttctttatttcgcccccacccccatcccctgccttttttttttttttttttttttttttttgtatagaaacagatccatttcttggtaatcaaagcacatttgtttggtcttcctccaaccctttgcatttgatttctaaacattccttcatatgcctttaatgaaagccagcaattatcccatgggccctacttgaatttatctgaggcagctacagattgccctgcaagatgagtttttggagataaatgaaataactggacacacactcacacaagtaacaccacagcagacctcggagtactgctaagtgtacctgtgtcaaatccgcacaggactcaatatagcaatttattcttgatgtatgcaattgcacattgtaattatattaacagagcacactaataatttgtatagattatatatattagatcttgggtatggtttttaccttctcccatggggaacttcttccttcctgatgtggaattgtacatttaaagcttggtcggtgacctttgcataccatcaacgagcacagctaagaacagagtgagagaggcccatggctgattttaccatgtgcccagattaatgtatatagttgattggaatgaggttttatgaatattcatgtttttgaaggcctttaatttctgtctgcatattagcttttaatgtgtgattttaagagagaatactttgacacctgtaaaaatcaaaatactactctttataagacatttcacaaatattcacttacattacaggctggaagtattttattcatatgtatatttataccaataaaatgattttacaagtggaa

SEQ ID NO: 15848 - DNA, 1163 bp, Homo sapiens
  source 1..1163: mol_type = unassigned DNA
caaaattctgtctccgcccccccttttcttgcccacttccatttgcaagctgcatctgcctctctaaaaaaattgaggagttcggggaagggcagggggccataaatcagagttggacctgcaataacccccacacctacagggcaaccatgaccgaggagagctctgacgttcccagggagttgatagaaagcataaaggatgttattggcagaaagataaaaatttcagtgaagaagaaagtaaagttggaagttaagggagacaaagttgaaaacaaagtgctggtccttacatcatgccgagccttccttgtaacagcgcgaatccccaccaagctcgagttaaccttcagctacttggagattcatggcgtcgtttgcagcaagtcagctcagatgattgtggaaactgagaagtgcagcatttccatgaagatggcgtcacccgaggacgtgagtgaggtgctggctcacataggcacctgcctgaggaagatatttcctggcctctctccagtgagaatcatgaaaaaagtctccatggagccatctgagcgcctggctagtctccaggcgctgtgggacagccagaccgtggctgagcagggcccctgtggtggattttctcagatgtatgcctgtgtttgtgactggcttggattttcatacagggaagaagtacaatgggatgtggatacaatttatcttacccaagacaccagggaattgaatttacaagattttagtcatcttgaccacagggacctaatacctatcattgctgctctggaatataatcagtggttcacaaaactgtcctctaaggatctaaaactgtccactgatgtctgtgaacagatcttgagggtggtgagtaggtccaatcgactggaagaattggtgttggaaaatgctggacttagaacagattttgcacaaaaactggccagtgctctagcacataatcccaactcaggactccacacaattaaccttgctggcaacccactggaggatagagaaaccactaccaagatcaagagacagaatgttcccaccgttctccagacttaccttgtggtttgccccagtgattaccagccctgtcctctaccacttggaaaagataactactattctgacttctctcatgatggatga

SEQ ID NO: 15849 - DNA, 5296 bp, Homo sapiens
  source 1..5296: mol_type = unassigned DNA
tgggcgggagctacgccggcccaagccccgccggggaccagcgagccgggaggaggagcaggcgccacagccgccccgcgccccgcgcccgcttgtaatccggtccgctccttattcagccgccgggaactgcgaggaggcgtcatgtagcagcagcagcaaatccgcctcgcatttgcaactcttttttttttttttggtggggcggggggcgcgcggcaaaattctgtctccgcccccccttttcttgcccacttccatttgcaagctgcatctgcctctctaaaaaaattgaggagttcggggaagggcagggggccataaatcagagttggacctgcaataacccccacacctacagggcaaccatgaccgaggagagctctgacgttcccagggagttgatagaaagcataaaggatgttattggcagaaagataaaaatttcagtgaagaagaaagtaaagttggaagttaagggagacaaagttgaaaacaaagtgctggtccttacatcatgccgagccttccttgtaacagcgcgaatccccaccaagctcgagttaaccttcagctacttggagattcatggcgtcgtttgcagcaagtcagctcagatgattgtggaaactgagaagtgcagcatttccatgaagatggcgtcacccgaggacgtgagtgaggtgctggctcacataggcacctgcctgaggaagatatttcctggcctctctccagtgagaatcatgaaaaaagtctccatggagccatctgagcgcctggctagtctccaggcgctgtgggacagccagaccgtggctgagcagggcccctgtggtggattttctcagatgtatgcctgtgtttgtgactggcttggattttcatacagggaagaagtacaatgggatgtggatacaatttatcttacccaagacaccagggaattgaatttacaagattttagtcatcttgaccacagggacctaatacctatcattgctgctctggaatataatcagtggttcacaaaactgtcctctaaggatctaaaactgtccactgatgtctgtgaacagatcttgagggtggtgagtaggtccaatcgactggaagaattggtgttggaaaatgctggacttagaacagattttgcacaaaaactggccagtgctctagcacataatcccaactcaggactccacacaattaaccttgctggcaacccactggaggatagaggtgtgtcctctttaagtattcaatttgccaaactcccaaagggattaaagcacttaaatttatctaaaacctcattatcacctaaaggggtgaacagcctttctcagtcactcagtgccaatccattgaccgcctctacccttgtccacctcgacctctcagggaacgtccttcgtggagatgacctctcacacatgtataattttttggcccagccaaatgccattgttcatctggatttatccaatacagaatgttccctggacatggtctgtggagctcttctccgtggatgccttcaatatttagctgtgctcaacctctccagaactgtcttctctcaccggaaaggaaaagaagtacctccatctttcaagcaattttttagtagttctctggctttgatgcacatcaacctttcaggcacaaaactgtctcctgagcccttaaaagcactgttattgggcctggcttgtaatcataacttgaaaggggtttctctggatctcagcaactgtgagctgagatcaggaggtgctcaagtattagaaggttgcattgctgaaatacacaacatcaccagcttagacatctctgacaatggtttagaatctgacctatctaccttaatagtgtggctcagtaaaaacagatcaatacaacacctggcgttaggcaaaaattttaataatatgaaatccaaaaatctgacacctgtattggacaacttagtacagatgattcaagatgaagaatcacctctgcagtccttgtccctggctgactcgaaactcaagactgaggtcaccatcatcatcaatgccctgggaagcaacacctccctgaccaaagtggacattagcggcaacggaatgggggacatgggagcgaagatgctggccaaagcactgcagatcaacactaagctcaggactgtaatatgggacaagaacaacatcactgcacaaggctttcaggatatagctgttgctatggaaaagaactacacattaagatttatgccaattcctatgtatgatgcttctcaagccctaaaaacaaaccctgaaaaaacagaagacgctctgcaaaagatagaaaactacctgctacgaaatcacgagactagaaaataccttcaagagcaggcctaccgcctgcagcagggtattgtcaccagcaccacccagcagatgattgacagaatatgtgtgaaagtacaagatcatctcaactccttacgaaattgtgggggagacgctatccaggaagatttaaaatcagcagagcggctcatgcgtgatgctaagaactctaaaacgttgttaccaaatttataccatgttggtggtgcatcttgggcgggagccagtggcttactatccagtccaattcaggagaccctggaatcaatggctggagaagttacaagagtagtagatgaacaactaaaggcgttgcttgagtccatggttgatgctgctgagaatctttgtcccaatgtgatgaaaaaagcccacattcgacaagacttgattcatgccagcaccgaaaagatttctattccacgtacctttgttaaaaatgtcctgttggagcagtctggaattgatatccttaacaaaattagtgaagtaaaattgacagtggcctcgttcctgtctgatagaattgtggatgaaatcctggatgcactctcacattgccatcataaactggctgaccatttcagcagacgtggcaagacccttcctcaacaagaatccttagagatcgagctggctgaggagaagccagttaaacgttccatcatcacagtggaggagctaacagagatagagcgtttggaagatctggatacctgtatgatgacccctaaatccaaaaggaagagtatccatagccgaatgctgcggcctgtttctagggcttttgaaatggagtttgatctagataaagcgctggaagaggtaccaattcacatcgaagacccgcccttcccatccctcagacaggagaagcggagctcgggatttatctctgagttgccctctgaagaggggaagaagctggaacactttaccaagttaaggccaaaaaggaataagaagcagcaacccacccaagcagcggtctgtgctgccaacatagtctcacaagatggtgaacagaatggtctcatggggagagtggatgaaggtgtagatgaattttttaccaagaaggtgaccaaaatggattccaagaaatggtcaacaagaggctcagagtcccatgagcttaatgaaggaggagatgaaaagaaaaagcgagattctcggaaaagtagtggctttctcaatttaatcaaatcccggtccaaatccgagcgaccaccaacgatcttgatgacagaagaaccctcctcaccaaaaggggcagtcagaagtccacctgtggactgtcccaggaaggacacaaaggccgccgagcacaatggcaattctgaacggatagaggagataaaaacacctgactcctttgaagagagtcaaggggaagaaatagggaaggtggaacggagtgacagcaagagcagcccacaggcagggcggaggtatggggtccaggtgatgggcagtggtctgctggcagagatgaaagccaagcaagagaaccgctttggtttgggaacaccagaaaagaataccaaagcagaacccaaagcggaagcaggctccaggtctcggagctcatccagcacacctacgagcccgaagcccctcctgcagtcccccaaacccagtctggcagcacggcccgtcatcccgcagaaaccaagaaccgcctcacggcctgatgacattccagactctccatctagcccgaaagttgcccttcttccacctgtcctgaaaaaagttccttcagacaaagagagagatggccagagtagcccccagcccagccccaggacattttcacaggaagtttcaaggagaagctggggccagcaggcccaggagtatcaagaacaaaagcaacggtcctccagtaaagatggccatcaaggcagcaaatctaatgactccggggaagaagcagaaaaagagtttatttttgtgtaaaggtcacccacgcagaagtcttcctgtgcagggtgctttggtagccatcagagaggaaccaagggcaacatcttttcttcccaggcgttcttctctgggtgctttattctcttctttttctttatttcgcccccacccccatcccctgccttttttttttttttttttttttttttttgtatagaaacagatccatttcttggtaatcaaagcacatttgtttggtcttcctccaaccctttgcatttgatttctaaacattccttcatatgcctttaatgaaagccagcaattatcccatgggccctacttgaatttatctgaggcagctacagattgccctgcaagatgagtttttggagataaatgaaataactggacacacactcacacaagtaacaccacagcagacctcggagtactgctaagtgtacctgtgtcaaatccgcacaggactcaatatagcaatttattcttgatgtatgcaattgcacattgtaattatattaacagagcacactaataatttgtatagattatatatattagatcttgggtatggtttttaccttctcccatggggaacttcttccttcctgatgtggaattgtacatttaaagcttggtcggtgacctttgcataccatcaacgagcacagctaagaacagagtgagagaggcccatggctgattttaccatgtgcccagattaatgtatatagttgattggaatgaggttttatgaatattcatgtttttgaaggcctttaatttctgtctgcatattagcttttaatgtgtgattttaagagagaatactttgacacctgtaaaaatcaaaatactactctttataagacatttcacaaatattcacttacattacaggctggaagtattttattcatatgtatatttataccaataaaatgattttacaagtggaa

SEQ ID NO: 15850 - DNA, 1963 bp, Homo sapiens
  source 1..1963: mol_type = unassigned DNA
acttcaaagggcaaaagaaagaggagaacctccgcttaccacagccgggtagaaatgcctgaggaaagcagcggagctgaccgtgccagcatttacacagggaacacttcttgggcagccaggtgtcatggggcacagacccacagttcctgagaatgaacaggtaatttcatgctcccaaaatgggacataaagtggttgtcttcgacatttctgtcatcagagccttgtgggaaactcgtgtcaagaagcacaaagcttggcagaagaaggaggtggaaaggcttgagaagagcgccttggagaagataaaggaggagtggaactttgtggccgaatgcaggaggaagggcatcccccaggctgtatactgcaagaatggcttcatagacaccagcgtgcggcttctggacaagattgaaaggaacactctcacaaggcagagttcacttcccaaggacagaggcaaacggagcagtgcgtttgtgtttgaactttctggggagcactggacggagctcccagattcattgaaggagcagacacacctgagagaatggtacataagcaataccttgattcaaatcattcctacatatattcagttatttcaagcgatgagaattctggatctgccaaaaaaccaaatctcacatcttccagcagaaatcggttgtttgaagaacctgaaagaactcaatgtgggtttcaactatctgaagagcattcctccagaattgggagattgtgaaaatctagagagactggattgttctggaaatctagaattaatggagctgccctttgaattaagtaatttgaagcaagttacatttgtagatatctcagcaaacaagttttccagtgtcccaatctgtgtcctgcggatgtcgaatttgcagtggttggatatcagcagcaataacctgaccgacctgccgcaagatatagacaggctagaggagctgcagagctttctcttgtataaaaacaagttgacctaccttccctattccatgctgaacctgaagaagctcactctgttagtcgtcagtggggaccatttggtggagctcccaactgccctttgtgactcatccacacctttaaaatttgtaagccttatggacaatcctattgataatgcccaatgtgaagatggcaatgaaataatggaaagtgaacgggatcgccaacattttgataaagaagttatgaaagcctatattgaagaccttaaagaaagagaatctgttcccagctataccaccaaagtgtcttttagccttcaactttgatatccatcagaagactgcaaatctcactattctctggagctatatataaatctttgttatgatcatgtcatataggaagaatggcttgtgcttaaggacaaagtctagaaaccactatcatagttgctaaaaaaaatggttttcaaatgtcaaatacatgagtatctccctccatggactggagaattgaaaaattggtttgtatattgatatttccaggttcatttgcatatacttttttccaaataatgcacatttaatatgttttaaaatgtcttatttttaagaattataactaaaagaccaaatactgaagttaagtgcattgttttcaggaatcaaaagataaaggggccgggtgtggtggctcacacctgtaatcccagcactttgggaggccgaagtgggtggatcacctgaggtccggagttcgaggctggtttggccagcatggcgaaaccccatctctactaaaaatacaaaaaattagctgggcatggtggcagttgcctgtaatcctagctactcaggaggctgaggcaggagaatcgcttgaacctgggaggtggagttgcagtgagccgagatcatgcgactgcactccagcctgggtgacagagccagactctgtctcaaaaaaaaaaaaaaagaaaagaaaaagataa

SEQ ID NO: 15851 - DNA, 5100 bp, Homo sapiens
  source 1..5100: mol_type = unassigned DNA
cattccacaccctccgggatctccagtgtgaaaatgtctggccctgggtaggaggctgcagatagtccctgggccggggctcgcgctggccggctgcagcgcgcagggtgccaagccctcccctacgaagtctgttttgtctcaggctgggctgagtcacatagaatagatagatagttgatttagcacatgtcctccagatcatattatccgcctacaaatatagcctgttagcgcacaggcacgggaggcttcttccggctcggccgtgctgctcagcgggtgtaaacagcctctgcggtgtaaacagcctctgcggtgtaaacagccgcggcgggcaggccaggactgtcagtgcccgcccctcggggcaggtaatttcatgctcccaaaatgggacataaagtggttgtcttcgacatttctgtcatcagagccttgtgggaaactcgtgtcaagaagcacaaagcttggcagaagaaggaggtggaaaggcttgagaagagcgccttggagaagataaaggaggagtggaactttgtggccgaatgcaggaggaagggcatcccccaggctgtatactgcaagaatggcttcatagacaccagcgtgcggcttctggacaagattgaaaggaacactctcacaaggcagagttcacttcccaaggacagaggcaaacggagcagtgcgtttgtgtttgaactttctggggagcactggacggagctcccagattcattgaaggagcagacacacctgagagaatggtacataagcaataccttgattcaaatcattcctacatatattcagttatttcaagcgatgagaattctggatctgccaaaaaaccaaatctcacatcttccagcagaaatcggttgtttgaagaacctgaaagaactcaatgtgggtttcaactatctgaagagcattcctccagaattgggagattgtgaaaatctagagagactggattgttctggaaatctagaattaatggagctgccctttgaattaagtaatttgaagcaagttacatttgtagatatctcagcaaacaagttttccagtgtcccaatctgtgtcctgcggatgtcgaatttgcagtggttggatatcagcagcaataacctgaccgacctgccgcaagatatagacaggctagaggagctgcagagctttctcttgtataaaaacaagttgacctaccttccctattccatgctgaacctgaagaagctcactctgttagtcgtcagtggggaccatttggtggagctcccaactgccctttgtgactcatccacacctttaaaatttgtaagccttatggacaatcctattgataatgcccaatgtgaagatggcaatgaaataatggaaagtgaacgggatcgccaacattttgataaagaagttatgaaagcctatattgaagaccttaaagaaagagaatctgttcccagctataccaccaaagtgtcttttagccttcaactttgatatccatcagaagactgcaaatctcactattctctggagctatatataaatctttgttatgatcatgtcatataggaagaatggcttgtgcttaaggacaaagtctagaaaccactatcatagttgctaaaaaaaatggttttcaaatgtcaaatacatgagtatctccctccatggactggagaattgaaaaattggtttgtatattgatatttccaggttcatttgcatatacttttttccaaataatgcacatttaatatgttttaaaatgtcttatttttaagaattataactaaaagaccaaatactgaagttaagtgcattgttttcaggaatcaaaagataaaggggccgggtgtggtggctcacacctgtaatcccagcactttgggaggccgaagtgggtggatcacctgaggtccggagttcgaggctggtttggccagcatggcgaaaccccatctctactaaaaatacaaaaaattagctgggcatggtggcagttgcctgtaatcctagctactcaggaggctgaggcaggagaatcgcttgaacctgggaggtggagttgcagtgagccgagatcatgcgactgcactccagcctgggtgacagagccagactctgtctcaaaaaaaaaaaaaaagaaaagaaaaagataaagggattgtgaaaagagcatttatattggactaatcagatgagagtgttttgttattttgaaagagtttcttttactgagaataatcttccttgagtttatataaactgctatttccatatgttttaagttatattttggcaagtgtagactcccaggagagacttgtaggtacaatctaggccttgaagaaacaaaggctggaatatctgcccatgctttgggcatgagatgctcagatggtgcgtgggtagatctagttgaggaagtgtgggcctggctgttcatgggaagtcttcagtggccttcatggatggccatccagtcctgagtggtcaccctgggggtcctgggacacacctcagtaaagagcaaaggcaacgccctcagggtcccttcctccaagatggccatgtagggtaatggagatgaccagtccacactgataaggagttcctagcaaggcttccttgtgggtaccacaggacaactctgcccatagcaaagatgcttcagtccagagggagcccatgggctgtttgaatttgggagaggtgggattcattacaagactttgggctcttatgtcacatcacatgatttggagaaattagacacaatctcttatttttataccactgtcttgggctaaaataaacaggttgtggctgatggtgttgaagataaataagcttaaacaaataactttggccgggcacggtggctcacacctataatcccagcactatgggaggctgaggcaagcaggttgtttgagcccaggaatttgagaacaggattttgagaacagcttggacatcatgacgaaaccccatctccacaaaaaaattcaaaaaattagccaggtgtggtggcatgtgcctgtggtcccagctactcaggaggctgaggtgggaaaatcacttgagcccaggaggtcgaggctgcagtgtgctgtgattgtgacactgccctccagcctgggtgacagagtgagaccctgtctcaaaagcaaaacaaacagcaataacaatattattattgttataactaaaaaaaaaaaaacaaaaacaagcagcttttgtgactaagaaggaaaatatgcatatagtggcatatttttatatgaatcatctcctctgtggtcttgcccagtaccatccagtggagctttctgcagtgacggaaatgttctgtatttgcgttgtccaacgtggtaaaccagacacatgtgattcttgagcacttgaacaatgactgatgtgattgaagaacccatctttcaattcaattaaatttaaatagccacatttaactccagccttgggtttgacctgatggaaaattcccatgagagagtgctccaaaccgttccaaggtggggccagttgcgattctaaaggaagaagcactaaatggcagggtgatcagtccaaagcatttatgaggggagcttacatacagcatgggctgcagcgtccttgtgatgggcagtgagacaagggatgttctacctgggcatgtccccagcgagggggttgggggatggagttcacatgaagatgtaaggaatttgggtgggggctgggctggcttctacatgtttagcaacacggctgatctttcagtgtttccagcaacaacctaagcaccgttatcagtgcctaggaatgttcaaggcccaggctggggttcagacctgcagaggaaaacatcagctggctgggtcaaggcaccatgtgttacttggtcaggacagagacaaaaatgaggaaaactaggggaccccacacacatgtggctaccatactcctgaacaggtctagctagttatttgtttttttggaagttaatctggggtagaaatgtatggtgatttttattttctctgtctgaagaaccagccatttttaaaaaggttattattgacatcccaatattttgtcttggtgggcttactcataagtccaaacattttattctcaacaggtgtaaaacaggcagagcattctaaaaccacatggtagtgctttggtggaggactgcttccacttagaaacaaactctgagaagtaggctaagagaagacaagagggccgggcgcggtgactcacgcctataatcccagcactttgggaggccgagatgggtgaatcatgaggtcaggagttcgagaccagcctaaacaacatagtgaaaccctgtctctattaaaaatgcaaaaaattagccgggcgtggtgggcacccgtaatcccagctactcaggaggctgaggcaggagaattgcttgaacccaggaagcagaggttgcagtaagctgagatcccaccattgcactccagcctgggcaacagagtgagactccatctcaaaaaaaaaaaaaaaaaaaaaaaaagagagagagatgaaaagagtaggaaaatgagaaatcaccttcgttgaatcttaaatagttacatttttttctttttaacactaaaaatacaattcaaatttattagctctactacttgaatgattttggaattttatgtcatgctaaggtatgtgttacatatggccaagtggaaaatatatctgaagaggggctttcatacaaatagactgttcataatttatgtaaattttattttaataaaatcagttttttgtttaaaaaccttgtttcactgtcacatatgaaaaaaatactgcattgatatataattatttcatgttacataataacccaaaacaaataattacttgaatatgtttgtagagatactatttaatttattcatataaatgtgcagaaagattccaaaggagaatatatatcttgtgaaaatatggagatttgaaaatttgacatgatgcaaatagactgatacataatttggaaaggttatttacatggcagaatacatgtatgaatattaaagt

SEQ ID NO: 15852 - DNA, 2402 bp, Homo sapiens
  source 1..2402: mol_type = unassigned DNA
gccagaggaacgccagcgaccccagcagcgctgcggacggtgctggccgtggccgctgcggcccccgtgtccaggtgggccaggacgcagcctctgggcgccgtcgcttttccagcatcgcagaggcaaaagcgtggcagtgggacccaaaaggtaggactgaggctctagaacttgcacctgtgcagggactgcaaaccagacctgggaggaccctttcagcagcccccactccaccctatcccaggacttcccagcgacccgccgttctgggagataccgggagcgtgatcagggggcggggccgtttccaaggcaaccgcttatttgcatagggtcccgtcctggccaacgagggcgccccaaatgttcaggacatagaagaaggggttaactggcccggatctcctcctcgccttccaagcccgctaagcactggggttatctacccattccccagaaggggagactgaggcagcccaccagccaaaggaggcgaccagactggggctgcgttttaccatttcagaagcggcttgagctggtctgagctataataataaacactggcggtggaggcgagggcgaccacagggctgaggtcagggctaggattccggtgtctctacgtaggttgcttgaatggggggcaccctggcatggacgctgctgttgccgctgctgctgcgggagtcagacagcctagaaccgtcgtgcaccgtgtcctccgcggatgtggactggaacgcggagttcagtgccacgtgcctgaatttcagtggcctcagcctgagcctgcctcacaaccagtctctgcgggccagcaacgtgattctccttgacctgtctgggaacggcctgcgagagcttccagtgaccttctttgcccacctgcagaagcttgaggtcctgaacgtgctacgcaaccccttgtctcgtgtggatggggcgctggccgcccgctgtgaccttgacctgcaggccgactgcaactgtgccctggagtcctggcacgacatccgccgagacaactgctctggccagaagcctctgctctgctgggacacaaccagctcccagcacaacctctctgccttcctggaggtcagctgcgcccctggcctggcctctgcaactatcggggcagtggtggtcagcgggtgcctgcttcttggacttgccatcgctggccctgtgctggcctggagactctggcgatgccgagtggccagaagccgggagctgaacaaaccctgggctgctcaggatgggcccaagcccggtttaggcttgcagccacggtacggcagccggagcgcccccaagccccaagtggccgtgccatcctgcccctccactcccgactatgagaacatgtttgtgggccagccagcagccgagcaccagtgggatgaacaaggggctcacccttcagaggacaatgacttttacatcaactacaaggacatcgacctggcttcccagcctgtctactgtaacctgcagtcactgggccaggccccaatggatgaagaggagtacgtgatccccgggcactgagcctaagatgtcctaacctccacccagaaccccttcagtccctgctgggtgactcagggcgtcctaacgcctccatggcctcagtttccccatctgaagaatgggtacaggaaaggattgtccttgaggccccaggaagctctgccgccccctccctgtccctcatgccgctcctcagctccctcagctcctagagggggaagaggagagacccccaacaaggggacaggacggtcactgtgccaatcctgtcatcaccctcctgtggatgtacaggcagtgctcaataaatgcttcgaggctgatgaggctgctggctcagggtgcgtgggttcctcaaggtggggatttctgagttctaagaccaagtctccatctgagactcccaaattgctccccacctcccatccctgtttttttttgttgttgttgtttgtttgtttgtttttgaaactgagtgtcactctgtcacccaggctggagtgcaatgctgcggtctcagctcactgcaacctccgcctcctgggttcaagtgattctcctgcctcagcctcctgagtagctgggattacagcacccgccaccatgccgagctaatttttgtatttataatagagatggggtttcgccatgttggccaggctggtctcgaactcctgacctcaagcgatctgcccgcctcggcctcctgaagtgctgggattacaggcgtggccactgcgcccaggcacattcctcccttctgcccctctcagggccccttcccaggtccctgatctccaggcttggcctccagagcagcccacaccaaccccaaaataaaaaaatgtatatattccttt

SEQ ID NO: 15853 - DNA, 1209 bp, Homo sapiens
  source 1..1209: mol_type = unassigned DNA
aatatttgtgcaggcgccgcaggaacgggctccgcggacgacgggctccagggacgcacaggcagcgggcctcccaccgcgggtgccgggggcgggggggctgcccccatgcggggcccttcctggtcgcggcctcggccgctgctgctgctgttgctgctgctgtcgccttggcctgtctgggcccaggtgtcggccacggcctcgccctcggggtccctgggcgccccggactgccccgaggtgtgcacgtgcgtgccgggaggcctggccagctgctcggcactctcgctgcccgccgtgcccccgggcctgagcctgcgcctgcgcgcgctgctgctggaccacaaccgcgtccgtgcgctgccgccaggtgccttcgcgggagcgggcgcgctacagcgcctggacctgcgcgagaacgggctgcactcggtgcatgtgcgagccttctggggcctgggcgcgctgcagctgctggacctgagcgccaaccagctggaagcactggcaccagggactttcgcgccgctgcgcgcgctgcgcaacctctcattggccggcaaccggctggcgcgcctggagcccgcggcgctaggcgcgctcccgctgctgcgctcactcagcctgcaggacaacgagctggcggcactcgcgccggggctgctgggccgcctgcccgctctagacgcgctgcacctgcgcggcaacccttggggctgcgggtgcgcgctgcgcccgctctgcgcctggctgcgccggcacccgctgcccgcgtcagaggccgagacggtgctctgcgtgtggccgggacgcctgacgctcagccccctgactgccttttccgacgccgcctttagccattgcgcgcagccgctcgccctgcgggacctggccgtggtttacacgctcgggccggcctccttcctcgtcagcctggcttcctgcctggcgctgggctctgggctcaccgcctgccgtgcgcgccgccgccgcctccgcaccgccgccctccgcccgccgagaccgccagacccgaaccccgatcccgacccccacggctgtgcctcgcccgcggacccggggagccccgccgctgccgcccaagcctgagcggccgcggccgcctggagcgctcgaagcttcccccatgcctttgccctccctttacactgtctgccggcgtcaacaagcgacacagaccgaaaa

SEQ ID NO: 15854 - DNA, 4054 bp, Homo sapiens
  source 1..4054: mol_type = unassigned DNA
aagaaagaggggcagaggagggaaggcgactgcagtccgaaaggagcttttggaagctaggaccctaagcgtcaggacgtggcattggtcgagagaaagcctgggctggcaagagctgccgccggtgctgggagagcatttatttgggagaaaaagaggggagagagcagagggagggggaggaagagagttcaaaccgaagtggatggaaggggactggggtttctgccgcgcagggagccgtgagccagggcgatggcgctaagggcggcgcggagcagctgcgctcccgagaacgcgtctcctcgcagaggactagcagacatcgggaaggtctgcgccaacgggaaccaacttgtggctccaaaatgtacccaacgcagctggaaatgagatcaaagctgcagttgcatttgagaaggatgagaagagccagcgattagggaattttttttttacccgttttcttcctttttctttttttcttctttttctttttttctttcttttttcgtgtgtgttttttttaatttgcctaccaccctgtctgtcccctcacttcgccctccccatttgaaataaaagccccagtctcaacttccatcacctcggcgctcccggagccactaccggctgatggaggagaaggggacccgggggctggcaggggccaccggcgagggaccgcatcctgcgtctcccccgtgatcccggccccgaccgcggagttctgcaacacctggaggatctggaccgggtgctgggggtgggggcggggacagaggaaggaaaggcaccccgagccttaaaaagaaaaaaaaaaagtagcggggggaggaatgggtttcttcttgacagctgacggagccttgaaattttcctccactacctccgcccccgcccccgcccccgccccccgcactccatttaacgtgagattatgaaattgcagaggcggtggagggaaggagacaggatataaccggagtttggaggggagaggggaaggtggctggccgggtggctgaaatcaaaaattcaattgcgcactgggttgtgatgagaaatctaatcagatctttggcgaaggggccggccggaaggatggagagtgggggggaagttgctccccaaattcttcgaaggggaggctggggagaggaattgaccatgtaaaaggagacttttttttttggtggtggtggctgttgggtgccttgcaaaaatgaaggatgcaggacgcagctttctcctggaaccgaacgcaatggataaactgattgtgcaagagagaaggaagaacgaagctttttcttgtgagccctggatcttaacacaaatgtgtatatgtgcacacagggagcattcaagaatgaaataaaccagagttagacccgcgggggttggtgtgttctgacataaataaataatcttaaagcagctgttcccctccccccccccaaaaaaaaggatgattggaaatgaagaaccgaggattcacaaagaaaaaagtatgttcatttttctctataaaggagaaagtgagccaaggagatatttttggaatgaaaagtttggggcttttttagtaaagtaaagaactggtgtggtggtgttttcttttctttttgaatttcccacaagaggagaggaaattaataatacatctgcaaagaaatttcagagaagaaaagttgaccgcggcagattgaggcattgattgggggagagaaaccagcagagcacagttggatttgtgcctatgttgactaaaattgacggataattgcagttggatttttcttcatcaacctcctttttttttaatttttattccttttggtatcaagatcatgcgttttctcttgttcttaaccacctggatttccatctggatgttgctgtgatcagtctgaaatacaactgtttgaattccagaaggaccaacaccagataaattatgaatgttgaacaagatgaccttacatccacagcagataatgataggtcctaggtttaacagggccctatttgaccccctgcttgtggtgctgctggctcttcaacttcttgtggtggctggtctggtgcgggctcagacctgcccttctgtgtgctcctgcagcaaccagttcagcaaggtgatttgtgttcggaaaaacctgcgtgaggttccggatggcatctccaccaacacacggctgctgaacctccatgagaaccaaatccagatcatcaaagtgaacagcttcaagcacttgagacacttggaaatcctacagttgagtaggaaccatatcagaaccattgaaattggggctttcaatggtctggcgaacctcaacactctggaactctttgacaatcgtcttactaccatcccgaatggagcttttgtatacttgtctaaactgaaggagctctggttgcgaaacaaccccattgaaagcatcccttcttatgcttttaacagaattccttctttgcgccgactagacttaggggaattgaaaagactttcatacatctcagaaggtgcctttgaaggtctgtccaacttgaggtatttgaaccttgccatgtgcaaccttcgggaaatccctaacctcacaccgctcataaaactagatgagctggatctttctgggaatcatttatctgccatcaggcctggctctttccagggtttgatgcaccttcaaaaactgtggatgatacagtcccagattcaagtgattgaacggaatgcctttgacaaccttcagtcactagtggagatcaacctggcacacaataatctaacattactgcctcatgacctcttcactcccttgcatcatctagagcggatacatttacatcacaacccttggaactgtaactgtgacatactgtggctcagctggtggataaaagacatggccccctcgaacacagcttgttgtgcccggtgtaacactcctcccaatctaaaggggaggtacattggagagctcgaccagaattacttcacatgctatgctccggtgattgtggagccccctgcagacctcaatgtcactgaaggcatggcagctgagctgaaatgtcgggcctccacatccctgacatctgtatcttggattactccaaatggaacagtcatgacacatggggcgtacaaagtgcggatagctgtgctcagtgatggtacgttaaatttcacaaatgtaactgtgcaagatacaggcatgtacacatgtatggtgagtaattccgttgggaatactactgcttcagccaccctgaatgttactgcagcaaccactactcctttctcttacttttcaaccgtcacagtagagactatggaaccgtctcaggatgaggcacggaccacagataacaatgtgggtcccactccagtggtcgactgggagaccaccaatgtgaccacctctctcacaccacagagcacaaggtcgacagagaaaaccttcaccatcccagtgactgatataaacagtgggatcccaggaattgatgaggtcatgaagactaccaaaatcatcattgggtgttttgtggccatcacactcatggctgcagtgatgctggtcattttctacaagatgaggaagcagcaccatcggcaaaaccatcacgccccaacaaggactgttgaaattattaatgtggatgatgagattacgggagacacacccatggaaagccacctgcccatgcctgctatcgagcatgagcacctaaatcactataactcatacaaatctcccttcaaccacacaacaacagttaacacaataaattcaatacacagttcagtgcatgaaccgttattgatccgaatgaactctaaagacaatgtacaagagactcaaatctaaaacatttacagagttacaaaaaacaaacaatcaaaaaaaaagacagtttattaaaaatgacacaaatgactgggctaaatctactgtttcaaaaaagtgtctttacaaaaaaacaaaaaagaaaagaaatttatttattaaaaattctattgtgatctaaagcagac

SEQ ID NO: 15855 - DNA, 3085 bp, Homo sapiens
  source 1..3085: mol_type = unassigned DNA
ggagtttggaggggagaggggaaggtggctggccgggtggctgaaatcaaaaattcaattgcgcactgggttgtgatgagaaatctaatcagatctttggcgaaggggccggccggaaggatggagagtgggggggaagttgctccccaaattcttcgaaggggaggctggggagaggaattgaccatgtaaaaggagacttttttttttggtggtggtggctgttgggtgccttgcaaaaatgaaggatgcaggacgcagctttctcctggaaccgaacgcaatggataaactgattgtgcaagagagaaggaagaacgaagctttttcttgtgagccctggatcttaacacaaatgtgtatatgtgcacacagggagcattcaagaatgaaataaaccagagttagacccgcgggggttggtgtgttctgacataaataaataatcttaaagcagctgttcccctccccccccccaaaaaaaaggatgattggaaatgaagaaccgaggattcacaaagaaaaaagtatgttcatttttctctataaaggagaaagtgagccaaggagatatttttggaatgaaaagtttggggcttttttagtaaagtaaagaactggtgtggtggtgttttcttttctttttgaatttcccacaagaggagaggaaattaataatacatctgcaaagaaatttcagagaagaaaagttgaccgcggcagattgaggcattgattgggggagagaaaccagcagagcacagttggatttgtgcctatgttgactaaaattgacggataattgcagttggatttttcttcatcaacctcctttttttttaatttttattccttttggtatcaagatcatgcgttttctcttgttcttaaccacctggatttccatctggatgttgctgtgatcagtctgaaatacaattggcaaacgcactgcctacttacagcatagagacccccagtggagagctagactgtttgaattccagaaggaccaacaccagataaattatgaatgttgaacaagatgaccttacatccacagcagataatgataggtcctaggtttaacagggccctatttgaccccctgcttgtggtgctgctggctcttcaacttcttgtggtggctggtctggtgcgggctcagacctgcccttctgtgtgctcctgcagcaaccagttcagcaaggtgatttgtgttcggaaaaacctgcgtgaggttccggatggcatctccaccaacacacggctgctgaacctccatgagaaccaaatccagatcatcaaagtgaacagcttcaagcacttgagacacttggaaatcctacagttgagtaggaaccatatcagaaccattgaaattggggctttcaatggtctggcgaacctcaacactctggaactctttgacaatcgtcttactaccatcccgaatggagcttttgtatacttgtctaaactgaaggagctctggttgcgaaacaaccccattgaaagcatcccttcttatgcttttaacagaattccttctttgcgccgactagacttaggggaattgaaaagactttcatacatctcagaaggtgcctttgaaggtctgtccaacttgaggtatttgaaccttgccatgtgcaaccttcgggaaatccctaacctcacaccgctcataaaactagatgagctggatctttctgggaatcatttatctgccatcaggcctggctctttccagggtttgatgcaccttcaaaaactgtggatgatacagtcccagattcaagtgattgaacggaatgcctttgacaaccttcagtcactagtggagatcaacctggcacacaataatctaacattactgcctcatgacctcttcactcccttgcatcatctagagcggatacatttacatcacaacccttggaactgtaactgtgacatactgtggctcagctggtggataaaagacatggccccctcgaacacagcttgttgtgcccggtgtaacactcctcccaatctaaaggggaggtacattggagagctcgaccagaattacttcacatgctatgctccggtgattgtggagccccctgcagacctcaatgtcactgaaggcatggcagctgagctgaaatgtcgggcctccacatccctgacatctgtatcttggattactccaaatggaacagtcatgacacatggggcgtacaaagtgcggatagctgtgctcagtgatggtacgttaaatttcacaaatgtaactgtgcaagatacaggcatgtacacatgtatggtgagtaattccgttgggaatactactgcttcagccaccctgaatgttactgcagcaaccactactcctttctcttacttttcaaccgtcacagtagagactatggaaccgtctcaggatgaggcacggaccacagataacaatgtgggtcccactccagtggtcgactgggagaccaccaatgtgaccacctctctcacaccacagagcacaaggtcgacagagaaaaccttcaccatcccagtgactgatataaacagtgggatcccaggaattgatgaggtcatgaagactaccaaaatcatcattgggtgttttgtggccatcacactcatggctgcagtgatgctggtcattttctacaagatgaggaagcagcaccatcggcaaaaccatcacgccccaacaaggactgttgaaattattaatgtggatgatgagattacgggagacacacccatggaaagccacctgcccatgcctgctatcgagcatgagcacctaaatcactataactcatacaaatctcccttcaaccacacaacaacagttaacacaataaattcaatacacagttcagtgcatgaaccgttattgatccgaatgaactctaaagacaatgtacaagagactcaaatctaaaacatttacagagttacaaaaaacaaacaatcaaaaaaaaagacagtttattaaaaatgacacaaatgactgggctaaatctactgtttcaaaaaagtgtctttacaaaaaaacaaaaaagaaaagaaa

SEQ ID NO: 15856 - DNA, 2650 bp, Homo sapiens
  source 1..2650: mol_type = unassigned DNA
ctggaagatcagatacatggaacctttgaaaactgattatttttctccgatatgacttaaaaaaaaataaaaagaagaaaagaaaatagagtagtgcacggcaagctagaggattgtaaattttccttggtgaactttgaggatccataaagaagaaatggttctctttactgcgaggctgcaaggtcacccaatgagagaggggccaaataagctggaacatcatctaatacactgaatgtaggagttactggaaaagcaagaataacttatgcggattaacaatatggaaacatcctgagactactttggaatcgccataaattaagtgggttccagttttgcaaacagagaaacgggtccatgaacaatttgctacaggtataaagaagtatctgcagaaatccagagcacttattaaacttctttgagttttctcaggaagatcaatacctgttggagaaattttactaagagcaagaaactgagagtgagaaagaagggactggccagagttactcagctagacagtgacagacaacagtggaacttctgattggcaaacgcactgcctacttacagcatagagacccccagtggagagctagactgtttgaattccagaaggaccaacaccagataaattatgaatgttgaacaagatgaccttacatccacagcagataatgataggtcctaggtttaacagggccctatttgaccccctgcttgtggtgctgctggctcttcaacttcttgtggtggctggtctggtgcgggctcagacctgcccttctgtgtgctcctgcagcaaccagttcagcaaggtgatttgtgttcggaaaaacctgcgtgaggttccggatggcatctccaccaacacacggctgctgaacctccatgagaaccaaatccagatcatcaaagtgaacagcttcaagcacttgagacacttggaaatcctacagttgagtaggaaccatatcagaaccattgaaattggggctttcaatggtctggcgaacctcaacactctggaactctttgacaatcgtcttactaccatcccgaatggagcttttgtatacttgtctaaactgaaggagctctggttgcgaaacaaccccattgaaagcatcccttcttatgcttttaacagaattccttctttgcgccgactagacttaggggaattgaaaagactttcatacatctcagaaggtgcctttgaaggtctgtccaacttgaggtatttgaaccttgccatgtgcaaccttcgggaaatccctaacctcacaccgctcataaaactagatgagctggatctttctgggaatcatttatctgccatcaggcctggctctttccagggtttgatgcaccttcaaaaactgtggatgatacagtcccagattcaagtgattgaacggaatgcctttgacaaccttcagtcactagtggagatcaacctggcacacaataatctaacattactgcctcatgacctcttcactcccttgcatcatctagagcggatacatttacatcacaacccttggaactgtaactgtgacatactgtggctcagctggtggataaaagacatggccccctcgaacacagcttgttgtgcccggtgtaacactcctcccaatctaaaggggaggtacattggagagctcgaccagaattacttcacatgctatgctccggtgattgtggagccccctgcagacctcaatgtcactgaaggcatggcagctgagctgaaatgtcgggcctccacatccctgacatctgtatcttggattactccaaatggaacagtcatgacacatggggcgtacaaagtgcggatagctgtgctcagtgatggtacgttaaatttcacaaatgtaactgtgcaagatacaggcatgtacacatgtatggtgagtaattccgttgggaatactactgcttcagccaccctgaatgttactgcagcaaccactactcctttctcttacttttcaaccgtcacagtagagactatggaaccgtctcaggatgaggcacggaccacagataacaatgtgggtcccactccagtggtcgactgggagaccaccaatgtgaccacctctctcacaccacagagcacaaggtcgacagagaaaaccttcaccatcccagtgactgatataaacagtgggatcccaggaattgatgaggtcatgaagactaccaaaatcatcattgggtgttttgtggccatcacactcatggctgcagtgatgctggtcattttctacaagatgaggaagcagcaccatcggcaaaaccatcacgccccaacaaggactgttgaaattattaatgtggatgatgagattacgggagacacacccatggaaagccacctgcccatgcctgctatcgagcatgagcacctaaatcactataactcatacaaatctcccttcaaccacacaacaacagttaacacaataaattcaatacacagttcagtgcatgaaccgttattgatccgaatgaactctaaagacaatgtacaagagactcaaatctaaaacatttacagagttacaaaaaacaaacaatcaaaaaaaaagacagtttattaaaaatgacacaaatgactgggcta

SEQ ID NO: 15857 - DNA, 2669 bp, Homo sapiens
  source 1..2669: mol_type = unassigned DNA
ggtatttcgtacagtaggagatttcaacaacgtgacaatattctctaggcacttgggctcactgtctgtagcccccaccccccgcctttcgccacctccttgcttccctactcccccttctgcttttgcctttgatgagtttttggcttactttttggcggagtctcttggacacgtttttgctggtgctggaagatcagatacatggaacctttgaaaactgattatttttctccgatatgacttaaaaaaaaataaaaagaagaaaagaaaatagagtagtgcacggcaagctagaggattgtaaattttccttggtgaactttgaggatccataaagaaggagttactggaaaagcaagaataacttatgcggattaacaatatggaaacatcctgagactactttggaatcgccataaattaagtgggttccagttttgcaaacagagaaacgggtccatgaacaatttgctacaggtataaagaagtatctgcagaaatccagagcacttattaaacttctttgagttttctcaggaagatcaatacctgttggagaaattttactaagattggcaaacgcactgcctacttacagcatagagacccccagtggagagctagactgtttgaattccagaaggaccaacaccagataaattatgaatgttgaacaagatgaccttacatccacagcagataatgataggtcctaggtttaacagggccctatttgaccccctgcttgtggtgctgctggctcttcaacttcttgtggtggctggtctggtgcgggctcagacctgcccttctgtgtgctcctgcagcaaccagttcagcaaggtgatttgtgttcggaaaaacctgcgtgaggttccggatggcatctccaccaacacacggctgctgaacctccatgagaaccaaatccagatcatcaaagtgaacagcttcaagcacttgagacacttggaaatcctacagttgagtaggaaccatatcagaaccattgaaattggggctttcaatggtctggcgaacctcaacactctggaactctttgacaatcgtcttactaccatcccgaatggagcttttgtatacttgtctaaactgaaggagctctggttgcgaaacaaccccattgaaagcatcccttcttatgcttttaacagaattccttctttgcgccgactagacttaggggaattgaaaagactttcatacatctcagaaggtgcctttgaaggtctgtccaacttgaggtatttgaaccttgccatgtgcaaccttcgggaaatccctaacctcacaccgctcataaaactagatgagctggatctttctgggaatcatttatctgccatcaggcctggctctttccagggtttgatgcaccttcaaaaactgtggatgatacagtcccagattcaagtgattgaacggaatgcctttgacaaccttcagtcactagtggagatcaacctggcacacaataatctaacattactgcctcatgacctcttcactcccttgcatcatctagagcggatacatttacatcacaacccttggaactgtaactgtgacatactgtggctcagctggtggataaaagacatggccccctcgaacacagcttgttgtgcccggtgtaacactcctcccaatctaaaggggaggtacattggagagctcgaccagaattacttcacatgctatgctccggtgattgtggagccccctgcagacctcaatgtcactgaaggcatggcagctgagctgaaatgtcgggcctccacatccctgacatctgtatcttggattactccaaatggaacagtcatgacacatggggcgtacaaagtgcggatagctgtgctcagtgatggtacgttaaatttcacaaatgtaactgtgcaagatacaggcatgtacacatgtatggtgagtaattccgttgggaatactactgcttcagccaccctgaatgttactgcagcaaccactactcctttctcttacttttcaaccgtcacagtagagactatggaaccgtctcaggatgaggcacggaccacagataacaatgtgggtcccactccagtggtcgactgggagaccaccaatgtgaccacctctctcacaccacagagcacaaggtcgacagagaaaaccttcaccatcccagtgactgatataaacagtgggatcccaggaattgatgaggtcatgaagactaccaaaatcatcattgggtgttttgtggccatcacactcatggctgcagtgatgctggtcattttctacaagatgaggaagcagcaccatcggcaaaaccatcacgccccaacaaggactgttgaaattattaatgtggatgatgagattacgggagacacacccatggaaagccacctgcccatgcctgctatcgagcatgagcacctaaatcactataactcatacaaatctcccttcaaccacacaacaacagttaacacaataaattcaatacacagttcagtgcatgaaccgttattgatccgaatgaactctaaagacaatgtacaagagactcaaatctaaaacatttacagagttacaaaaaacaaacaatcaaaaaaaaagacagtttattaaaaatgacacaaatgactgggcta

SEQ ID NO: 15858 - DNA, 583 bp, Homo sapiens
  source 1..583: mol_type = unassigned DNA
acttctcaggcaaagagcatgccaacagcctttctcttctgctttgcttgtctgtggtggatactagcaacctatgtggttctaaagtatcaagctgagattatagtatcaatgagttggaacatcaatagtgccaagtgccatttaaaaatcttttcatcttcttgtgtgttgcttttggagaggaaatgttttcagatgtggtttctagccttgcagaaaaatggcattttcaggctgtatgggactcttacatcatctagtttcaatcacctcattttgcagagcaagaaactgagagtgagaaagaagggactggccagagttactcagctagacagtgacagacaacagtggaacttctgattggcaaacgcactgcctacttacagcatagagacccccagtggagagctagactgtttgaattccagaaggaccaacaccagataaattatgaatgttgaacaagatgaccttacatccacagcagataatgataggtcctaggtttaacagggccctatttgaccccctgcttgtggtgctgctggctcttcaacttcttgtggtggctggtctg

SEQ ID NO: 15859 - DNA, 5000 bp, Homo sapiens
  source 1..5000: mol_type = unassigned DNA
ttctgcgtttctctagtgcagtgcctggagatgaccaccaaacggaaaatcatcggccgtctggtgccatgccgatgtttccgaggtgaagaagaaatcatctcagttttagattactcccactgcagtcttcagcaggtgccaaaggaggtctttaacttcgaacgaacattagaggagctttatctagatgccaatcaaattgaagaactacccaagcaattgttcaactgtcaagctctacgaaaactaagtattcctgataacgacctttcaaatctgccaaccactattgctagtttagttaatcttaaagaactcgacatcagtaaaaatggtgtacaagaatttccagaaaacataaagtgctgtaagtgtttaacaattattgaagccagtgtcaatcccatttctaaactacctgatggcttcacacagctcctaaacctgacccagctctacctgaatgacgcctttcttgaatttcttccagccaattttggaagacttgtcaaattgcggatcttggagttaagagaaaatcacttgaaaactctaccaaagtcaatgcacaaactggcccagttggaaagacttgacctaggcaataatgaattcggtgagctgcctgaagttctggatcaaatacaaaatttgagggagttatggatggataataatgcattacaagtgttacctgggtctatagggaagttaaagatgttggtatacctggatatgtcaaaaaacagaatagaaacagttgacatggacatttctggatgtgaagcccttgaggacctcttattgtcatccaatatgttgcaacaattgcctgattctataggacttttgaaaaaactaacaactctaaaagtagatgacaatcaacttacaatgctacccaatacaattggaaatttatctttattagaagaatttgactgtagctgtaatgaactggagtcactaccttctactattggctaccttcatagtcttcggacattagcagttgatgagaatttccttccagaattacccagagaaattggaagttgtaagaatgtaacagtcatgtctctacgctccaacaaattagaatttcttcctgaagagattggacagatgcagaaactaagagtcctaaatttgagtgacaacagattgaagaatttaccattctcatttaccaaacttaaagagcttgcagctttgtggctttctgacaatcagtccaaagcccttatccctttacaaacagaagcccatccagaaacaaagcaaagagtattgactaactacatgtttccccagcagcctcgtggtgatgaagatttccagtcagacagtgacagctttaaccctacactgtgggaagagcagagacaacaacgcatgactgttgcctttgaatttgaagacaaaaaagaagatgacgaaaatgctgggaaagttaaggatctctcctgccaagccccctgggaaaggggccagcgtgggattactctccaacctgccagactgtctggcgattgctgcacaccatgggccaggtgtgatcagcagatccaagatatgcccgtcccccagaatgacccacagctggcatggggttgtataagtggcctccagcaggaaaggagcatgtgtactccattgccagttgcagcacaatccaccactcttccctctctaagtggcagacaggttgaaataaacctaaaacgatatccaactccttacccagaggatttaaagaatatggtaaaatctgttcaaaatttggtgggtaagccaagccatggagtgcgtgttgagaattcaaatccaactgctaacacggagcaaactgtgaaagaaaaatatgaacacaagtggccggtagccccaaaggagattacagtggaggattcttttgttcatccagctaatgaaatgaggattggggaacttcacccttcattagctgagacccctctgtacccacccaaacttgttctgctagggaaggacaaaaaagaatcaactgatgagtctgaagttgacaaaactcactgtctgaataacagtgtttcctcaggcacttactcagactactcgccttcccaggcttcctcaggatcctctaatacccgggttaaagtggggtccttgcagacaacagctaaagatgcagtacataattctttgtggggtaacaggattgcaccatctttcccacagcctcttgattcaaagccattactcagccagcgggaggctgttcccccaggcaatataccacagcgtcctgaccggctgcccatgagtgatactttcactgacaactggactgatggctcgcattatgacaacacagggtttgttgctgaggaaaccacagccgagaatgccaacagtaatcctctcttaagttcgaaatctagaagcacatcttcgcatggacgcaggcctttgatcaggcaagacaggattgttggtgttcccctggaactcgagcagtctacacacagacacacaccagaaacagaagtgcctccttccaatccttggcagaattggaccagaacccctagtccgtttgaagacaggaccgcttttccttccaaattagagacaacccccactaccagcccattgcctgaaaggaaagaacatataaaggaatctactgaaatacctagtcctttttctccaggcgtaccatgggagtatcatgattccaatcccaacaggagtcttagtaatgtcttttctcaaatccactgccgcccggaatcttctaaaggtgttatttcaattagcaaaagcacagagaggctttcccccctaatgaaagatatcaagtctaataaattcaaaaagtcacagagtatcgatgagattgacattggtacatataaggtgtataacataccattagaaaactatgcttctgggagtgatcacttaggaagccacgaacgaccggataagatgctgggaccagagcatggtatgtccagtatgtctcgaagccagtcagtcccaatgctggatgatgagatgctcacctacggaagtagtaaggggccacaacaacaaaaagcttctatgacaaaaaaagtctatcagtttgaccaaagcttcaatcctcaaggatcagtggaagtgaaagccgaaaagaggataccacccccttttcaacacaatcccgagtacgtgcaacaggccagcaaaaacatcgccaaggatttgattagtcctagagcttacagaggatacccaccgatggagcaaatgttttcattttctcagccatctgtgaatgaggatgctgtggtgaatgcccagttcgcaagccaaggggccagggcgggcttcctgagaagggccgactccctggtgagcgccacagaaatggccatgtttagaagggtcaatgagcctcatgagctgcccccaactgataggtacggcagacccccatataggggagggctggatcgccaaagcagcgttacagtgactgagtcccagttcctgaaaaggaatggcaggtatgaagatgaacacccttcatatcaagaagtgaaagctcaggcgggaagttttccggttaaaaaccttacccaaaggaggccattgtctgcgagaagctacagtacagagagttacggtgcctcccaaaccaggccagtttcagctaggcctactatggcagctcttttggaaaaaataccatctgactataacttgggtaactatggtgacaagccatcagataacagtgatttaaagacgaggcctactcctgtgaagggagaggagagctgtggtaaaatgcctgcagactggagacaacagctgcttagacatatagaagctagacggttagacaggaatgctgcttacaaacacaatacagttaaccttggcatgctgccctatggaggtatttcagcaatgcatgcaggcagaagcatgactttaaacttgcagactaagtctaaatttgatcatcaagaactacctcttcagaaaaccccgtcccagcaaagcaacattttagacaatggacaagaagatgtatctcctagtggccaatggaatccttatccacttgggaggcgggatgtacctccggacaccattactaagaaggcaggcagccacatccagacgttgatggggtcccaaagccttcagcatcgcagccgggagcagcagccgtatgaaggaaatataaacaaagtgaccatccagcaatttcagtcaccattgcctattcagatcccctcttcacaggccacccggggacctcagcctggacggtgcttaattcaaactaaagggcaaaggagtatggatggatatccagagcagttttgtgtgagaatagaaaagaatcctggccttggatttagtatcagtggtggaattagtggacaaggaaatccattcaaaccttctgacaagggtatctttgttactagggttcagcctgatgggccagcatcaaacctactgcagcctggtgataagatccttcaggcaaatggacacagttttgtacatatggaacatgaaaaagctgtattactactgaagagtttccagaacacagtagacctagttattcaacgtgagcttactgtctaaatattttttataaatagtgaagatacgtctagccagacctaatgttcaaaaataaatttatacatagaaacaaattttgccaattgctggaccaatggcaaacattagtgccaaatgtataatactatatgttagcactgaccatccttaaaaaatgttaactctataaatatgatgttcatgtggttatgtattagttttaattgtcagcctctggctgtgcattggtgcagttttgtttctgtttttgtttttgtttttaatcaaataagtttcttctcaaaatggatttcatataatttcggagcacggaagcacacacaagctctttatgaattctgctctccatcagaaac

SEQ ID NO: 15860 - DNA, 6500 bp, Homo sapiens
  source 1..6500: mol_type = unassigned DNA
gcttcccgcgggaacctctccagccgtccacctgaagggcactggcatcatggtctaacgtggcaccttcctggattcccctctatctcctgttcttcctaccttctactccttccctcctcttctcctccgaagaccctggcgcccactccactgcggacccctgaacacttaaggaataacccttggcagctgcacgactacgctctccgaaacctcatgggcagtttctcccgccggcgatgatggagaacctaataaggggaaggaatcccccgcaataccagagaagtccttgtaaagaggttcgtgcagcacttcggaagaggcctgaagaggagtgagcccgctacatgaaaaaaaatgcaagtcaaagtggtcacaacctagaagtctgcagagacaggaataactagcaatgcagtgcctggagatgaccaccaaacggaaaatcatcggccgtctggtgccatgccgatgtttccgaggtgaagaagaaatcatctcagttttagattactcccactgcagtcttcagcaggtgccaaaggaggtctttaacttcgaacgaacattagaggagctttatctagatgccaatcaaattgaagaactacccaagcaattgttcaactgtcaagctctacgaaaactaagtattcctgataacgacctttcaaatctgccaaccactattgctagtttagttaatcttaaagaactcgacatcagtaaaaatggtgtacaagaatttccagaaaacataaagtgctgtaagtgtttaacaattattgaagccagtgtcaatcccatttctaaactacctgatggcttcacacagctcctaaacctgacccagctctacctgaatgacgcctttcttgaatttcttccagccaattttggaagacttgtcaaattgcggatcttggagttaagagaaaatcacttgaaaactctaccaaagtcaatgcacaaactggcccagttggaaagacttgacctaggcaataatgaattcggtgagctgcctgaagttctggatcaaatacaaaatttgagggagttatggatggataataatgcattacaagtgttacctgggtctatagggaagttaaagatgttggtatacctggatatgtcaaaaaacagaatagaaacagttgacatggacatttctggatgtgaagcccttgaggacctcttattgtcatccaatatgttgcaacaattgcctgattctataggacttttgaaaaaactaacaactctaaaagtagatgacaatcaacttacaatgctacccaatacaattggaaatttatctttattagaagaatttgactgtagctgtaatgaactggagtcactaccttctactattggctaccttcatagtcttcggacattagcagttgatgagaatttccttccagaattacccagagaaattggaagttgtaagaatgtaacagtcatgtctctacgctccaacaaattagaatttcttcctgaagagattggacagatgcagaaactaagagtcctaaatttgagtgacaacagattgaagaatttaccattctcatttaccaaacttaaagagcttgcagctttgtggctttctgacaatcagtccaaagcccttatccctttacaaacagaagcccatccagaaacaaagcaaagagtattgactaactacatgtttccccagcagcctcgtggtgatgaagatttccagtcagacagtgacagctttaaccctacactgtgggaagagcagagacaacaacgcatgactgttgcctttgaatttgaagacaaaaaagaagatgacgaaaatgctgggaaagttaaggatctctcctgccaagccccctgggaaaggggccagcgtgggattactctccaacctgccagactgtctggcgattgctgcacaccatgggccaggtgtgatcagcagatccaagatatgcccgtcccccagaatgacccacagctggcatggggttgtataagtggcctccagcaggaaaggagcatgtgtactccattgccagttgcagcacaatccaccactcttccctctctaagtggcagacaggttgaaataaacctaaaacgatatccaactccttacccagaggatttaaagaatatggtaaaatctgttcaaaatttggtgggtaagccaagccatggagtgcgtgttgagaattcaaatccaactgctaacacggagcaaactgtgaaagaaaaatatgaacacaagtggccggtagccccaaaggagattacagtggaggattcttttgttcatccagctaatgaaatgaggattggggaacttcacccttcattagctgagacccctctgtacccacccaaacttgttctgctagggaaggacaaaaaagaatcaactgatgagtctgaagttgacaaaactcactgtctgaataacagtgtttcctcaggcacttactcagactactcgccttcccaggcttcctcaggatcctctaatacccgggttaaagtggggtccttgcagacaacagctaaagatgcagtacataattctttgtggggtaacaggattgcaccatctttcccacagcctcttgattcaaagccattactcagccagcgggaggctgttcccccaggcaatataccacagcgtcctgaccggctgcccatgagtgatactttcactgacaactggactgatggctcgcattatgacaacacagggtttgttgctgaggaaaccacagccgagaatgccaacagtaatcctctcttaagttcgaaatctagaagcacatcttcgcatggacgcaggcctttgatcaggcaagacaggattgttggtgttcccctggaactcgagcagtctacacacagacacacaccagaaacagaagtgcctccttccaatccttggcagaattggaccagaacccctagtccgtttgaagacaggaccgcttttccttccaaattagagacaacccccactaccagcccattgcctgaaaggaaagaacatataaaggaatctactgaaatacctagtcctttttctccaggcgtaccatgggagtatcatgattccaatcccaacaggagtcttagtaatgtcttttctcaaatccactgccgcccggaatcttctaaaggtgttatttcaattagcaaaagcacagagaggctttcccccctaatgaaagatatcaagtctaataaattcaaaaagtcacagagtatcgatgagattgacattggtacatataaggtgtataacataccattagaaaactatgcttctgggagtgatcacttaggaagccacgaacgaccggataagatgctgggaccagagcatggtatgtccagtatgtctcgaagccagtcagtcccaatgctggatgatgagatgctcacctacggaagtagtaaggggccacaacaacaaaaagcttctatgacaaaaaaagtctatcagtttgaccaaagcttcaatcctcaaggatcagtggaagtgaaagccgaaaagaggataccacccccttttcaacacaatcccgagtacgtgcaacaggccagcaaaaacatcgccaaggatttgattagtcctagagcttacagaggatacccaccgatggagcaaatgttttcattttctcagccatctgtgaatgaggatgctgtggtgaatgcccagttcgcaagccaaggggccagggcgggcttcctgagaagggccgactccctggtgagcgccacagaaatggccatgtttagaagggtcaatgagcctcatgagctgcccccaactgataggtacggcagacccccatataggggagggctggatcgccaaagcagcgttacagtgactgagtcccagttcctgaaaaggaatggcaggtatgaagatgaacacccttcatatcaagaagtgaaagctcaggcgggaagttttccggttaaaaaccttacccaaaggaggccattgtctgcgagaagctacagtacagagagttacggtgcctcccaaaccaggccagtttcagctaggcctactatggcagctcttttggaaaaaataccatctgactataacttgggtaactatggtgacaagccatcagataacagtgatttaaagacgaggcctactcctgtgaagggagaggagagctgtggtaaaatgcctgcagactggagacaacagctgcttagacatatagaagctagacggttagacaggaccccgtcccagcaaagcaacattttagacaatggacaagaagatgtatctcctagtggccaatggaatccttatccacttgggaggcgggatgtacctccggacaccattactaagaaggcaggcagccacatccagacgttgatggggtcccaaagccttcagcatcgcagccgggagcagcagccgtatgaaggaaatataaacaaagtgaccatccagcaatttcagtcaccattgcctattcagatcccctcttcacaggccacccggggacctcagcctggacggtgcttaattcaaactaaagggcaaaggagtatggatggatatccagagcagttttgtgtgagaatagaaaagaatcctggccttggatttagtatcagtggtggaattagtggacaaggaaatccattcaaaccttctgacaagggtatctttgttactagggttcagcctgatgggccagcatcaaacctactgcagcctggtgataagatccttcaggcaaatggacacagttttgtacatatggaacatgaaaaagctgtattactactgaagagtttccagaacacagtagacctagttattcaacgtgagcttactgtctaaatattttttataaatagtgaagatacgtctagccagacctaatgttcaaaaataaatttatacatagaaacaaattttgccaattgctggaccaatggcaaacattagtgccaaatgtataatactatatgttagcactgaccatccttaaaaaatgttaactctataaatatgatgttcatgtggttatgtattagttttaattgtcagcctctggctgtgcattggtgcagttttgtttctgtttttgtttttgtttttaatcaaataagtttcttctcaaaatggatttcatataatttcggagcacggaagcacacacaagctctttatgaattctgctctccatcagaaacactgcctcaaagttgtatatgcctttatatagaaaatacaaatataaagaattgtaattcccataaaatatttctagcacaaggtatatgttggcatatatacaaaaagaatatagagaaaaacaatattttcataaactaaacatctcagatagagaaaaaatatatcttaaaataagactttactatattgaatctttttcaataaaaattacatgataatgccttatgaaagtaactgtacatatggtataaagtgtttatatttggttccatattcatttgctaaattctcatgacacagagtgaaatatttcataaattagccatttatctctgggacccaaataaaaataggatgaactaatttgttcaatgcctttagctaattacaatacatgcagagtttagaaacagactaaaggtcattgtagttaagtctttttcaccacaaatttaagcagtggatgatgggtggcaggaaaggtattgctttatttctttcaagttcatgttgattataaactgtagcccctgtgatttctttacttgtaaatgtggaatttatttgtgtgttgcttaatctaatttgctgctttttaaattatttaaaacgaattttggaaattgataaaatttatcattacgaaagactgctgttagaaagttatggtaggtgattttaaatccttggtatttaaatatgaaacttcaaatataatttctcagagctgtggtctacctgtatcattaatttcaatggctgtttttctgggcagaaatagataaaatactttttttccaaaaacagtttcaaggtatgtaaaatcctgaatgctttttcactgaagagaaagacaagcatggttaatgtagaattatttacttttccattgaaactattttcctgcataaatgatcaaaatttattttataatcctttaaaatacttatctttcatattagtcattaatttaattacaatattaatttgaatttccaggataatttcccggagttggttgcatgcattatctttcataattttacatagttcttttgttatataatgaatttactttacatgctagtgtttcaagtattgtatgaggattttcacaatagtatcactgaatgatgtcaccagagctctgagaataatatttgtaagttaactgttttatggggacattgaaaatattgtatttttgtagggtctattaaaatgagtgtcactt

SEQ ID NO: 15861 - DNA, 567 bp, Homo sapiens
  source 1..567: mol_type = unassigned DNA
ttctgcgtttctctagtgcagtgcctggagatgaccaccaaacggaaaatcatcggccgtctggtgccatgccgatgtttccgaggtgaagaagaaatcatctcagttttagattactcccactgcagtcttcagcaggtgccaaaggaggtctttaacttcgaacgaacattagaggagctttatctagatgccaatcaaattgaagaactacccaagcaattgttcaactgtcaagctctacgaaaactaagtattcctgataacgacctttcaaatctgccaaccactattgctagtttagttaatcttaaagaactcgacatcagtaaaaatggtgtacaagaatttccagaaaacataaagtgctgtaagtgtttaacaattattgaagccagtgtcaatcccatttctaaactacctgatggcttcacacagctcctaaacctgacccagctctacctgaatgacgcctttcttgaatttcttccagccaattttggaagacttgtcaaattgcggatcttggagttaagagaaaatcacttgaaaactctaccaaaaatt

SEQ ID NO: 15862 - DNA, 5536 bp, Homo sapiens
  source 1..5536: mol_type = unassigned DNA
aggtcaatgcacaaactggcccagttggaaagacttgacctaggcaataatgaattcggtgagctgcctgaagttctggatcaaatacaaaatttgagggagttatggatggataataatgcattacaagtgttacctgggtctatagggaagttaaagatgttggtatacctggatatgtcaaaaaacagaatagaaacagttgacatggacatttctggatgtgaagcccttgaggacctcttattgtcatccaatatgttgcaacaattgcctgattctataggacttttgaaaaaactaacaactctaaaagtagatgacaatcaacttacaatgctacccaatacaattggaaatttatctttattagaagaatttgactgtagctgtaatgaactggagtcactaccttctactattggctaccttcatagtcttcggacattagcagttgatgagaatttccttccagaattacccagagaaattggaagttgtaagaatgtaacagtcatgtctctacgctccaacaaattagaatttcttcctgaagagattggacagatgcagaaactaagagtcctaaatttgagtgacaacagattgaagaatttaccattctcatttaccaaacttaaagagcttgcagctttgtggctttctgacaatcagtccaaagcccttatccctttacaaacagaagcccatccagaaacaaagcaaagagtattgactaactacatgtttccccagcagcctcgtggtgatgaagatttccagtcagacagtgacagctttaaccctacactgtgggaagagcagagacaacaacgcatgactgttgcctttgaatttgaagacaaaaaagaagatgacgaaaatgctgggaaagttaaggatctctcctgccaagccccctgggaaaggggccagcgtgggattactctccaacctgccagactgtctggcgattgctgcacaccatgggccaggtgtgatcagcagatccaagatatgcccgtcccccagaatgacccacagctggcatggggttgtataagtggcctccagcaggaaaggagcatgtgtactccattgccagttgcagcacaatccaccactcttccctctctaagtggcagacaggttgaaataaacctaaaacgatatccaactccttacccagaggatttaaagaatatggtaaaatctgttcaaaatttggtgggtaagccaagccatggagtgcgtgttgagaattcaaatccaactgctaacacggagcaaactgtgaaagaaaaatatgaacacaagtggccggtagccccaaaggagattacagtggaggattcttttgttcatccagctaatgaaatgaggattggggaacttcacccttcattagctgagacccctctgtacccacccaaacttgttctgctagggaaggacaaaaaagaatcaactgatgagtctgaagttgacaaaactcactgtctgaataacagtgtttcctcaggcacttactcagactactcgccttcccaggcttcctcaggatcctctaatacccgggttaaagtggggtccttgcagacaacagctaaagatgcagtacataattctttgtggggtaacaggattgcaccatctttcccacagcctcttgattcaaagccattactcagccagcgggaggctgttcccccaggcaatataccacagcgtcctgaccggctgcccatgagtgatactttcactgacaactggactgatggctcgcattatgacaacacagggtttgttgctgaggaaaccacagccgagaatgccaacagtaatcctctcttaagttcgaaatctagaagcacatcttcgcatggacgcaggcctttgatcaggcaagacaggattgttggtgttcccctggaactcgagcagtctacacacagacacacaccagaaacagaagtgcctccttccaatccttggcagaattggaccagaacccctagtccgtttgaagacaggaccgcttttccttccaaattagagacaacccccactaccagcccattgcctgaaaggaaagaacatataaaggaatctactgaaatacctagtcctttttctccaggcgtaccatgggagtatcatgattccaatcccaacaggagtcttagtaatgtcttttctcaaatccactgccgcccggaatcttctaaaggtgttatttcaattagcaaaagcacagagaggctttcccccctaatgaaagatatcaagtctaataaattcaaaaagtcacagagtatcgatgagattgacattggtacatataaggtgtataacataccattagaaaactatgcttctgggagtgatcacttaggaagccacgaacgaccggataagatgctgggaccagagcatggtatgtccagtatgtctcgaagccagtcagtcccaatgctggatgatgagatgctcacctacggaagtagtaaggggccacaacaacaaaaagcttctatgacaaaaaaagtctatcagtttgaccaaagcttcaatcctcaaggatcagtggaagtgaaagccgaaaagaggataccacccccttttcaacacaatcccgagtacgtgcaacaggccagcaaaaacatcgccaaggatttgattagtcctagagcttacagaggatacccaccgatggagcaaatgttttcattttctcagccatctgtgaatgaggatgctgtggtgaatgcccagttcgcaagccaaggggccagggcgggcttcctgagaagggccgactccctggtgagcgccacagaaatggccatgtttagaagggtcaatgagcctcatgagctgcccccaactgataggtacggcagacccccatataggggagggctggatcgccaaagcagcgttacagtgactgagtcccagttcctgaaaaggaatggcaggtatgaagatgaacacccttcatatcaagaagtgaaagctcaggcgggaagttttccggttaaaaaccttacccaaaggaggccattgtctgcgagaagctacagtacagagagttacggtgcctcccaaaccaggccagtttcagctaggcctactatggcagctcttttggaaaaaataccatctgactataacttgggtaactatggtgacaagccatcagataacagtgatttaaagacgaggcctactcctgtgaagggagaggagagctgtggtaaaatgcctgcagactggagacaacagctgcttagacatatagaagctagacggttagacaggaccccgtcccagcaaagcaacattttagacaatggacaagaagatgtatctcctagtggccaatggaatccttatccacttgggaggcgggatgtacctccggacaccattactaagaaggcaggcagccacatccagacgttgatggggtcccaaagccttcagcatcgcagccgggagcagcagccgtatgaaggaaatataaacaaagtgaccatccagcaatttcagtcaccattgcctattcagatcccctcttcacaggccacccggggacctcagcctggacggtgcttaattcaaactaaagggcaaaggagtatggatggatatccagagcagttttgtgtgagaatagaaaagaatcctggccttggatttagtatcagtggtggaattagtggacaaggaaatccattcaaaccttctgacaagggtatctttgttactagggttcagcctgatgggccagcatcaaacctactgcagcctggtgataagatccttcaggcaaatggacacagttttgtacatatggaacatgaaaaagctgtattactactgaagagtttccagaacacagtagacctagttattcaacgtgagcttactgtctaaatattttttataaatagtgaagatacgtctagccagacctaatgttcaaaaataaatttatacatagaaacaaattttgccaattgctggaccaatggcaaacattagtgccaaatgtataatactatatgttagcactgaccatccttaaaaaatgttaactctataaatatgatgttcatgtggttatgtattagttttaattgtcagcctctggctgtgcattggtgcagttttgtttctgtttttgtttttgtttttaatcaaataagtttcttctcaaaatggatttcatataatttcggagcacggaagcacacacaagctctttatgaattctgctctccatcagaaacactgcctcaaagttgtatatgcctttatatagaaaatacaaatataaagaattgtaattcccataaaatatttctagcacaaggtatatgttggcatatatacaaaaagaatatagagaaaaacaatattttcataaactaaacatctcagatagagaaaaaatatatcttaaaataagactttactatattgaatctttttcaataaaaattacatgataatgccttatgaaagtaactgtacatatggtataaagtgtttatatttggttccatattcatttgctaaattctcatgacacagagtgaaatatttcataaattagccatttatctctgggacccaaataaaaataggatgaactaatttgttcaatgcctttagctaattacaatacatgcagagtttagaaacagactaaaggtcattgtagttaagtctttttcaccacaaatttaagcagtggatgatgggtggcaggaaaggtattgctttatttctttcaagttcatgttgattataaactgtagcccctgtgatttctttacttgtaaatgtggaatttatttgtgtgttgcttaatctaatttgctgctttttaaattatttaaaacgaattttggaaattgataaaatttatcattacgaaagactgctgttagaaagttatggtaggtgattttaaatccttggtatttaaatatgaaacttcaaatataatttctcagagctgtggtctacctgtatcattaatttcaatggctgtttttctgggcagaaatagataaaatactttttttccaaaaacagtttcaaggtatgtaaaatcctgaatgctttttcactgaagagaaagacaagcatggttaatgtagaattatttacttttccattgaaactattttcctgcataaatgatcaaaatttattttataatcctttaaaatacttatctttcatattagtcattaatttaattacaatattaatttgaatttccaggataatttcccggagttggttgcatgcattatctttcataattttacatagttcttttgttatataatgaatttactttacatgctagtgtttcaagtattgtatgaggattttcacaatagtatcactgaatgatgtcaccagagctctgagaataatatttgtaagttaactgttttatggggacattgaaaatattgtatttttgtagggtctattaaaatgagtgtcactt

SEQ ID NO: 15863 - DNA, 2375 bp, Homo sapiens
  source 1..2375: mol_type = unassigned DNA
gtctaacgtggcaccttcctggattcccctctatctcctgttcttcctaccttctactccttccctcctcttctcctccgaagaccctggcgcccactccactgcggacccctgaacacttaaggaataacccttggcagctgcacgactacgctctccgaaacctcatgggcagtttctcccgccggcgatgatggagaacctaataaggggaaggaatcccccgcaataccagagaagtccttgtaaagaggttcgtgcagcacttcggaagaggcctgaagaggagttgcagtgcctggagatgaccaccaaacggaaaatcatcggccgtctggtgccatgccgatgtttccgaggtgaagaagaaatcatctcagttttagattactcccactgcagtcttcagcaggtgccaaaggaggtctttaacttcgaacgaacattagaggagctttatctagatgccaatcaaattgaagaactacccaagcaattgttcaactgtcaagctctacgaaaactaagtattcctgataacgacctttcaaatctgccaaccactattgctagtttagttaatcttaaagaactcgacatcagtaaaaatggtgtacaagaatttccagaaaacataaagtgctgtaagtgtttaacaattattgaagccagtgtcaatcccatttctaaactacctgatggcttcacacagctcctaaacctgacccagctctacctgaatgacgcctttcttgaatttcttccagccaattttggaagacttgtcaaattgcggatcttggagttaagagaaaatcacttgaaaactctaccaaacatctgaagatccagagtgtgccccttgcccaatcgcctgagactatacagtgacacctacaacagaggatgtggagggagcagcttttcgggcaccagaaatggcagcatcaggagcatcagcacgaatagactttgtagaggtagttctcccaaactatattatgaaaccaaacatttttggtgcgctacctgctgatgggggctgccttcttactgcctagtatctacaaaatgtttggtctttgttaaagtttaacgatgacatttctgactaatatagagagacctgatttttttccaaatgtgttcagttgccataactttcaatgaatatgaaattttatcagtctcagaaaaacattaatacccatatttttatctaattgatttcactatttgttatgttaaggtgcttttgtgtataatttttgtatatatttttaaatgggatcaaactaagccataatttaaaagtcatcctaatgcagtaaataagataatttctctagtttgttaaattcttcagagaccgaatataattgctcgtttttctgtcatactccctgatgatgttccattgtggacttattttgcaaagttcccagatggcacaagtcaaaatatgaaatgctgatgattgattgattttatgtatcctttcatcttatgtaatttaatgtggaacagttattttgtagctctaaaatacatttgttaattaaccatattggcttttcatgcagttcaatggcttatagcatttcaatttgcatagaaaatgaatctctgtaatgatacttttgctaaataaataacaatcgacataatgggttcatttgcttttaacattttatacatacaatttagaagtaggatatatttcatattgaaattttgaaaagcttgaaattcaacatacaaggtcaccatcttgctgatgcctaatgcagtacagcaaattcattcttcatcccatgttaactcctttttggaacaagtcaaaatacaaataatttacaatgattgtgttggagctattgcttgattaaatacaattcaaaggttctttttataaaacaggtgtgagcaggacacattgcacttacgggcttttcctatttttttggttctatttcattttactgcctaggaaagaaacatttttttgtaaaacctatgctatggaactgaaatgtactttattgaatatttctattctgttttatgaatatcaattatgtgaaatatataaatataaaattgccttagaatgcctaactctttgtataaaacagatatctgaaagtagatgttggttttttgttcaaattgtgtaaatgctgatttttccatgagtacttatgaagatctatatgtaaaaattttaagtctgcttactgtgtttgtaccaccttgttcttagctgtgtatactctatgctaattgacttctgtcattgtcacatatattgcatatgtctctcaaaaattaaaaggtatattgctattctaaaaataaaaaatgtaaattcctga

SEQ ID NO: 15864 - DNA, 3996 bp, Homo sapiens
  source 1..3996: mol_type = unassigned DNA
ctagtgcagtgcctggagatgaccaccaaacggaaaatcatcggccgtctggtgccatgccgatgtttccgaggtgaagaagaaatcatctcagttttagattactcccactgcagtcttcagcaggtgccaaaggaggtctttaacttcgaacgaacattagaggagctttatctagatgccaatcaaattgaagaactacccaagcaattgttcaactgtcaagctctacgaaaactaagtattcctgataacgacctttcaaatctgccaaccactattgctagtttagttaatcttaaagaactcgacatcagtaaaaatggtgtacaagaatttccagaaaacataaagtgctgtaagtgtttaacaattattgaagccagtgtcaatcccatttctaaactacctgatggcttcacacagctcctaaacctgacccagctctacctgaatgacgcctttcttgaatttcttccagccaattttggaagacttgtcaaattgcggatcttggagttaagagaaaatcacttgaaaactctaccaaagtcaatgcacaaactggcccagttggaaagacttgacctaggcaataatgaattcggtgagctgcctgaagttctggatcaaatacaaaatttgagggagttatggatggataataatgcattacaagtgttacctgggtctatagggaagttaaagatgttggtatacctggatatgtcaaaaaacagaatagaaacagttgacatggacatttctggatgtgaagcccttgaggacctcttattgtcatccaatatgttgcaacaattgcctgattctataggacttttgaaaaaactaacaactctaaaagtagatgacaatcaacttacaatgctacccaatacaattggaaatttatctttattagaagaatttgactgtagctgtaatgaactggagtcactaccttctactattggctaccttcatagtcttcggacattagcagttgatgagaatttccttccagaattacccagagaaattggaagttgtaagaatgtaacagtcatgtctctacgctccaacaaattagaatttcttcctgaagagattggacagatgcagaaactaagagtcctaaatttgagtgacaacagattgaagaatttaccattctcatttaccaaacttaaagagcttgcagctttgtggctttctgacaatcagtccaaagcccttatccctttacaaacagaagcccatccagaaacaaagcaaagagtattgactaactacatgtttccccagcagcctcgtggtgatgaagatttccagtcagacagtgacagctttaaccctacactgtgggaagagcagagacaacaacgcatgactgttgcctttgaatttgaagacaaaaaagaagatgacgaaaatgctgggaaagttaaggattgcaccatctttcccacagcctcttgattcaaagccattactcagccagcgggaggctgttcccccaggcaatataccacagcgtcctgaccggctgcccatgagtgatactttcactgacaactggactgatggctcgcattatgacaacacagggtttgttgctgaggaaaccacagccgagaatgccaacagtaatcctctcttaagttcgaaatctagaagcacatcttcgcatggacgcaggcctttgatcaggcaagacaggattgttggtgttcccctggaactcgagcagtctacacacagacacacaccagaaacagaagtgcctccttccaatccttggcagaattggaccagaacccctagtccgtttgaagacaggaccgcttttccttccaaattagagacaacccccactaccagcccattgcctgaaaggaaagaacatataaaggaatctactgaaatacctagtcctttttctccaggcgtaccatgggagtatcatgattccaatcccaacaggagtcttagtaatgtcttttctcaaatccactgccgcccggaatcttctaaaggtgttatttcaattagcaaaagcacagagaggctttcccccctaatgaaagatatcaagtctaataaattcaaaaagtcacagagtatcgatgagattgacattggtacatataaggtgtataacataccattagaaaactatgcttctgggagtgatcacttaggaagccacgaacgaccggataagatgctgggaccagagcatggtatgtccagtatgtctcgaagccagtcagtcccaatgctggatgatgagatgctcacctacggaagtagtaaggggccacaacaacaaaaagcttctatgacaaaaaaagtctatcagtttgaccaaagcttcaatcctcaaggatcagtggaagtgaaagccgaaaagaggataccacccccttttcaacacaatcccgagtacgtgcaacaggccagcaaaaacatcgccaaggatttgattagtcctagagcttacagaggatacccaccgatggagcaaatgttttcattttctcagccatctgtgaatgaggatgctgtggtgaatgcccagttcgcaagccaaggggccagggcgggcttcctgagaagggccgactccctggtgagcgccacagaaatggccatgtttagaagggtcaatgagcctcatgagctgcccccaactgataggtacggcagacccccatataggggagggctggatcgccaaagcagcgttacagtgactgagtcccagttcctgaaaaggaatggcaggtatgaagatgaacacccttcatatcaagaagtgaaagctcaggcgggaagttttccggttaaaaaccttacccaaaggaggccattgtctgcgagaagctacagtacagagagttacggtgcctcccaaaccaggccagtttcagctaggcctactatggcagctcttttggaaaaaataccatctgactataacttgggtaactatggtgacaagccatcagataacagtgatttaaagacgaggcctactcctgtgaagggagaggagagctgtggtaaaatgcctgcagactggagacaacagctgcttagacatatagaagctagacggttagacaggaatgctgcttacaaacacaatacagttaaccttggcatgctgccctatggaggtatttcagcaatgcatgcaggcagaagcatgactttaaacttgcagactaagtctaaatttgatcatcaagaactacctcttcagaaaaccccgtcccagcaaagcaacattttagacaatggacaagaagatgtatctcctagtggccaatggaatccttatccacttgggaggcgggatgtacctccggacaccattactaagaaggcaggcagccacatccagacgttgatggggtcccaaagccttcagcatcgcagccgggagcagcagccgtatgaaggaaatataaacaaagtgaccatccagcaatttcagtcaccattgcctattcagatcccctcttcacaggccacccggggacctcagcctggacggtgcttaattcaaactaaagggcaaaggagtatggatggatatccagagcagttttgtgtgagaatagaaaagaatcctggccttggatttagtatcagtggtggaattagtggacaaggaaatccattcaaaccttctgacaagggtatctttgttactagggttcagcctgatgggccagcatcaaacctactgcagcctggtgataagatccttcaggcaaatggacacagttttgtacatatggaacatgaaaaagctgtattactactgaagagtttccagaacacagtagacctagttattcaacgtgagcttactgtctaaatattttttataaatagtgaagatacgtctagccagacctaatgttcaaaaataaatttatacatagaaacaaattttgccaattgctggaccaatggcaaacatta

SEQ ID NO: 15865 - DNA, 4619 bp, Homo sapiens
  source 1..4619: mol_type = unassigned DNA
gtgcttcagaaaccaggagtttccgcctcggctcccccatgtccccttgtcatcccctgggtccccccagatcctcacccctccacacacactctcccgttcctagaggttccacctctgggctctctccttgccatttctttttcaaagatttccttagctgtcttctcctgagttcctggtccccttctcttcccttgcacccctccttcctatcgttccgatgggggcagtgccctgacttgggggcaggatccccggctaggctcttggggcctttctgggatgggatatttgggaagaccggtccggaatctaagaacccagaccctgtcccagtcctgtgcattcaggtgggcccgagggcgaggcgagatccagtgaggtccaggcctggtgcagccctagggaggcagcgtccatggagcaaaaggaatgccaggatcctgcacaggcagacgcgggccagcctcagcaccgacagccgacgcgcagatagcagagccatccttggggttgaaccatgattccggtgacagagctccgctactttgcggacacgcagccagcataccggatcctgaagccgtggtgggatgtgttcacagactacatctctatcgtcatgctgatgattgccgtcttcggggggacgctgcaggtcacccaagacaagatgatctgcctgccttgtaagtgggtcaccaaggactcctgcaatgattcgttccggggctgggcagcccctggcccggagcccacctaccccaactccaccattctgccgacccctgacacgggccccacaggcatcaagtatgacctggaccggcaccagtacaactacgtggacgctgtgtgctatgagaaccgactgcactggtttgccaagtacttcccctacctggtgcttctgcacacgctcatcttcctggcctgcagcaacttctggttcaaattcccgcgcaccagctcgaagctggagcactttgtgtctatcctgctgaagtgcttcgactcgccctggaccacgagggccctgtcggagacagtggtggaggagagcgaccccaagccggccttcagcaagatgaatgggtccatggacaaaaagtcatcgaccgtcagtgaggacgtggaggccaccgtgcccatgctgcagcggaccaagtcacggatcgagcagggtatcgtggaccgctcagagacgggcgtgctggacaagaaggagggggagcaagccaaggcgctgtttgagaaggtgaagaagttccggacccatgtggaggagggggacattgtgtaccgcctctacatgcggcagaccatcatcaaggtgatcaagttcatcctcatcatctgctacaccgtctactacgtgcacaacatcaagttcgacgtggactgcaccgtggacattgagagcctgacgggctaccgcacctaccgctgtgcccaccccctggccacactcttcaagatcctggcgtccttctacatcagcctagtcatcttctacggcctcatctgcatgtatacactgtggtggatgctacggcgctccctcaagaagtactcgtttgagtcgatccgtgaggagagcagctacagcgacatccccgacgtcaagaacgacttcgccttcatgctgcacctcattgaccaatacgacccgctctactccaagcgcttcgccgtcttcctgtcggaggtgagtgagaacaagctgcggcagctgaacctcaacaacgagtggacgctggacaagctccggcagcggctcaccaagaacgcgcaggacaagctggagctgcacctgttcatgctcagtggcatccctgacactgtgtttgacctggtggagctggaggtcctcaagctggagctgatccccgacgtgaccatcccgcccagcattgcccagctcacgggcctcaaggagctgtggctctaccacacagcggccaagattgaagcgcccgcgctggccttcctgcgtgagaacctgcgggcgctgcacatcaagttcaccgacatcaaggagatcccgctgtggatctatagcctgaagacactggaggagctgcacctgacgggcaacctgagcgcggagaacaaccgctacatcgtcatcgacgggctgcgggagctcaaacgcctcaaggtgctgcggctcaagagcaacctaagcaagctgccacaggtggtcacagatgtgggcgtgcacctgcagaagctgtccatcaacaatgagggcaccaagctcatcgtcctcaacagcctcaagaagatggcgaacctgactgagctggagctgatccgctgtgacctggagcgcatcccccactccatcttcagcctccacaacctgcaggagattgacctcaaggacaacaacctcaagaccatcgaggagatcatcagcttccagcacctgcaccgcctcacctgccttaagctgtggtacaaccacatcgcctacatccccatccagatcggcaacctcaccaacctggagcgcctctacctgaaccgcaacaagatcgagaagatccccacccagctcttctactgccgcaagctgcgctacctggacctcagccacaacaacctgaccttcctccctgccgacatcggcctcctgcagaacctccagaacctagccatcacggccaaccggatcgagacgctccctccggagctcttccagtgccggaagctgcgggccctgcacctgggcaacaacgtgctgcagtcactgccctccagggtgggcgagctgaccaacctgacgcagatcgagctgcggggcaaccggctggagtgcctgcctgtggagctgggcgagtgcccactgctcaagcgcagcggcttggtggtggaggaggacctgttcaacacactgccacccgaggtgaaggagcggctgtggagggctgacaaggagcaggcctgagcgaggccggcccagcacagcaagcagcaggaccgctgcccagtcctcaggcccggaggggcaggcctagcttctcccagaactcccggacagccaggacagcctcgtggctgggcaggagcctggggccgcttgtgagtcaggccagagcgagaggacagtatctgtggggctggccccttttctccctctgagactcacgtcccccagggcaagtgcttgtggaggagagcaagtctcaagagcgcagtatttggataatcagggtctcctccctggaggccagctctgccccaggggctgagctgccaccagaggtcctgggaccctcactttagttcttggtatttatttttctccatctcccacctccttcatccagataacttatacattcccaagaaagttcagcccagatggaaggtgttcagggaaaggtgggctgccttttccccttgtccttatttagcgatgccgccgggcatttaacacccacctggacttcagcagagtggtccggggcgaaccagccatgggacggtcacccagcagtgccgggctgggctctgcggtgcggtccacgggagagcaggcctccagctggaaaggccaggcctggagcttgcctcttcagtatttgtggcagttttagttttttgtttttttttttttaatcaaaaaacaatttttttaaaaaaaaagctttgaaaatggatggtttgggtattaaaaagaaaaaaaaaacttaaaaaaaaaaagacactaacggccagtgagttggagtctcagggcagggtggcagtttcccttgagcaaagcagccagacgttgaactgtgtttcctttccctgggcgcagggtgcagggtgtcttccggatctggtgtgaccttggtccaggagttctatttgttcctggggagggaggtttttttgtttgttttttgggtttttttggtgtcttgttttctttctcctccatgtgtcttggcaggcactcatttctgtggctgtcggccagagggaatgttctggagctgccaaggagggaggagactcgggttggctaatccccggatgaacggtgctccattcgcacctcccctcctcgtgcctgccctgcctctccacgcacagtgttaaggagccaagaggagccacttcgcccagactttgtttccccaccgcctgcggcatgggtgtgtccagtgccaccgctggcctccgctgcttccatcagccctgtcaccacctggtccttcatgaagagcagacacttagaggctggtcgggaatggggaggtcgcccctgggagggcaggcgttggttccaagccggttcccgtccctggcgcctggagtgcacacagcccagtcggcacctggtggctggaagccaccctgctttagatcactcgggtccccaccttagaagggtccccgccttagatcaatcacgtggacactaaggcacgttttagagtctcttgtcttaatgattatgtccatccgtctgtccgtccatttgtgttttctgcgtcgtgtcattggatataatcctcagaaataatgcacactagcctctgacaaccatgaagcaaaaatccgttacatgtgggtctgaacttgtagactcggtcacagtatcaaataaaatctataac

SEQ ID NO: 15866 - DNA, 4161 bp, Homo sapiens
  source 1..4161: mol_type = unassigned DNA
cggagcggccggggcctggggctgcctgccgggcggccgggcgcggcgagcccaggttgaaccatgattccggtgacagagctccgctactttgcggacacgcagccagcataccggatcctgaagccgtggtgggatgtgttcacagactacatctctatcgtcatgctgatgattgccgtcttcggggggacgctgcaggtcacccaagacaagatgatctgcctgccttgtaagtgggtcaccaaggactcctgcaatgattcgttccggggctgggcagcccctggcccggagcccacctaccccaactccaccattctgccgacccctgacacgggccccacaggcatcaagtatgacctggaccggcaccagtacaactacgtggacgctgtgtgctatgagaaccgactgcactggtttgccaagtacttcccctacctggtgcttctgcacacgctcatcttcctggcctgcagcaacttctggttcaaattcccgcgcaccagctcgaagctggagcactttgtgtctatcctgctgaagtgcttcgactcgccctggaccacgagggccctgtcggagacagtggtggaggagagcgaccccaagccggccttcagcaagatgaatgggtccatggacaaaaagtcatcgaccgtcagtgaggacgtggaggccaccgtgcccatgctgcagcggaccaagtcacggatcgagcagggtatcgtggaccgctcagagacgggcgtgctggacaagaaggagggggagcaagccaaggcgctgtttgagaaggtgaagaagttccggacccatgtggaggagggggacattgtgtaccgcctctacatgcggcagaccatcatcaaggtgatcaagttcatcctcatcatctgctacaccgtctactacgtgcacaacatcaagttcgacgtggactgcaccgtggacattgagagcctgacgggctaccgcacctaccgctgtgcccaccccctggccacactcttcaagatcctggcgtccttctacatcagcctagtcatcttctacggcctcatctgcatgtatacactgtggtggatgctacggcgctccctcaagaagtactcgtttgagtcgatccgtgaggagagcagctacagcgacatccccgacgtcaagaacgacttcgccttcatgctgcacctcattgaccaatacgacccgctctactccaagcgcttcgccgtcttcctgtcggaggtgagtgagaacaagctgcggcagctgaacctcaacaacgagtggacgctggacaagctccggcagcggctcaccaagaacgcgcaggacaagctggagctgcacctgttcatgctcagtggcatccctgacactgtgtttgacctggtggagctggaggtcctcaagctggagctgatccccgacgtgaccatcccgcccagcattgcccagctcacgggcctcaaggagctgtggctctaccacacagcggccaagattgaagcgcccgcgctggccttcctgcgtgagaacctgcgggcgctgcacatcaagttcaccgacatcaaggagatcccgctgtggatctatagcctgaagacactggaggagctgcacctgacgggcaacctgagcgcggagaacaaccgctacatcgtcatcgacgggctgcgggagctcaaacgcctcaaggtgctgcggctcaagagcaacctaagcaagctgccacaggtggtcacagatgtgggcgtgcacctgcagaagctgtccatcaacaatgagggcaccaagctcatcgtcctcaacagcctcaagaagatggcgaacctgactgagctggagctgatccgctgtgacctggagcgcatcccccactccatcttcagcctccacaacctgcaggagattgacctcaaggacaacaacctcaagaccatcgaggagatcatcagcttccagcacctgcaccgcctcacctgccttaagctgtggtacaaccacatcgcctacatccccatccagatcggcaacctcaccaacctggagcgcctctacctgaaccgcaacaagatcgagaagatccccacccagctcttctactgccgcaagctgcgctacctggacctcagccacaacaacctgaccttcctccctgccgacatcggcctcctgcagaacctccagaacctagccatcacggccaaccggatcgagacgctccctccggagctcttccagtgccggaagctgcgggccctgcacctgggcaacaacgtgctgcagtcactgccctccagggtgggcgagctgaccaacctgacgcagatcgagctgcggggcaaccggctggagtgcctgcctgtggagctgggcgagtgcccactgctcaagcgcagcggcttggtggtggaggaggacctgttcaacacactgccacccgaggtgaaggagcggctgtggagggctgacaaggagcaggcctgagcgaggccggcccagcacagcaagcagcaggaccgctgcccagtcctcaggcccggaggggcaggcctagcttctcccagaactcccggacagccaggacagcctcgtggctgggcaggagcctggggccgcttgtgagtcaggccagagcgagaggacagtatctgtggggctggccccttttctccctctgagactcacgtcccccagggcaagtgcttgtggaggagagcaagtctcaagagcgcagtatttggataatcagggtctcctccctggaggccagctctgccccaggggctgagctgccaccagaggtcctgggaccctcactttagttcttggtatttatttttctccatctcccacctccttcatccagataacttatacattcccaagaaagttcagcccagatggaaggtgttcagggaaaggtgggctgccttttccccttgtccttatttagcgatgccgccgggcatttaacacccacctggacttcagcagagtggtccggggcgaaccagccatgggacggtcacccagcagtgccgggctgggctctgcggtgcggtccacgggagagcaggcctccagctggaaaggccaggcctggagcttgcctcttcagtatttgtggcagttttagttttttgtttttttttttttaatcaaaaaacaatttttttaaaaaaaaagctttgaaaatggatggtttgggtattaaaaagaaaaaaaaaacttaaaaaaaaaaagacactaacggccagtgagttggagtctcagggcagggtggcagtttcccttgagcaaagcagccagacgttgaactgtgtttcctttccctgggcgcagggtgcagggtgtcttccggatctggtgtgaccttggtccaggagttctatttgttcctggggagggaggtttttttgtttgttttttgggtttttttggtgtcttgttttctttctcctccatgtgtcttggcaggcactcatttctgtggctgtcggccagagggaatgttctggagctgccaaggagggaggagactcgggttggctaatccccggatgaacggtgctccattcgcacctcccctcctcgtgcctgccctgcctctccacgcacagtgttaaggagccaagaggagccacttcgcccagactttgtttccccaccgcctgcggcatgggtgtgtccagtgccaccgctggcctccgctgcttccatcagccctgtcaccacctggtccttcatgaagagcagacacttagaggctggtcgggaatggggaggtcgcccctgggagggcaggcgttggttccaagccggttcccgtccctggcgcctggagtgcacacagcccagtcggcacctggtggctggaagccaccctgctttagatcactcgggtccccaccttagaagggtccccgccttagatcaatcacgtggacactaaggcacgttttagagtctcttgtcttaatgattatgtccatccgtctgtccgtccatttgtgttttctgcgtcgtgtcattggatataatcctcagaaataatgcacactagcctctgacaaccatgaagcaaaaatccgttacatgtgggtctgaacttgtagactcggtcacagtatcaaataaaatctataacag

SEQ ID NO: 15867 - DNA, 4355 bp, Homo sapiens
  source 1..4355: mol_type = unassigned DNA
acttccggggcggaggaggctgagtggtgcagtgagggacaaacaaaaggaggcgccggagcagcgctgcggccggcggcgggacggagcggccggggcctggggctgcctgccgggcggccgggcgcggcgagcccagggaggcagcgtccatggagcaaaaggaatgccaggatcctgcacaggcagacgcgggccagcctcagcaccgacagccgacgcgcagatagcagagccatccttggggttgaaccatgattccggtgacagagctccgctactttgcggacacgcagccagcataccggatcctgaagccgtggtgggatgtgttcacagactacatctctatcgtcatgctgatgattgccgtcttcggggggacgctgcaggtcacccaagacaagatgatctgcctgccttgtaagtgggtcaccaaggactcctgcaatgattcgttccggggctgggcagcccctggcccggagcccacctaccccaactccaccattctgccgacccctgacacgggccccacaggcatcaagtatgacctggaccggcaccagtacaactacgtggacgctgtgtgctatgagaaccgactgcactggtttgccaagtacttcccctacctggtgcttctgcacacgctcatcttcctggcctgcagcaacttctggttcaaattcccgcgcaccagctcgaagctggagcactttgtgtctatcctgctgaagtgcttcgactcgccctggaccacgagggccctgtcggagacagtggtggaggagagcgaccccaagccggccttcagcaagatgaatgggtccatggacaaaaagtcatcgaccgtcagtgaggacgtggaggccaccgtgcccatgctgcagcggaccaagtcacggatcgagcagggtatcgtggaccgctcagagacgggcgtgctggacaagaaggagggggagcaagccaaggcgctgtttgagaaggtgaagaagttccggacccatgtggaggagggggacattgtgtaccgcctctacatgcggcagaccatcatcaaggtgatcaagttcatcctcatcatctgctacaccgtctactacgtgcacaacatcaagttcgacgtggactgcaccgtggacattgagagcctgacgggctaccgcacctaccgctgtgcccaccccctggccacactcttcaagatcctggcgtccttctacatcagcctagtcatcttctacggcctcatctgcatgtatacactgtggtggatgctacggcgctccctcaagaagtactcgtttgagtcgatccgtgaggagagcagctacagcgacatccccgacgtcaagaacgacttcgccttcatgctgcacctcattgaccaatacgacccgctctactccaagcgcttcgccgtcttcctgtcggaggtgagtgagaacaagctgcggcagctgaacctcaacaacgagtggacgctggacaagctccggcagcggctcaccaagaacgcgcaggacaagctggagctgcacctgttcatgctcagtggcatccctgacactgtgtttgacctggtggagctggaggtcctcaagctggagctgatccccgacgtgaccatcccgcccagcattgcccagctcacgggcctcaaggagctgtggctctaccacacagcggccaagattgaagcgcccgcgctggccttcctgcgtgagaacctgcgggcgctgcacatcaagttcaccgacatcaaggagatcccgctgtggatctatagcctgaagacactggaggagctgcacctgacgggcaacctgagcgcggagaacaaccgctacatcgtcatcgacgggctgcgggagctcaaacgcctcaaggtgctgcggctcaagagcaacctaagcaagctgccacaggtggtcacagatgtgggcgtgcacctgcagaagctgtccatcaacaatgagggcaccaagctcatcgtcctcaacagcctcaagaagatggcgaacctgactgagctggagctgatccgctgtgacctggagcgcatcccccactccatcttcagcctccacaacctgcaggagattgacctcaaggacaacaacctcaagaccatcgaggagatcatcagcttccagcacctgcaccgcctcacctgccttaagctgtggtacaaccacatcgcctacatccccatccagatcggcaacctcaccaacctggagcgcctctacctgaaccgcaacaagatcgagaagatccccacccagctcttctactgccgcaagctgcgctacctggacctcagccacaacaacctgaccttcctccctgccgacatcggcctcctgcagaacctccagaacctagccatcacggccaaccggatcgagacgctccctccggagctcttccagtgccggaagctgcgggccctgcacctgggcaacaacgtgctgcagtcactgccctccagggtgggcgagctgaccaacctgacgcagatcgagctgcggggcaaccggctggagtgcctgcctgtggagctgggcgagtgcccactgctcaagcgcagcggcttggtggtggaggaggacctgttcaacacactgccacccgaggtgaaggagcggctgtggagggctgacaaggagcaggcctgagcgaggccggcccagcacagcaagcagcaggaccgctgcccagtcctcaggcccggaggggcaggcctagcttctcccagaactcccggacagccaggacagcctcgtggctgggcaggagcctggggccgcttgtgagtcaggccagagcgagaggacagtatctgtggggctggccccttttctccctctgagactcacgtcccccagggcaagtgcttgtggaggagagcaagtctcaagagcgcagtatttggataatcagggtctcctccctggaggccagctctgccccaggggctgagctgccaccagaggtcctgggaccctcactttagttcttggtatttatttttctccatctcccacctccttcatccagataacttatacattcccaagaaagttcagcccagatggaaggtgttcagggaaaggtgggctgccttttccccttgtccttatttagcgatgccgccgggcatttaacacccacctggacttcagcagagtggtccggggcgaaccagccatgggacggtcacccagcagtgccgggctgggctctgcggtgcggtccacgggagagcaggcctccagctggaaaggccaggcctggagcttgcctcttcagtatttgtggcagttttagttttttgtttttttttttttaatcaaaaaacaatttttttaaaaaaaaagctttgaaaatggatggtttgggtattaaaaagaaaaaaaaaacttaaaaaaaaaaagacactaacggccagtgagttggagtctcagggcagggtggcagtttcccttgagcaaagcagccagacgttgaactgtgtttcctttccctgggcgcagggtgcagggtgtcttccggatctggtgtgaccttggtccaggagttctatttgttcctggggagggaggtttttttgtttgttttttgggtttttttggtgtcttgttttctttctcctccatgtgtcttggcaggcactcatttctgtggctgtcggccagagggaatgttctggagctgccaaggagggaggagactcgggttggctaatccccggatgaacggtgctccattcgcacctcccctcctcgtgcctgccctgcctctccacgcacagtgttaaggagccaagaggagccacttcgcccagactttgtttccccaccgcctgcggcatgggtgtgtccagtgccaccgctggcctccgctgcttccatcagccctgtcaccacctggtccttcatgaagagcagacacttagaggctggtcgggaatggggaggtcgcccctgggagggcaggcgttggttccaagccggttcccgtccctggcgcctggagtgcacacagcccagtcggcacctggtggctggaagccaccctgctttagatcactcgggtccccaccttagaagggtccccgccttagatcaatcacgtggacactaaggcacgttttagagtctcttgtcttaatgattatgtccatccgtctgtccgtccatttgtgttttctgcgtcgtgtcattggatataatcctcagaaataatgcacactagcctctgacaaccatgaagcaaaaatccgttacatgtgggtctgaacttgtagactcggtcacagtatcaaataaaatctataacagaaa

SEQ ID NO: 15868 - DNA, 7593 bp, Homo sapiens
  source 1..7593: mol_type = unassigned DNA
gctgagcccgcagcctccggcagccgggaaagtgcgggcgcggggccgcagcctgcccgcccggagcggcccaggagcacgccgcggggagcgcgggcgtccggggctggagtcgcgcaggtaatagttaacctcttctgtgagaagtcagaaggtgatctctttaatgctttctttttaagaatttttcaaattgagactaattgcagaggttccagttgaccagcattcataggaatgaagacaaacacagagatggtgtgtctaagaaacttcaaaaggtgtagacctcctgactgaagcatattggatttatttaatttttttcactgtatttctgtcctcctacaagggaaagtcatgattacactaactgagctaaaatgcttagcagatgcccagtcatcttatcacatcttaaaaccatggtgggacgtcttctggtattacatcacactgatcatgctgctggtggccgtgctggccggagctctccagctgacgcagagcagggttctgtgctgtcttccatgcaaagtggaatttgacaatcactgtgccgtgccttgggacatcctgaaagccagcatgaacacatcctctaatcctgggacaccgcttccgctccccctccgaattcagaatgacctccaccgacagcagtactcctatattgatgccgtctgttacgagaaacagctccattggtttgcaaagtttttcccctatctggtgctcttgcacacgctcatctttgcagcctgcagcaacttttggcttcactaccccagtaccagttccaggctcgagcattttgtggccatccttcacaagtgcttcgattctccatggaccacccgcgccctttcagaaacagtggctgagcagtcagtgaggcctctgaaactctccaagtccaagattttgctttcgtcctcagggtgttcagctgacatagattccggcaaacagtcattgccctacccacagccaggtttggagtcagctggcatagaaagcccaacttccagtgtcctggacaagaaggagggtgaacaggccaaagccatctttgaaaaagtgaaaagattccgcatgcatgtggagcagaaggacatcatttatagagtatatctgaaacagataatagtcaaagtcattttgtttgtgctcatcataacttatgttccatattttttaacccacatcactcttgaaatcgactgttcagttgatgtgcaggcttttacaggatataagcgctaccagtgtgtctattccttggcagaaatctttaaggtcctggcttcattttatgtcattttggttatactttatggtctgacctcttcctacagcctgtggtggatgctgaggagttccctgaagcaatattcctttgaggcgttaagagaaaaaagcaactacagtgacatccctgatgtcaagaatgactttgccttcatccttcatctggctgatcagtatgatcctctttattccaaacgcttctccatattcctatcagaggtcagtgagaacaaactgaaacagatcaacctcaataatgaatggacagttgagaaactgaaaagtaagcttgtgaaaaatgcccaggacaagatagaactgcatctttttatgctcaacggtcttccagacaatgtctttgagttaactgaaatggaagtgctaagcctggagcttatcccagaggtgaagctgccctctgcagtctcacagctggtcaacctcaaggagcttcgtgtgtaccattcatctctggtcgtagaccatcctgcactggcctttctagaggagaatttaaaaatcctccgcctgaaatttactgaaatgggaaaaatcccacgctgggtatttcacctcaagaatctcaaggaactttatctttcgggctgtgttctccctgaacagttgagtactatgcagttggagggctttcaggacttaaaaaatctaaggaccctgtacttgaagagcagcctctcccggatcccacaagttgttacagacctcctgccttcattgcagaaactgtcccttgataatgagggaagcaaactggttgtgttgaacaacttgaaaaagatggtcaatctgaaaagcctagaactgatcagctgtgacctggaacgcatcccacattccattttcagcctgaataatttgcatgagttagacctaagggaaaataaccttaaaactgtggaagagatcattagctttcagcatcttcagaatctttcctgcttaaagttgtggcacaataacattgcttatattcctgcacagattggggcattatctaacctagagcagctctctttggaccataataatattgagaatctgcccttgcagcttttcctatgcactaaactacattatttggatctaagctataaccacttgaccttcattccagaagaaatccagtatctgagtaatttgcagtactttgctgtgaccaacaacaatattgagatgctaccagatgggctgtttcagtgcaaaaagctgcagtgtttacttttggggaaaaatagcttgatgaatttgtcccctcatgtgggtgagctgtcaaaccttactcatctggagctcattggtaattacctggaaacacttcctcctgaactagaaggatgtcagtccctaaaacggaactgtctgattgttgaggagaacttgctcaatactcttcctctccctgtaacagaacgtttacagacgtgcttagacaaatgttgacttaaagaaaagagacccgtgtttcaaaatcatttttaaaagtatgctcggccgggcgtggtggctcatgcctataatcccagcactttgggaggccaagatgggcggattgcttgaggtcaggagttcgagaccagtctggccaacctggtgaaaccccatctctgctaaaactacaaaaaaattagccaggcgtggtggcgtgcgcctgtaatcccagctacttgggaggctgacgcaggggaattgcttgaaccagggaggtggaggttgcagtgagccgagattgtgccactgtacaccagcctgggtgacagagcaagactcttatctcaaaaaaaaaaaaaaaatgctccagggctttaaatgagaagtaaaattttctaagttaataaagatgaagaatgggtgactattatgatgaaccataactaaatgtcttattaaagcaactgagtgtctagccctaaattaaccaggtaaaaactgttaacactaacctgaagttttgtgaataactgttctttaacttattgagatgttgcaagaaatgcacatccagggtggactgggagctatgaaatgactaaattcctccttgcagtgtttaccttcaagattgtataggtattctctcctcttcttcccccagtccccattacttatttgcacacttgttttaactgacttcctgttttgatatttatcaccaagaccataaactcatcaatatgaattttcttgatgtatactcacgactgtctttgatttatgttcctaaatttttttagatagggtatgttgtgcttggcagaattcttttttggcttaatttttacttcctttcccagcttgcttgagtcttccttaacctggttttctcttaacaccaatgatgaaccctgagaaaatgcctgcatttggcctttgcctagaacaggagctgagtatttaagatgtattatcctcggggcatcctgaaaattaatgtattccctaaaatttcttcttgtctatcatcaaggcctttttttatttgttaagaatttttatattaaatgtaaaacatataaatattttctattgtataatcttggattcaacatctgtgaggatcatttttgtaagatacatagaatttgtgcatttctttatgaacttactgttagtgttcttggtttcggctgtttatgactcatgtttatgtacattctgctccaaaatgtttttgtactctgcaactaattacttttggataacaaaagccttgtgtttaatgccctaaagtatttgggggtttccttgtgagagggtggccgaatcatctacctctctcttccatagttgctgtgcaatcgtacgggtaaaattcttaattacttacaaaaactgtgatagaggggagaggtacagatttggtttttaaattgattttaaaatactttatagaaatttagtaagagttaaagcaaaagactttttttccctccatctatgtaatctctagctatgattataatgtaaaacagcctctattcagtgtctaaaatgagttctcaaaacccacaaagaaatagatccatttaactgaaattcatctcatgcctttatctaactcttctggaaaatacattttgctcctttttataaagagctttgtgcttggccttttattatgcatatttttaatgaataaaatcaactgactcatttttgggaaatgtacatctttaatatgtttttccctaagggtctaggcattatgatgccacctcttcattttggatataactatgaagaaatctattaactgcacctacacaaaactggaaaacactataggtaaacagtactgtgtatatggaattgtggtgcgtggtatgtgttttctcttgctttgttccagaaagatgaaagtgagtctttaaagcatagcaaatagagcttcccctcacctgccacacactcctgcactaaagttcaaagaaaagaattattcaaatcaaatgaaatttgaataatattagctatcaggaatataggacaccaaacacactgcctcacacattattgtttattctgaacggaaaggaacagtgtaaaaataaactacttaccaaaacttgcctttagtcagaacattcagctctcagggaagcaggtataactgatgaaacttctaggacttcagaaaacagattctaattatatccatgtttttcgttgttattttcattttttaaagtgtgagttgatgtttattttagtgtttcacaatagaattatcatgtatactgattccagtgtggcatgtgattaagttttggacatgaatatgccaaaagtgcttaaatgtttttggccacataactagctagaatttcaaaacaaaattcagatttgctaccattcacctgacgaacttctccatggctcgtcactggtttggttcaactgcagaagtcattggctaaattttccttatcacctacgtaaatttctagaagaatttactagcaggattaataatgaatattataaactgctttccacacactagggtataattattggtgcaatctatgttgttcttgatgccatggttttacatcttttaatttaaaccttatacaccagtgtttaggtcgcttttgagacaaggtagccctgatgcaaggaaaaatgaggctactacttcacataaaaaatagggtgttaataccacctttactgtactgttggagcagatctttattttacaagtgttcatattcacataagagaattttaaatgaagaaaattaagtttgttaaattataattatgagactttcgttggcatttgatttcaagaatacatatgcattttccaaaaaataaatgtggaggttattcagaacaaaattcatagcttacggtagtaatggcatggattaattttatttgcatgcacacacagacacacatacttcatatatgcaaattatagcattagtttttgatatatctagtggtttttttttcaaaattgcaggaggttgtagattaaattaagtatgatagcacgttttttaattcattaatcatgaagtgctctgttccctaagttatgacatttagaagaaatcacatgctcaaccttaatctgagaacctaagtgtttttgagcattccagtaaaggagtagtgttcttttcctaacttacatcagggtacatctgtgtggcacacagatactatcttttcattcttcactcccagtcttaatttctttcccctgtatgtcactgtattttatgtcacttcacattgtgttaaacagggtaaatagagatcctcagtatctcagtgctgtggcatagctccaataggtgtgctgtggtgcactgcagtgatgtatttgcataacattgtttgatagtgaaaaattttttttcggttcaagtgttttgtgattaaaattttatgtttaattaaaatattgcataatattgatgggttcaaaaaccattaaaataatcaaacaattattctgtgcccttaacattattttcttgtgttttcaataaaattttcttttcatctttccatcttcacattctcttagcatcatcctatgcacataaggtatgttgttttccttctccactcacctaccgcactaaatttgatcagcaattgtacagtaacagaatatatttgtgccagaagatttgcaatgatatttgagcatgtatttatttaggaggaagccagtgcctgtaattatgtctcattgagtagttttactttgcccatcctgcagtatttagagctgatctgtacccaaagcaggacaatgtaactgtagatctgctttgttttcagtaactgtacattgcatcagaatctgtttatttctatctggaaacagacagaatggtgggggagggaaggagttattttgcatcctagtttgtattatgaagtcatcatatatatatttgaaatagtataagctaattactgttgcagaatgccctcgatataattatttcttttcagctggatgtgaaaagctgaagcagtgaaaacctgcagtcttatttcactggtttccttctgtttcttgtccatcacttctgtatccacagggagctatctactacatacctttggtaacaggctacattctcttcagattttttatatgaataatttcatcagcactaaagcattaacatagaataatgagccaaagtactgagtcgagatggctttcagttgagtttaatttcatatttaacttttgcatttaacttgtataatacactactgctgagaaaaacaattatgaatgccttctgcatgttgtacattatctctaacagagatggtgcaattttaagaatacaaaggggtatagagttagaatggatgtgttcgtgcatatatatgttgtatttaaatattaatgtttacaagaagattttttttaaattcttcaaatacttcacttagtgaaataatgggccaatctggaatagagacattttatttggttagtgcaagagtgaaagctagcatttgttaaccttcacatatttatctgtgtacaattgtttttgcttctggtaatgaattattagaaaatggaagattttgttcaatgtttttggccctcaggtttactgtgtaaatctgcatttttggtggtaaatccctttgccacagattcagtagcttttggtaaacttcactgtttttaaagtaccttttgtgtaaaataaagatccaatttttataacaaatggcaaataaaaacagtaaatgctggaagaa

SEQ ID NO: 15869 - DNA, 3489 bp, Homo sapiens
  source 1..3489: mol_type = unassigned DNA
gctgagcccgcagcctccggcagccgggaaagtgcgggcgcggggccgcagcctgcccgcccggagcggcccaggagcacgccgcggggagcgcgggcgtccggggctggagtcgcgcagggctccagtttgtgttttcagctgcctactagacctcactacctggatggcccacagctctggagactggaaggtccaagatcaagatactacagatttgatttctggacgttgaacatggtgtaggagtagaaaagcaacagggacggaaggagagaacttaccccttcaagcccttttataaggcactaaatcccatcattgagggcagagtcctcatagcctaatcacctcctaaatgctccatttcttaatattgttgcactgaggattaagcttcaacatgaattctgaagaggacacaaacatccaaaccatagcagtcaatgccttagcccttgatgttgctatcaacctgagattcggggatcaaggaaggacaggtaatagttaacctcttctgtgagaagtcagaaggtgatctctttaatgctttctttttaagaatttttcaaattgagactaattgcagaggttccagttgaccagcattcataggaatgaagacaaacacagagatggtgtgtctaagaaacttcaaaaggtgtagacctcctgactgaagcatattggatttatttaatttttttcactgtatttctgtcctcctacaagggaaagtcatgattacactaactgagctaaaatgcttagcagatgcccagtcatcttatcacatcttaaaaccatggtgggacgtcttctggtattacatcacactgatcatgctgctggtggccgtgctggccggagctctccagctgacgcagagcagggttctgtgctgtcttccatgcaaagtggaatttgacaatcactgtgccgtgccttgggacatcctgaaagccagcatgaacacatcctctaatcctgggacaccgcttccgctccccctccgaattcagaatgacctccaccgacagcagtactcctatattgatgccgtctgttacgagaaacagctccattggtttgcaaagtttttcccctatctggtgctcttgcacacgctcatctttgcagcctgcagcaacttttggcttcactaccccagtaccagttccaggctcgagcattttgtggccatccttcacaagtgcttcgattctccatggaccacccgcgccctttcagaaacagtggctgagcagtcagtgaggcctctgaaactctccaagtccaagattttgctttcgtcctcagggtgttcagctgacatagattccggcaaacagtcattgccctacccacagccaggtttggagtcagctggcatagaaagcccaacttccagtgtcctggacaagaaggagggtgaacaggccaaagccatctttgaaaaagtgaaaagattccgcatgcatgtggagcagaaggacatcatttatagagtatatctgaaacagataatagtcaaagtcattttgtttgtgctcatcataacttatgttccatattttttaacccacatcactcttgaaatcgactgttcagttgatgtgcaggcttttacaggatataagcgctaccagtgtgtctattccttggcagaaatctttaaggtcctggcttcattttatgtcattttggttatactttatggtctgacctcttcctacagcctgtggtggatgctgaggagttccctgaagcaatattcctttgaggcgttaagagaaaaaagcaactacagtgacatccctgatgtcaagaatgactttgccttcatccttcatctggctgatcagtatgatcctctttattccaaacgcttctccatattcctatcagaggtcagtgagaacaaactgaaacagatcaacctcaataatgaatggacagttgagaaactgaaaagtaagcttgtgaaaaatgcccaggacaagatagaactgcatctttttatgctcaacggtcttccagacaatgtctttgagttaactgaaatggaagtgctaagcctggagcttatcccagaggtgaagctgccctctgcagtctcacagctggtcaacctcaaggagcttcgtgtgtaccattcatctctggtcgtagaccatcctgcactggcctttctagaggagaatttaaaaatcctccgcctgaaatttactgaaatgggaaaaatcccacgctgggtatttcacctcaagaatctcaaggaactttatctttcgggctgtgttctccctgaacagttgagtactatgcagttggagggctttcaggacttaaaaaatctaaggaccctgtacttgaagagcagcctctcccggatcccacaagttgttacagacctcctgccttcattgcagaaactgtcccttgataatgagggaagcaaactggttgtgttgaacaacttgaaaaagatggtcaatctgaaaagcctagaactgatcagctgtgacctggaacgcatcccacattccattttcagcctgaataatttgcatgagttagacctaagggaaaataaccttaaaactgtggaagagatcattagctttcagcatcttcagaatctttcctgcttaaagttgtggcacaataacattgcttatattcctgcacagattggggcattatctaacctagagcagctctctttggaccataataatattgagaatctgcccttgcagcttttcctatgcactaaactacattatttggatctaagctataaccacttgaccttcattccagaagaaatccagtatctgagtaatttgcagtactttgctgtgaccaacaacaatattgagatgctaccagatgggctgtttcagtgcaaaaagctgcagtgtttacttttggggaaaaatagcttgatgaatttgtcccctcatgtgggtgagctgtcaaaccttactcatctggagctcattggtaattacctggaaacacttcctcctgaactagaaggatgtcagtccctaaaacggaactgtctgattgttgaggagaacttgctcaatactcttcctctccctgtaacagaacgtttacagacgtgcttagacaaatgttgacttaaagaaaagagacccgtgtttcaaaatcatttttaaaagtatgctcggccgggcgtggtggctcatgcctataatcccagcactttgggaggccaagatgggcggattgcttgaggtcaggagttcgagaccagtctggccaacctggtgaaaccccatctctgctaaaactacaaaaaaattagccaggcgtggtggcgtgcgcctgtaatcccagctacttgggaggctgacgcaggggaattgcttgaaccagggaggtggaggttgcagtgagccgagattgtgccactgtacaccagcctgggtgacagagcaagactcttatctc

SEQ ID NO: 15870 - DNA, 7474 bp, Homo sapiens
  source 1..7474: mol_type = unassigned DNA
ccctaggtaatagttaacctcttctgtgagaagtcagaaggtgatctctttaatgctttctttttaagaatttttcaaattgagactaattgcagaggttccagttgaccagcattcataggaatgaagacaaacacagagatggtgtgtctaagaaacttcaaaaggtgtagacctcctgactgaagcatattggatttatttaatttttttcactgtatttctgtcctcctacaagggaaagtcatgattacactaactgagctaaaatgcttagcagatgcccagtcatcttatcacatcttaaaaccatggtgggacgtcttctggtattacatcacactgatcatgctgctggtggccgtgctggccggagctctccagctgacgcagagcagggttctgtgctgtcttccatgcaaagtggaatttgacaatcactgtgccgtgccttgggacatcctgaaagccagcatgaacacatcctctaatcctgggacaccgcttccgctccccctccgaattcagaatgacctccaccgacagcagtactcctatattgatgccgtctgttacgagaaacagctccattggtttgcaaagtttttcccctatctggtgctcttgcacacgctcatctttgcagcctgcagcaacttttggcttcactaccccagtaccagttccaggctcgagcattttgtggccatccttcacaagtgcttcgattctccatggaccacccgcgccctttcagaaacagtggctgagcagtcagtgaggcctctgaaactctccaagtccaagattttgctttcgtcctcagggtgttcagctgacatagattccggcaaacagtcattgccctacccacagccaggtttggagtcagctggcatagaaagcccaacttccagtgtcctggacaagaaggagggtgaacaggccaaagccatctttgaaaaagtgaaaagattccgcatgcatgtggagcagaaggacatcatttatagagtatatctgaaacagataatagtcaaagtcattttgtttgtgctcatcataacttatgttccatattttttaacccacatcactcttgaaatcgactgttcagttgatgtgcaggcttttacaggatataagcgctaccagtgtgtctattccttggcagaaatctttaaggtcctggcttcattttatgtcattttggttatactttatggtctgacctcttcctacagcctgtggtggatgctgaggagttccctgaagcaatattcctttgaggcgttaagagaaaaaagcaactacagtgacatccctgatgtcaagaatgactttgccttcatccttcatctggctgatcagtatgatcctctttattccaaacgcttctccatattcctatcagaggtcagtgagaacaaactgaaacagatcaacctcaataatgaatggacagttgagaaactgaaaagtaagcttgtgaaaaatgcccaggacaagatagaactgcatctttttatgctcaacggtcttccagacaatgtctttgagttaactgaaatggaagtgctaagcctggagcttatcccagaggtgaagctgccctctgcagtctcacagctggtcaacctcaaggagcttcgtgtgtaccattcatctctggtcgtagaccatcctgcactggcctttctagaggagaatttaaaaatcctccgcctgaaatttactgaaatgggaaaaatcccacgctgggtatttcacctcaagaatctcaaggaactttatctttcgggctgtgttctccctgaacagttgagtactatgcagttggagggctttcaggacttaaaaaatctaaggaccctgtacttgaagagcagcctctcccggatcccacaagttgttacagacctcctgccttcattgcagaaactgtcccttgataatgagggaagcaaactggttgtgttgaacaacttgaaaaagatggtcaatctgaaaagcctagaactgatcagctgtgacctggaacgcatcccacattccattttcagcctgaataatttgcatgagttagacctaagggaaaataaccttaaaactgtggaagagatcattagctttcagcatcttcagaatctttcctgcttaaagttgtggcacaataacattgcttatattcctgcacagattggggcattatctaacctagagcagctctctttggaccataataatattgagaatctgcccttgcagcttttcctatgcactaaactacattatttggatctaagctataaccacttgaccttcattccagaagaaatccagtatctgagtaatttgcagtactttgctgtgaccaacaacaatattgagatgctaccagatgggctgtttcagtgcaaaaagctgcagtgtttacttttggggaaaaatagcttgatgaatttgtcccctcatgtgggtgagctgtcaaaccttactcatctggagctcattggtaattacctggaaacacttcctcctgaactagaaggatgtcagtccctaaaacggaactgtctgattgttgaggagaacttgctcaatactcttcctctccctgtaacagaacgtttacagacgtgcttagacaaatgttgacttaaagaaaagagacccgtgtttcaaaatcatttttaaaagtatgctcggccgggcgtggtggctcatgcctataatcccagcactttgggaggccaagatgggcggattgcttgaggtcaggagttcgagaccagtctggccaacctggtgaaaccccatctctgctaaaactacaaaaaaattagccaggcgtggtggcgtgcgcctgtaatcccagctacttgggaggctgacgcaggggaattgcttgaaccagggaggtggaggttgcagtgagccgagattgtgccactgtacaccagcctgggtgacagagcaagactcttatctcaaaaaaaaaaaaaaaatgctccagggctttaaatgagaagtaaaattttctaagttaataaagatgaagaatgggtgactattatgatgaaccataactaaatgtcttattaaagcaactgagtgtctagccctaaattaaccaggtaaaaactgttaacactaacctgaagttttgtgaataactgttctttaacttattgagatgttgcaagaaatgcacatccagggtggactgggagctatgaaatgactaaattcctccttgcagtgtttaccttcaagattgtataggtattctctcctcttcttcccccagtccccattacttatttgcacacttgttttaactgacttcctgttttgatatttatcaccaagaccataaactcatcaatatgaattttcttgatgtatactcacgactgtctttgatttatgttcctaaatttttttagatagggtatgttgtgcttggcagaattcttttttggcttaatttttacttcctttcccagcttgcttgagtcttccttaacctggttttctcttaacaccaatgatgaaccctgagaaaatgcctgcatttggcctttgcctagaacaggagctgagtatttaagatgtattatcctcggggcatcctgaaaattaatgtattccctaaaatttcttcttgtctatcatcaaggcctttttttatttgttaagaatttttatattaaatgtaaaacatataaatattttctattgtataatcttggattcaacatctgtgaggatcatttttgtaagatacatagaatttgtgcatttctttatgaacttactgttagtgttcttggtttcggctgtttatgactcatgtttatgtacattctgctccaaaatgtttttgtactctgcaactaattacttttggataacaaaagccttgtgtttaatgccctaaagtatttgggggtttccttgtgagagggtggccgaatcatctacctctctcttccatagttgctgtgcaatcgtacgggtaaaattcttaattacttacaaaaactgtgatagaggggagaggtacagatttggtttttaaattgattttaaaatactttatagaaatttagtaagagttaaagcaaaagactttttttccctccatctatgtaatctctagctatgattataatgtaaaacagcctctattcagtgtctaaaatgagttctcaaaacccacaaagaaatagatccatttaactgaaattcatctcatgcctttatctaactcttctggaaaatacattttgctcctttttataaagagctttgtgcttggccttttattatgcatatttttaatgaataaaatcaactgactcatttttgggaaatgtacatctttaatatgtttttccctaagggtctaggcattatgatgccacctcttcattttggatataactatgaagaaatctattaactgcacctacacaaaactggaaaacactataggtaaacagtactgtgtatatggaattgtggtgcgtggtatgtgttttctcttgctttgttccagaaagatgaaagtgagtctttaaagcatagcaaatagagcttcccctcacctgccacacactcctgcactaaagttcaaagaaaagaattattcaaatcaaatgaaatttgaataatattagctatcaggaatataggacaccaaacacactgcctcacacattattgtttattctgaacggaaaggaacagtgtaaaaataaactacttaccaaaacttgcctttagtcagaacattcagctctcagggaagcaggtataactgatgaaacttctaggacttcagaaaacagattctaattatatccatgtttttcgttgttattttcattttttaaagtgtgagttgatgtttattttagtgtttcacaatagaattatcatgtatactgattccagtgtggcatgtgattaagttttggacatgaatatgccaaaagtgcttaaatgtttttggccacataactagctagaatttcaaaacaaaattcagatttgctaccattcacctgacgaacttctccatggctcgtcactggtttggttcaactgcagaagtcattggctaaattttccttatcacctacgtaaatttctagaagaatttactagcaggattaataatgaatattataaactgctttccacacactagggtataattattggtgcaatctatgttgttcttgatgccatggttttacatcttttaatttaaaccttatacaccagtgtttaggtcgcttttgagacaaggtagccctgatgcaaggaaaaatgaggctactacttcacataaaaaatagggtgttaataccacctttactgtactgttggagcagatctttattttacaagtgttcatattcacataagagaattttaaatgaagaaaattaagtttgttaaattataattatgagactttcgttggcatttgatttcaagaatacatatgcattttccaaaaaataaatgtggaggttattcagaacaaaattcatagcttacggtagtaatggcatggattaattttatttgcatgcacacacagacacacatacttcatatatgcaaattatagcattagtttttgatatatctagtggtttttttttcaaaattgcaggaggttgtagattaaattaagtatgatagcacgttttttaattcattaatcatgaagtgctctgttccctaagttatgacatttagaagaaatcacatgctcaaccttaatctgagaacctaagtgtttttgagcattccagtaaaggagtagtgttcttttcctaacttacatcagggtacatctgtgtggcacacagatactatcttttcattcttcactcccagtcttaatttctttcccctgtatgtcactgtattttatgtcacttcacattgtgttaaacagggtaaatagagatcctcagtatctcagtgctgtggcatagctccaataggtgtgctgtggtgcactgcagtgatgtatttgcataacattgtttgatagtgaaaaattttttttcggttcaagtgttttgtgattaaaattttatgtttaattaaaatattgcataatattgatgggttcaaaaaccattaaaataatcaaacaattattctgtgcccttaacattattttcttgtgttttcaataaaattttcttttcatctttccatcttcacattctcttagcatcatcctatgcacataaggtatgttgttttccttctccactcacctaccgcactaaatttgatcagcaattgtacagtaacagaatatatttgtgccagaagatttgcaatgatatttgagcatgtatttatttaggaggaagccagtgcctgtaattatgtctcattgagtagttttactttgcccatcctgcagtatttagagctgatctgtacccaaagcaggacaatgtaactgtagatctgctttgttttcagtaactgtacattgcatcagaatctgtttatttctatctggaaacagacagaatggtgggggagggaaggagttattttgcatcctagtttgtattatgaagtcatcatatatatatttgaaatagtataagctaattactgttgcagaatgccctcgatataattatttcttttcagctggatgtgaaaagctgaagcagtgaaaacctgcagtcttatttcactggtttccttctgtttcttgtccatcacttctgtatccacagggagctatctactacatacctttggtaacaggctacattctcttcagattttttatatgaataatttcatcagcactaaagcattaacatagaataatgagccaaagtactgagtcgagatggctttcagttgagtttaatttcatatttaacttttgcatttaacttgtataatacactactgctgagaaaaacaattatgaatgccttctgcatgttgtacattatctctaacagagatggtgcaattttaagaatacaaaggggtatagagttagaatggatgtgttcgtgcatatatatgttgtatttaaatattaatgtttacaagaagattttttttaaattcttcaaatacttcacttagtgaaataatgggccaatctggaatagagacattttatttggttagtgcaagagtgaaagctagcatttgttaaccttcacatatttatctgtgtacaattgtttttgcttctggtaatgaattattagaaaatggaagattttgttcaatgtttttggccctcaggtttactgtgtaaatctgcatttttggtggtaaatccctttgccacagattcagtagcttttggtaaacttcactgtttttaaagtaccttttgtgtaaaataaagatccaatttttataacaaatggcaaataaaaacagtaaatgctgg

SEQ ID NO: 15871 - DNA, 763 bp, Homo sapiens
  source 1..763: mol_type = unassigned DNA
agcggaacgcgtcgcgtcacaatggagccggtcggaggcggcgagccggacagcgccggggcttcccgctgagcccgcagcctccggcagccgggaaagtgcgggcgcggggccgcagcctgcccgcccggagcggcccaggagcacgccgcggggagcgcgggcgtccggggctggagtcgcgcagaatcctcagagtgaaaacaccaacagtaatagttaacctcttctgtgagaagtcagaaggtgatctctttaatgctttctttttaagaatttttcaaattgagactaattgcagaggttccagttgaccagcattcataggaatgaagacaaacacagagatggtgtgtctaagaaacttcaaaaggtgtagacctcctgactgaagcatattggatttatttaatttttttcactgtatttctgtcctcctacaagggaaagtcatgattacactaactgagctaaaatgcttagcagatgcccagtcatcttatcacatcttaaaaccatggtgggacgtcttctggtattacatcacactgatcatgctgctggtggccgtgctggccggagctctccagctgacgcagagcagggttctgtgctgtcttccatgcaaagtggaatttgacaatcactgtgccgtgccttgggacatcctgaaagccagcatgaacacatcctctaatcctgggacaccgcttccgctccccctccgaattcagaatgacctccaccgacagcagtactccta

SEQ ID NO: 15872 - DNA, 1957 bp, Homo sapiens
  source 1..1957: mol_type = unassigned DNA
tccagttgaccagcattcataggaatgaagacaaacacagagatggtgtgtctaagaaacttcaaaaggtgtagacctcctgactgaagcatattggatttatttaatttttttcactgtatttctgtcctcctacaagggaaagtcatgattacactaactgagctaaaatgcttagcagatgcccagtcatcttatcacatcttaaaaccatggtgggacgtcttctggtattacatcacactgatcatgctgctggtggccgtgctggccggagctctccagctgacgcagagcagggttctgtgctgtcttccatgcaaagtggaatttgacaatcactgtgccgtgccttgggacatcctgaaagccagcatgaacacatcctctaatcctgggacaccgcttccgctccccctccgaattcagaatgacctccaccgacagcagtactcctatattgatgccgtctgttacgagaaacagctccattggtttgcaaagtttttcccctatctggtgctcttgcacacgctcatctttgcagcctgcagcaacttttggcttcactaccccagtaccagttccaggctcgagcattttgtggccatccttcacaagtgcttcgattctccatggaccacccgcgccctttcagaaacagtggctgagcagtcagtgaggcctctgaaactctccaagtccaagattttgctttcgtcctcagggtgttcagctgacatagattccggcaaacagtcattgccctacccacagccaggtttggagtcagctggcatagaaagcccaacttccagtgtcctgacagaaggagggtgaacaggccaaagccatctttgaaaaagtgaaaagattccgcatgcatgtggagcagaaggacatcatttatagagtatatctgaaacagataatagtcaaagtcattttgtttgtgctcatcataacttatgttccatattttttaacccacatcactcttgaaatcgactgttcagttgatgtgcaggcttttacaggatataagcgctaccagtgtgtctattccttggcagaaatctttaaggtcctggcttcattttatgtcattttggttatactttatggtctgacctcttcctacagcctgtggtggatgctgaggagttccctgaagcaatattcctttgaggcgttaagagaaaaaagcaactacagtgacatccctgatgtcaagaatgactttgccttcatccttcatctggctgatcagtatgatcctctttattccaaacgcttctccatattcctatcagaggtcagtgagaacaaactgaaacagatcaacctcaataatgaatggacagttgagaaactgaaaagtaagcttgtgaaaaatgcccaggacaagatagaactgcatctttttatgctcaacggtcttccagacaatgtctttgagttaactgaaatggaagtgctaagcctggagcttatcccagaggtgaagctgccctctgcagtctcacagctggtcaacctcaaggagcttcgtgtgtaccattcatctctggtcgtagaccatcctgcactggcctttctagaggagaatttaaaaatcctccgcctgaaatttactgaaatgggaaaaatcccacgctgggtatttcacctcaagaatctcaaggaactttatctttcgggctgtgttctccctgaacagttgagtactatgcagttggagggctttcaggacttaaaaaatctaaggaccctgtacttgaagagcagcctctcccggatcccacaagttgttacagacctcctgccttcattgcagaaactgtcccttgataatgagggaagcaaactggttgtgttgaacaacttgaaaaagatggtcaatctgaaaagcctagaactgatcagctgtgacctggaacgcatcccacattccatt

SEQ ID NO: 15873 - DNA, 7218 bp, Homo sapiens
  source 1..7218: mol_type = unassigned DNA
gtccgcggccggggaggcggaggggaggagggcttgcggggctggggcgttagctgcgtcccggctggaagcccgcgaagagaagtaggaggaaggcgccgccgtggccgcggccgcagtgctcgggcgcgacaagccatgagcagcgaccccgcgggcgacgccgccgtccctggcagccgctgagcccgacccccaggcagctcgccgctccctagcaccttctccagtcgacactctcgcgcccggagaaacatgattcccgtgacagaattccggcagttctctgagcagcagcctgccttccgagtgctgaagccatggtgggatgtgtttaccgattacctctcagtagccatgctcatgatcggcgtgtttggatgtactttacaggtcatgcaagacaagataatctgccttccgaaaagagtgcagcctgctcagaaccactcttccctttcgaatgtctctcaagcagttgccagtaccactccactgcctccacctaaaccatctcctgctaaccccatcactgtggaaatgaaaggcctgaagacagatttggaccttcagcagtacagctttataaatcagatgtgttatgagcgagccctccactggtatgccaagtatttcccttaccttgtcctcatccataccctggtctttatgctctgcagtaacttttggttcaaattccctggttccagctccaaaatagaacatttcatctccattctggggaagtgttttgactctccttggaccacacgggctttatctgaagtgtctggggaggactcagaagaaaaggacaacaggaagaacaacatgaacaggtccaacaccatccaatctggtccagaagacagcctggtcaactctcagtctttaaagtccattcctgagaagtttgtagttgataaatccactgcaggggctctggataaaaaggaaggtgagcaggctaaggccttatttgagaaggtgaagaagttcaggctgcatgtggaagaaggtgatattctatatgccatgtatgttcgccagactgtacttaaagttatcaaattcctaatcatcattgcatataatagtgctctggtttccaaggtccagtttacagtggactgtaatgtggacattcaggacatgactggatataaaaacttttcttgcaatcataccatggcacacttgttctcaaaactgtccttttgctatctgtgctttgttagtatctatggattgacgtgcctttataccttatactggctgttctaccgttctctacgggaatattcctttgagtatgtccgtcaggagactggaattgatgatattccagatgtgaaaaatgactttgcttttatgcttcatatgatagatcagtatgaccctctctattccaagagatttgcagtgttcctgtctgaagtcagtgaaaacaaattaaagcagctgaacttaaataacgaatggactcctgataaactgaggcagaagctacagacaaatgcccataatcgactggaattgcctcttatcatgctctctggccttccagacactgtttttgaaatcacagagttgcaatctctaaaacttgaaatcattaagaacgtaatgataccagccaccattgcacagctagacaatcttcaagagctctctctgcaccagtgttctgtcaaaatccacagtgcggcgctctctttcctgaaggaaaacctcaaggtcttgagcgtcaagtttgatgacatgagggaactccccccctggatgtatgggctccgaaatctggaagagctgtacctagttggctctctaagtcatgatatttccagaaatgtcacccttgagtctctgcgggatctcaaaagccttaaaattctctctatcaaaagcaacgtttccaaaatccctcaggcagtggttgatgtttccagccatctccagaagatgtgcatacataatgatggcaccaagctggtgatgctcaacaacttaaagaagatgaccaatctgacagagctggagctggtccactgtgacctggagcgtattcctcatgctgtgttcagcctactcagcctccaggaattggacctgaaggaaaacaatctgaaatctatagaagaaatcgttagctttcagcacttaagaaagttgacagtgctaaaactgtggcataacagcatcacctacatcccagagcatataaagaaactcaccagcctggaacgcctgtcctttagtcacaataaaatagaggtgctgccttcccacctcttcctatgcaacaagatccgatacttggacttatcgtacaatgacattcgatttatcccccctgaaattggagttctacaaagtttacagtatttttccatcacatgtaacaaagtggaaagccttccagatgaactctacttctgcaagaaacttaaaactctgaagattggaaaaaacagcctatctgtactttcaccgaaaattggaaatttgctatttctttcctacttagatgtaaaaggtaatcactttgaaatcctccctcctgaactgggtgactgtcgggctctgaagcgagctggtttagttgtagaagatgctctgtttgaaactctgccttctgacgtccgggagcaaatgaaaacagaataacttatttttcgttaaagtttgactgaaacacgcttctaccaaatacagtataaataattaggtagtcttaatgcctttcctatttttttttccttttcacacaaaatgtacacaaagatcgcgtaaggagtatgtatttttaataaaaatttaattgtattttttcaatattaatattttgaagttttatttgtcttgaaacacaatgtatctattatctactgacagaaagagatagttccatttggttttttgtttttgttttttagttcattcttgtggaaaggagggaattataagttgcatgctttttggcattttttaaatagaggaagatattttgccaaggccatttttaacttgtttacacctgtacagggttcttatttttgttttcattgtgtgtgtatcaaggaatctgtgctagttattttaataccagctgtcttctccattggccaagaccttcattcagtggaacttcacataagtgcattgtcatagagtattttaaatgttcccctgcctccaacaaaaccctaaactgtgttatttcatatacctgacagttattgttatccttaggcaaggtttttgtgagtgaagaaaataatctttagtggctggtatgtttgaattaggcctttatcatttaacttatttgcattttaccaacattttaaaaatatttaaaacctaaatacagaggctcctcccaccttaatctcaatactgctatgtagtactggtgaacaactttggagaacctagatttattttaatattctaatagataattaaattttaaaatgatagaagcctggtttttgagtaatttaatcatctttcatatcttgatatgcagctgcatcagatggaaaaaaatttactaaagcaccctgttaaagagctggtgtgctccagtgaggccctctccttttctcagcacagtgtggcagtggtaatctattcaaattttgcctgttacacaaaataatccacttatatatacagtcagccttccgtacttgtgggttctgcatctgtggattccaccaactgtagatggaaaatactcaaaaagaaagttgtgtctgtactgaatatgtacagactttttccttgtcattattccctaaacaatacagcgtaacaactatttaaataggatttacattgttttaggtattataaattacctagagatgatttaaagtatatgggaggatgtgcataggttatatgcaatttctgcaccattttatgtcaaggattttgaacatcctcagattttggtgttcgagggcatcctggaatcaattccccatgataccgagggatgactggatattaatcgatttccctcaagcctgcccttgctgtgaactagtgctacaagcacgggaaatccatctgctctctggcttaaaatatgtatctcatctaaaattgttcgttaaagtgtgaataaattgctaagtggttgttgcttagcaataatttttgcctgaccatcagcagagcttttatttacctttgtaattaaaatccaacatagcatgggctcttgggcaaaatatttcactgactattaagcatgtagaacaggaaaatgaaatacactatttgtgcccttgacctagaaccagaaccactaattatgagaactttgttttatgtaccaaattcacattgaccattttctgagctctagactgatcgtagtaagttttgtgacttaacaatgaaagaaagtagaaagatgctttgggttttcaaaatgttgttttttaaaattgttctttgggtgaatttactcagtgctgctttgagttgtatacagaaacaaatgttgggaattgctcctcagaaatgtgttcctaagttgtgttttcaactttacatcatgaggtgaagcattagggaaagagattctttcgatttgtttaataatctaattatacagaccaaagtgctttacgtttctgctctatgttaatgttttagaatggtgattttgctgattaatttagacctggaattgaaataatgtgctcagaataataacatggttatagttcttgtatgataaagtattcaatttcagaatagtgttggaatcctgagtttgaataatgtgttgtatttagaaacatagccctatctgttttaaacaaataatttgttggccgattgtccatggttgagcatgacaaaaatacctcgtcgaaaggcaagcttaggtaactgctggcaaaacactgggtgcactatttttctggataaaatttatagttattttctatattacccttcaaaagggatctcttcaggttaaaaatcacgcttatgctgaagtctttatctggtgttaactaaaaatctcatatgggttcataaccgaggtcactaataattcatttttatcacttgtaaaaatttgctcaaaattccaaaaaaatattgatttgttttttagtgattttgcaggctgacccccaacctaagttttgataacatctggtaagtcagtatagttctgtgacttcatgttttaactaagaaggaaaattcatagatattcctattagattttataaaccttcaaaagtctgaaacttaattttgagtctaaattttctgacactggccccttttaatattgtaagtttttgttcactttcttaagtaaaaaaaacatttaattactagttagcccttaactgggaaactcaggtaatgaactgctgacttttctaaagttctttaactgatcaattctgtatagagggatatttatctaaccactttccgtattttacaagtgctctttctaaaaaggaataactattatagctctatttccccaatctctataggactcatgagagattgcttgtgtaaatataaaagcaccatatgtgttcttaactcctatggctgcttgaagctcatgatgaaaaagtctttttgtcagttttaattgttaagtacagaacaaacaattgtttggtgatggcctggttgaaagagagcatataaatatatcccagtggaactcaccaaagaagaccacacctcagaaattattgcattttctcattatgtgttgggtttgatttgcttttgtttttaatgcagctcttttaatataaagattcttgatacagtgaaatctcttatttcaagtgtaagttattcttcacccaccccttcccctgccattgtatttcccatctgtttcaaggagtttcaacaatttacattgcatcgtatgcagtaggtactgctttttcagaaagacctggaaaacatacctgctatgaatattttgttcagatgtagccatttacctggctctcaagttgtctttgtggagagggtcttagacaaaaatcttccttgtatttacttgggttaagtgaagtccaaattcttacagtatgctatttcaggatttctgatattaaaaaagaaaaaacaaaatctttatatctcttattaacacttcccccaagaagggttgtgctgttatttattttctattataagaaaagttcattctttaagtagtttcttttacctctaatctaatttcataccaaatacctgatcaatagaaatgatatatttaagcagcaaagattcctaatccatcattatgaaaagtgtcagcatacttagtagtgaacagataaagtcaatttgaatataattccactttgtttttagagactaaattaagattcaattaacattatcctatgaattctgaatgtgataatgtgattcaaacagtcaaattttattaagctcttagtaactcaggatagcattccatactaacctcaagttagcaaaacaaattagttaaacagcttggttcttagcagactgcttaaaagatcaagaaaattttctcatcttttctttctacttagaaacattgcaagaaaccttggacagtcttcaccagacctgccatgattttataagatttaggcctcagtgacatgctcctgaaagtttcctgccagccatccaaactaagcatccactcattccatcttcccaaagtcactcaccgataaaggtagcatccttaagttcatttttgaaaggtggaggaggatctccccctgcccaaaggaatttttttatcagaataccttgaaaggggggtatataaatttggaaaacttaatttcttggctgtgtttgataacagttcctatgcatggtttttaatgtgaggtaaatttgtttctttcttcagaatacctctctccaccccccaccttattcttcctctttaatgaatatttttattggagctcaaactccatgacttacgtgctcactaagttttcttttttccccttgtttactctgtctgtatgtatgtcaaaagctggcaaaacctctaaaactgtcaagaaaatgcttgaaagttgatttgtcatagtgcaaattcatgataaaatgtcttaatgttatttggatatgtagtacatagaaacagaaaaataaagtcatttttataacttaaaa

SEQ ID NO: 15874 - DNA, 3950 bp, Homo sapiens
  source 1..3950: mol_type = unassigned DNA
aattcccctcgttacagagtcatgtgctgctgctcccgtcgccgctgctgccgctgccgctgccgccgcccgtggtgccccggctcctccgccgcgcttcgaggtggcagccgcgggcggggccgcgggagcagggtccagggtgcagcgcgccttcgccgccccggcgcgtcccggtgcagccgccgcccgccgcgggtgatgccgccacctccggcctcagcataagccgtggcttggcggccgagctgcaccccaaggaagtgcacggctgtctataacgtgctgccgggtctcaggatggaggagtgaagtctcctgtcgccgtggttccagcctccggagctcgcccaagccgcgtccccagagagcgccctgagagaacagggtggccgcttggtccaggaatgtttacccttgcggaagttgcatcacttaatgacattcagccaacttaccgaatcctgaaaccatggtgggatgtgtttatggattacctagctgttgttatgttaatggtagccatctttgcaggaaccatgcaacttaccaaagatcaggtggtctgtttgccagtattgccatctcctgtaaattcaaaggcacatacaccaccaggaaatgccgaggtcaccaccaacatcccaaagatggaagcagccaccaaccaagaccaagatgggcggacaacaaacgacatttcctttgggacatctgctgtgacacctgacatacctctcagagccacatatcctcgcacagatttcgcacttccaaatcaggaggcaaagaaagagaagaaagatccaacaggtcgaaaaacaaacttggattttcagcaatatgtatttattaatcaaatgtgttaccatctggcccttccgtggtattctaagtactttccatacctagctcttatacatactattattctcatggtcagtagcaacttttggttcaaatatcccaaaacatgctcaaaagtagaacattttgtttcaatattaggaaagtgctttgaatccccttggacgacaaaagcgttgtctgagacagcatgcgaagactcagaggaaaacaagcagagaataacaggtgcccagactctaccaaagcatgtttctaccagcagtgatgaagggagccccagtgccagtacaccaatgatcaataaaactggctttaaattttcagctgagaagcctgtgattgaagttcccagcatgacaatcctggataaaaaggatggagagcaggccaaagccctgtttgagaaagtgaggaagttccgtgcccatgtggaagatagtgacttgatctataaactctatgtggtccaaacagttatcaaaacagccaagttcatttttattctctgctatacagcgaactttgtcaacgcaatcagctttgaacacgtctgcaagcccaaagttgagcatctgattggttatgaggtatttgagtgcacccacaatatggcttacatgttgaaaaagcttctcatcagttacatatccattatttgtgtttatggctttatctgcctctacactctcttctggttattcaggatacctttgaaggaatattctttcgaaaaagtcagagaagagagcagttttagtgacattccagatgtcaaaaacgattttgcgttccttcttcacatggtagaccagtatgaccagctatattccaagcgttttggtgtgttcttgtcagaagttagtgaaaataaacttagggaaattagtttgaaccatgagtggacatttgaaaaactcaggcagcacatttcacgcaacgcccaggacaagcaggagttgcatctgttcatgctgtcgggggtgcccgatgctgtctttgacctcacagacctggatgtgctaaagcttgaactaattccagaagctaaaattcctgctaagatttctcaaatgactaacctccaagagctccacctctgccactgccctgcaaaagttgaacagactgcttttagctttcttcgcgatcacttgagatgccttcacgtgaagttcactgatgtggctgaaattcctgcctgggtgtatttgctcaaaaaccttcgagagttgtacttaataggcaatttgaactctgaaaacaataagatgataggacttgaatctctccgagagttgcggcaccttaagattctccacgtgaagagcaatttgaccaaagttccctccaacattacagatgtggctccacatcttacaaagttagtcattcataatgacggcactaaactcttggtactgaacagccttaagaaaatgatgaatgtcgctgagctggaactccagaactgtgagctagagagaatcccacatgctattttcagcctctctaatttacaggaactggatttaaagtccaataacattcgcacaattgaggaaatcatcagtttccagcatttaaaacgactgacttgtttaaaattatggcataacaaaattgttactattcctccctctattacccatgtcaaaaacttggagtcactttatttctctaacaacaagctcgaatccttaccagtggcagtatttagtttacagaaactcagatgcttagatgtgagctacaacaacatttcaatgattccaatagaaataggattgcttcagaacctgcagcatttgcatatcactgggaacaaagtggacattctgccaaaacaattgtttaaatgcataaagttgaggactttgaatctgggacagaactgcatcacctcactcccagagaaagttggtcagctctcccagctcactcagctggagctgaaggggaactgcttggaccgcctgccagcccagctgggccagtgtcggatgctcaagaaaagcgggcttgttgtggaagatcacctttttgataccctgccactcgaagtcaaagaggcattgaatcaagacataaatattccctttgcaaatgggatttaaactaagataatatatgcacagtgatgtgcaggaacaacttcctagattgcaagtgctcacgtacaagttattacaagataatgcattttaggagtagatacatcttttaaaataaaacagagaggatgcatagaaggctgatagaagacataactgaatgttcaatgtttgtagggttttaagtcattcatttccaaatcatttttttttttcttttggggaaagggaaggaaaaattataatcactaatcttggttctttttaaattgtttgtaacttggatgctgccgctactgaatgtttacaaattgcttgcctgctaaagtaaatgattaaattgacattttcttactatatcaccttttttgaggggtcttaatttactttgcttaattggtgcaatattgctttaactccgttcactaaagacaaacacatcaagtccaaacttgtaaatttagatttgctgaaatactgatttatttcctgttttaatttaaagtgcctcaagtaagcacctctcacaacagttgactggtactgctgctcctgagcacctcgtgtcatagattttatactcttacagacttggaatgcagtagaggtatgtggatttttaggggttttgtttttttaagaataagtaacaagaaataacacatttcttaataatagcttttttgacatagtttggagttctgattatatggtacatttttctaccagtaatatagggttgccaataaatagaaaatgttttctaaaaataaattttattacaacaaaataaaaattttaatgacttattaacacaacctccagtatcaccaccatttggaagataacacagaatcacaagtatcatttaatttcttgcccttttcagtgttgttctggtgttggtgggaaaataataggaaatgtagttcattgggtagggaaactcttacctttccctatcttaat

SEQ ID NO: 15875 - DNA, 3345 bp, Homo sapiens
  source 1..3345: mol_type = unassigned DNA
ataatccgcttctagcttgtttggaggcgtgggctcttgggagcgggacttctgctcaaatcctgtccaggggcttgaaaaggaggagaattgggggtggttgccgggaggaccagcacctccagttactggagggttgataggggccttctcctttccgtcaccctttactagggggtatcccttgcagataaatgagattttttgatttcttaaaaagccagctgcagtgaagaagaactgctgcaggtcgaggggaagagaggaagtgcacggctgtctataacgtgctgccgggtctcaggatggaggagtgaagtctcctgtcgccgtggttccagcctccggagctcgcccaagccgcgtccccagagagcgccctgagagaacagggtggccgcttggtccaggaatgtttacccttgcggaagttgcatcacttaatgacattcagccaacttaccgaatcctgaaaccatggtgggatgtgtttatggattacctagctgttgttatgttaatggtagccatctttgcaggaaccatgcaacttaccaaagatcaggtggtctgtttgccagtattgccatctcctgtaaattcaaaggcacatacaccaccaggaaatgccgaggtcaccaccaacatcccaaagatggaagcagccaccaaccaagaccaagatgggcggacaacaaacgacatttcctttgggacatctgctgtgacacctgacatacctctcagagccacatatcctcgcacagatttcgcacttccaaatcaggaggcaaagaaagagaagaaagatccaacaggtcgaaaaacaaacttggattttcagcaatatgtatttattaatcaaatgtgttaccatctggcccttccgtggtattctaagtactttccatacctagctcttatacatactattattctcatggtcagtagcaacttttggttcaaatatcccaaaacatgctcaaaagtagaacattttgtttcaatattaggaaagtgctttgaatccccttggacgacaaaagcgttgtctgagacagcatgcgaagactcagaggaaaacaagcagagaataacaggtgcccagactctaccaaagcatgtttctaccagcagtgatgaagggagccccagtgccagtacaccaatgatcaataaaactggctttaaattttcagctgagaagcctgtgattgaagttcccagcatgacaatcctggataaaaaggatggagagcaggccaaagccctgtttgagaaagtgaggaagttccgtgcccatgtggaagatagtgacttgatctataaactctatgtggtccaaacagttatcaaaacagccaagttcatttttattctctgctatacagcgaactttgtcaacgcaatcagctttgaacacgtctgcaagcccaaagttgagcatctgattggttatgaggtatttgagtgcacccacaatatggcttacatgttgaaaaagcttctcatcagttacatatccattatttgtgtttatggctttatctgcctctacactctcttctggttattcaggatacctttgaaggaatattctttcgaaaaagtcagagaagagagcagttttagtgacattccagatgtcaaaaacgattttgcgttccttcttcacatggtagaccagtatgaccagctatattccaagcgttttggtgtgttcttgtcagaagttagtgaaaataaacttagggaaattagtttgaaccatgagtggacatttgaaaaactcaggcagcacatttcacgcaacgcccaggacaagcaggagttgcatctgttcatgctgtcgggggtgcccgatgctgtctttgacctcacagacctggatgtgctaaagcttgaactaattccagaagctaaaattcctgctaagatttctcaaatgactaacctccaagagctccacctctgccactgccctgcaaaagttgaacagactgcttttagctttcttcgcgatcacttgagatgccttcacgtgaagttcactgatgtggctgaaattcctgcctgggtgtatttgctcaaaaaccttcgagagttgtacttaataggcaatttgaactctgaaaacaataagatgataggacttgaatctctccgagagttgcggcaccttaagattctccacgtgaagagcaatttgaccaaagttccctccaacattacagatgtggctccacatcttacaaagttagtcattcataatgacggcactaaactcttggtactgaacagccttaagaaaatgatgaatgtcgctgagctggaactccagaactgtgagctagagagaatcccacatgctattttcagcctctctaatttacaggaactggatttaaagtccaataacattcgcacaattgaggaaatcatcagtttccagcatttaaaacgactgacttgtttaaaattatggcataacaaaattgttactattcctccctctattacccatgtcaaaaacttggagtcactttatttctctaacaacaagctcgaatccttaccagtggcagtatttagtttacagaaactcagatgcttagatgtgagctacaacaacatttcaatgattccaatagaaataggattgcttcagaacctgcagcatttgcatatcactgggaacaaagtggacattctgccaaaacaattgtttaaatgcataaagttgaggactttgaatctgggacagaactgcatcacctcactcccagagaaagttggtcagctctcccagctcactcagctggagctgaaggggaactgcttggaccgcctgccagcccagctgggccagtgtcggatgctcaagaaaagcgggcttgttgtggaagatcacctttttgataccctgccactcgaagtcaaagaggcattgaatcaagacataaatattccctttgcaaatgggatttaaactaagataatatatgcacagtgatgtgcaggaacaacttcctagattgcaagtgctcacgtacaagttattacaagataatgcattttaggagtagatacatcttttaaaataaaacagagaggatgcatagaaggctgatagaagacataactgaatgttcaatgtttgtagggttttaagtcattcatttccaaatcatttttttttttcttttggggaaagggaaggaaaaattataatcactaatcttggttctttttaaattgtttgtaacttggatgctgccgctactgaatgtttacaaattgcttgcctgctaaagtaaatgattaaattgacattttcttactata

SEQ ID NO: 15876 - DNA, 666 bp, Homo sapiens
  source 1..666: mol_type = unassigned DNA
tcttttgagccagcgaggcacaagacaagtaatttcccatcttgaatctctcacagctgctgagctgtagtggatatactgggatgtggctatgaactttaaaaatttgcataaatccagcccctactcccctgcaaaggctcagtcttgtctttacaccttccccgaggaagtgcacggctgtctataacgtgctgccgggtctcaggatggaggagtgaagtctcctgtcgccgtggttccagcctccggagctcgcccaagccgcgtccccagagagcgccctgagagaacagggtggccgcttggtccaggaatgtttacccttgcggaagttgcatcacttaatgacattcagccaacttaccgaatcctgaaaccatggtgggatgtgtttatggattacctagctgttgttatgttaatggtagccatctttgcaggaaccatgcaacttaccaaagatcaggtggtctgtttgccagtattgccatctcctgtaaattcaaaggcacatacaccaccaggaaatgccgaggtcaccaccaacatcccaaagatggaagcagccaccaaccaagaccaagatgggcggacaacaaacgacatttcctttgggacatctgctgtgacacctgacatacctctcagagccacatatcctcg

SEQ ID NO: 15877 - DNA, 905 bp, Homo sapiens
  source 1..905: mol_type = unassigned DNA
aaaagaaagctggattgccttaccaaatctccaggtttttcgttatacctcttcactcaggctctgcccagaactcaaggaatgtttacccttgcggaagttgcatcacttaatgacattcagccaacttaccgaatcctgaaaccatggtgggatgtgtttatggattacctagctgttgttatgttaatggtagccatctttgcaggaaccatgcaacttaccaaagatcaggtggtctgtttgccagtattgccatctcctgtaaattcaaaggcacatacaccaccaggaaatgccgaggtcaccaccaacatcccaaagatggaagcagccaccaaccaagaccaagatgggcggacaacaaacgacatttcctttgggacatctgctgtgacacctgacatacctctcagagccacatatcctcgcacagatttcgcacttccaaatcaggaggcaaagaaagagaagaaagatccaacaggtcgaaaaacaaacttggattttcagcaatatgtatttattaatcaaatgtgttaccatctggcccttccgtggtattctaagtactttccatacctagctcttatacatactattattctcatggtcagtagcaacttttggttcaaatatcccaaaacatgctcaaaagtagaacattttgtttcaatattaggaaagtgctttgaatccccttggacgacaaaagcgttgtctgagacagcatgcgaagactcagaggaaaacaagcagagaataacaggtgcccagactctaccaaagcatgtttctaccagcagtgatgaagggagccccagtgccagtacaccaatgatcaataaaactggctttaaattttcagctgagaagcctgtgattgaagttcccagcatgacaat

SEQ ID NO: 15878 - DNA, 588 bp, Homo sapiens
  source 1..588: mol_type = unassigned DNA
ccatgttacgctttgtctaattcccctcgttacagagtcatgtgctgctgctcccgtcgccgctgctgccgctgccgctgccgccgcccgtggtgccccggctcctccgccgcgcttcgaggtggcagccgcgggcggggccgcgggagcagggtccagggtgcagcgcgccttcgccgccccggcgcgtcccggtgcagccgccgcccgccgcgggtgatgccgccacctccggcctcagcataagccgtggcttggcggccgagctgcaccccaaggaagtgcacggctgtctataacgtgctgccgggtctcaggatggaggagtgaagtctcctgtcgccgtggttccagcctccggagctcgcccaagccgcgtccccagagagcgccctgagagaacagggtggccgcttggtccaggagtccccgggccccaggctgcagactggtacctgtcgagagctgttaggaactgggcttcacggcagtaggaatgtttacccttgcggaagttgcatcacttaatgacattcagccaacttaccgaatcctgaaaccatggtgggatgtgtttatggattacct

SEQ ID NO: 15879 - DNA, 922 bp, Homo sapiens
  source 1..922: mol_type = unassigned DNA
agggggggcccgggccgaggccgcgccacctcggcaccacgcgggcagccggtgcggcggggtcgccacggccaggggagcgctgggtgcccaccatggcagttatgcaagcggtgaccccctggtcttgcctccccgccgccctgcactccttcctccccgctgccgacacttggatctctctagctctttctctcccctgtgttttcaaacaggaagtgcacggctgtctataacgtgctgccgggtctcaggatggaggagtgaagtctcctgtcgccgtggttccagcctccggagctcgcccaagccgcgtccccagagagcgccctgagagaacagggtggccgcttggtccaggaatgtttacccttgcggaagttgcatcacttaatgacattcagccaacttaccgaatcctgaaaccatggtgggatgtgtttatggattacctagctgttgttatgttaatggtagccatctttgcaggaaccatgcaacttaccaaagatcaggtggtctgtttgccagtattgccatctcctgtaaattcaaaggcacatacaccaccaggaaatgccgaggtcaccaccaacatcccaaagatggaagcagccaccaaccaagaccaagatgggcggacaacaaacgacatttcctttgggacatctgctgtgacacctgacatacctctcagagccacatatcctcgcacagatttcgcacttccaaatcaggaggcaaagaaagagaagaaagatccaacaggtcgaaaaacaaacttggattttcagcaatatgtatttattaatcaaatgtgttaccatctggcccttccgtggtattctaagtactttccatacctagctcttatacatactattattctcatggtcagtagcaacttttggttcaaatatcc

SEQ ID NO: 15880 - DNA, 597 bp, Homo sapiens
  source 1..597: mol_type = unassigned DNA
acaatagccatgtgtgtcaggcagtgagctgaccagcaagtcctttgtgagtcttggaatgcattttccatgggtgggtggtgaggaagtgcacggctgtctataacgtgctgccgggtctcaggatggaggagtgaagtctcctgtcgccgtggttccagcctccggagctcgcccaagccgcgtccccagagagcgccctgagagaacagggtggccgcttggtccaggaatgtttacccttgcggaagttgcatcacttaatgacattcagccaacttaccgaatcctgaaaccatggtgggatgtgtttatggattacctagctgttgttatgttaatggtagccatctttgcaggaaccatgcaacttaccaaagatcaggtggtctgtttgccagtattgccatctcctgtaaattcaaaggcacatacaccaccaggaaatgccgaggtcaccaccaacatcccaaagatggaagcagccaccaaccaagaccaagatgggcggacaacaaacgacatttcctttgggacatctgctgtgacacctgacatacctctcagagccacatatcctcgcacagatttcgcact

SEQ ID NO: 15881 - DNA, 3600 bp, Homo sapiens
  source 1..3600: mol_type = unassigned DNA
gactcaccctcgcggcccgcccgggaactctgcgggagtcgcggcagctccgctcccagagacccaggagttgggcccagcgtccctcccggaacggcagcatgatcccagtggccgagttcaagcagttcacggaacagcagcctgcgttcaaggtgctcaaaccctggtgggacgtgctggccgagtacctcaccgtggccatgctcatgattggggtctttggctgcaccctccaggtgacacaggacaagatcatctgtctacccaatcatgagctccaggagaacttatcagaggccccgtgccagcaattgctgcctcgggggatccctgagcagattggggccctgcaggaggttaaaggccttaagaacaatttggacctgcagcaatacagctttattaaccagctgtgttatgagacggccctgcactggtatgccaagtacttcccttacctcgtggtcattcacacactcatcttcatggtctgcaccagtttctggttcaagttccctggcaccagctccaagattgaacacttcatctccatcctgggcaagtgtttcgactctccatggaccaccagggccctatccgaggtatccggggagaaccagaagggcccagcagccaccgaacgggctgcggccaccatagtggccatggcagggaccgggccggggaaggcaggggagggtgagaaggagaaagtgctggcggaaccggagaaggtggtgaccgagcctccagttgtcaccctgttggacaagaaggagggtgagcaagccaaagccctgtttgagaaggtgaagaagttccgcatgcacgtggaagagggcgacatcctgtacaccatgtacatccgacagacggtgctgaaagtgtgtaagttcctggccatcctggtctacaacctggtctatgtggagaagatcagtttcctggtggcctgtagggtggagacgtcagaggtcacgggctacgccagcttctgctgcaaccacaccaaggcccacctcttctccaagctggccttctgttacatctcctttgtgtgcatctacggacttacctgcatctacacgctctactggctcttccaccggcccctcaaggagtactccttccgttccgtgcgggaggagactggcatgggggacattcctgacgtcaagaatgacttcgccttcatgctgcacctcatcgatcagtacgactccctctactccaagcgcttcgccgtcttcctgtccgaggtcagcgaaagccgtctaaagcagctcaatctcaaccacgagtggacgcccgagaagcttcgacagaagctgcagcgcaatgccgcgggccggctggagctggccctctgcatgctgccgggtctgcccgacaccgtctttgagctcagtgaggtggagtcactcaggctggaggccatctgcgatatcaccttccccccggggctgtcacagctggtgcacttgcaggagctcagcttgctccactcgcccgccaggctacccttctccttgcaggtcttcctgcgggaccacctgaaggtgatgcgcgtcaaatgcgaggagctccgcgaggtgccgctttgggtgtttgggctgcggggcttggaggagctgcacctggaggggcttttcccccaggagctagctcgggcagccaccctggagagcctccgggagctgaagcagctcaaggtgttgtccctccggagcaacgccgggaaggtgccagccagtgtgaccgacgttgctggccacctgcagaggctcagcctgcacaacgatggggcccgtctggttgccctgaacagcctcaagaagctggcggcattgcgggagctggagctggtggcctgcgggctggagcgcatcccccatgcagtgttcagcctgggtgcgctgcaggaacttgacctcaaggacaaccacctgcgctccatcgaggaaatcctcagcttccagcactgccggaagctggtcacgctcaggctgtggcacaaccagatcgcctacgtccctgagcacgtgcggaagctcaggagcctggagcagctctacctcagctacaacaagctggagaccctgccctcccagctcggcctgtgctcaggcctccgtctgctggatgtgtcccacaatgggctacactccctgccacccgaggtgggcctcctgcagaacctacagcacctggccctctcctacaatgccctggaggccctgcccgaagagctcttcttctgccgcaagctgcggacgttgcttctgggcgacaaccagctgagccagctctcgccccacgtgggtgccctcagagccctcagccgcctggagctcaaaggcaaccgcttagaggcgctgccagaagaacttggcaactgtggggggctcaagaaggcggggctcctggtggaagacacgctttaccagggtctgccggcagaagtgcgggacaagatggaggaggaatgaagctggggtggggccgttttaggtagagccttaaaaatgcttctgccctggaatctcaaccattgtcttccaagataggaagccaagtgggtccaggccaggagatggggggggcgggggcagctgtgtcatctttctggggcccaggaggatctgggctggtttgtctggggagacagacaggatgttgtggagctggggtggaacctggtatggagggattaactcagtcatggcattctccgaccaaaaccacacctgtgtctctggcaggctggctggccttgctcccatccctagaactgctgcctctccctggatattccagctcaattagtgccacatatgggggaaacgacacatcccagtgggatttccaacactccccctccccatgcaacaaagcaacttacttctggagttctctcccaaggagaggacacagacacagttgtttgctgtgttatatgttagctccgaacaatggttctcatttggctaagcatcaaaatcacctagggagtcggtgcaaaacaaaatatcccagtcccctcccctgaaacactgactcaggaggtttggttgggggccaggagtctgttcctaaatattccaggtagttctggtgcaggtaagtggccctgagacagtatgttgggaaatgctgacgtaaaggtatcagggccgggcgctgtggctcatgactataatcccagctgtttgagaggccaatgcaggaggatggttgagctcaggagttcgagatcagcctgggtaacatagcgagaccccacctctgccaaaaaaaaaaaaaatagggtatccaaatatctagattctgatcccttttgaggtcctagaccctttgagaaactgatgaagccaggcacctccttcctcaggaaaatgctggtgtacaaatacacacaaagctcttcaggcagctgatagatttcccccagagagctattcaaggacttcctaaggtgggtggactgcagggttaggacacctgctatagaggtgacatttttccaaggacaagcagggactttggtcttgactgttctctgggtgcttaataaataatactaattatgcaagttct

SEQ ID NO: 15882 - DNA, 2599 bp, Homo sapiens
  source 1..2599: mol_type = unassigned DNA
actcagtgagcagtaggtgcctgtgcaagctcgcgccgcacactgcctggtggagggaaggagcccgggcgccgctcgccgctccccgcgccgccgtccgcacctccccaccgcccgccgcccgccgcccgccgcccgcaaagcatgagtgagcccgctctctgcagctgcccggggcgcgaatggcaggctgtttccgcggagtaaaaggtggcgccggtcagtggtcgtttccaatgacggacattaaccagactgtcagatcctggggagtcgcgagccccgagtttggagttttttccccccacaacgtcacagtccgaactgcagagggaaaggaaggcggcaggaaggcgaagctcgggctccggcacgtagttgggaaacttgcgggtcctagaagtcgcctccccgccttgccggccgcccttgcagccccgagccgagcagcaaagtgagacattgtgcgcctgccagatccgccggccgcggaccggggctgcctcggaaacacagaggggtcttctctcgccctgcatataattagcctgcacacaaagggagcagctgaatggaggttgtcactctctggaaaaggatttctgaccgagcgcttccaatggacattctccagtctctctggaaagattctcgctaatggatttcctgctgctcggtctctgtctatactggctgctgaggaggccctcgggggtggtcttgtgtctgctgggggcctgctttcagatgctgcccgccgcccccagcgggtgcccgcagctgtgccggtgcgaggggcggctgctgtactgcgaggcgctcaacctcaccgaggcgccccacaacctgtccggcctgctgggcttgtccctgcgctacaacagcctctcggagctgcgcgccggccagttcacggggttaatgcagctcacgtggctctatctggatcacaatcacatctgctccgtgcagggggacgcctttcagaaactgcgccgagttaaggaactcacgctgagttccaaccagatcacccaactgcccaacaccaccttccggcccatgcccaacctgcgcagcgtggacctctcgtacaacaagctgcaggcgctcgcgcccgacctcttccacgggctgcggaagctcaccacgctgcatatgcgggccaacgccatccagtttgtgcccgtgcgcatcttccaggactgccgcagcctcaagtttctcgacatcggatacaatcagctcaagagtctggcgcgcaactctttcgccggcttgtttaagctcaccgagctgcacctcgagcacaacgacttggtcaaggtgaacttcgcccacttcccgcgcctcatctccctgcactcgctctgcctgcggaggaacaaggtggccattgtggtcagctcgctggactgggtttggaacctggagaaaatggacttgtcgggcaacgagatcgagtacatggagccccatgtgttcgagaccgtgccgcacctgcagtccctgcagctggactccaaccgcctcacctacatcgagccccggatcctcaactcttggaagtccctgacaagcatcaccctggccgggaacctgtgggattgcgggcgcaacgtgtgtgccctagcctcgtggctcaacaacttccaggggcgctacgatggcaacttgcagtgcgccagcccggagtacgcacagggcgaggacgtcctggacgccgtgtacgccttccacctgtgcgaggatggggccgagcccaccagcggccacctgctctcggccgtcaccaaccgcagtgatctggggccccctgccagctcggccaccacgctcgcggacggcggggaggggcagcacgacggcacattcgagcctgccaccgtggctcttccaggcggcgagcacgccgagaacgccgtgcagatccacaaggtggtcacgggcaccatggccctcatcttctccttcctcatcgtggtcctggtgctctacgtgtcctggaagtgtttcccagccagcctcaggcagctcagacagtgctttgtcacgcagcgcaggaagcaaaagcagaaacagaccatgcatcagatggctgccatgtctgcccaggaatactacgttgattacaaaccgaaccacattgagggagccctggtgatcatcaacgagtatggctcgtgtacctgccaccagcagcccgcgagggaatgcgaggtgtgattgtcccagtggctctcaacccatgcgctaccaaatacgcctgggcagccgggacgggccggcgggcaccaggctggggtctccttgtctgtgctctgatatgctccttgactgaaactttaaggggatctctcccagagacttgacattttagctttattgtgtcttaaaaacaaaagcgaattaaaacacaacaaaaaaccccaccccacaaccttcaggacagtctatcttaaatttcatatgagaactccttcctccctttgaagatctgtccatattcaggaatctgagagtgtaaaaaaggtaccaatcattgattttttttttttttgtaaactaaaatgtttaaaataaaatagcatttacagtt

SEQ ID NO: 15883 - DNA, 2126 bp, Homo sapiens
  source 1..2126: mol_type = unassigned DNA
agatccgccggccgcggaccggggctgcctcggaaacacagaggggtcttctctcgccctgcatataattagcctgcacacaaagggagcagctgaatggaggttgtcactctctggaaaagggtggatttctgaccgagcgcttccaatggacattctccagtctctctggaaagattctcgctaatggatttcctgctgctcggtctctgtctatactggctgctgaggaggccctcgggggtggtcttgtgtctgctgggggcctgctttcagatgctgcccgccgcccccagcgggtgcccgcagctgtgccggtgcgaggggcggctgctgtactgcgaggcgctcaacctcaccgaggcgccccacaacctgtccggcctgctgggcttgtccctgcgctacaacagcctctcggagctgcgcgccggccagttcacggggttaatgcagctcacgtggctctatctggatcacaatcacatctgctccgtgcagggggacgcctttcagaaactgcgccgagttaaggaactcacgctgagttccaaccagatcacccaactgcccaacaccaccttccggcccatgcccaacctgcgcagcgtggacctctcgtacaacaagctgcaggcgctcgcgcccgacctcttccacgggctgcggaagctcaccacgctgcatatgcgggccaacgccatccagtttgtgcccgtgcgcatcttccaggactgccgcagcctcaagtttctcgacatcggatacaatcagctcaagagtctggcgcgcaactctttcgccggcttgtttaagctcaccgagctgcacctcgagcacaacgacttggtcaaggtgaacttcgcccacttcccgcgcctcatctccctgcactcgctctgcctgcggaggaacaaggtggccattgtggtcagctcgctggactgggtttggaacctggagaaaatggacttgtcgggcaacgagatcgagtacatggagccccatgtgttcgagaccgtgccgcacctgcagtccctgcagctggactccaaccgcctcacctacatcgagccccggatcctcaactcttggaagtccctgacaagcatcaccctggccgggaacctgtgggattgcgggcgcaacgtgtgtgccctagcctcgtggctcaacaacttccaggggcgctacgatggcaacttgcagtgcgccagcccggagtacgcacagggcgaggacgtcctggacgccgtgtacgccttccacctgtgcgaggatggggccgagcccaccagcggccacctgctctcggccgtcaccaaccgcagtgatctggggccccctgccagctcggccaccacgctcgcggacggcggggaggggcagcacgacggcacattcgagcctgccaccgtggctcttccaggcggcgagcacgccgagaacgccgtgcagatccacaaggtggtcacgggcaccatggccctcatcttctccttcctcatcgtggtcctggtgctctacgtgtcctggaagtgtttcccagccagcctcaggcagctcagacagtgctttgtcacgcagcgcaggaagcaaaagcagaaacagaccatgcatcagatggctgccatgtctgcccaggaatactacgttgattacaaaccgaaccacattgagggagccctggtgatcatcaacgagtatggctcgtgtacctgccaccagcagcccgcgagggaatgcgaggtgtgattgtcccagtggctctcaacccatgcgctaccaaatacgcctgggcagccgggacgggccggcgggcaccaggctggggtctccttgtctgtgctctgatatgctccttgactgaaactttaaggggatctctcccagagacttgacattttagctttattgtgtcttaaaaacaaaagcgaattaaaacacaacaaaaaaccccaccccacaaccttcaggacagtctatcttaaatttcatatgagaactccttcctccctttgaagatctgtccatattcaggaatctgagagtgtaaaaaaggtaccaatcattgattttttttttttttgtaaactaaaatgtttaaaataaaatagcatttacag

SEQ ID NO: 15884 - DNA, 578 bp, Homo sapiens
  source 1..578: mol_type = unassigned DNA
cttgcagccccgagccgagcagcaaagtgagacattgtgcgcctgccagatccgccggccgcggaccggggctgcctcggaaacacagaggggtcttctctcgccctgcatataattagcctgcacacaaagggagcagctgaatggaggttgtcactctctggaaaagggtggctttctgcatgcttagagatttctgaccgagcgcttccaatggacattctccagtctctctggaaagattctcgctaatggatttcctgctgctcggtctctgtctatactggctgctgaggaggccctcgggggtggtcttgtgtctgctgggggcctgctttcagatgctgcccgccgcccccagcgggtgcccgcagctgtgccggtgcgaggggcggctgctgtactgcgaggcgctcaacctcaccgaggcgccccacaacctgtccggcctgctgggcttgtccctgcgctacaacagcctctcggagctgcgcgccggccagttcacggggttaatgcagctcacgtggctctatctggatcacaatcacatctgctccgtgcagggggacgccttt

SEQ ID NO: 15885 - DNA, 879 bp, Homo sapiens
  source 1..879: mol_type = unassigned DNA
ccgctctctgcagctgcccggggcgcgaatggcaggctgtttccgcggagtaaaaggtggcgccgcatctaacatggaccaaatcaccatctctttgatctttccgtggctgtgaactttctatgctgcccagctttctgcatgcttagagatttctgaccgagcgcttccaatggacattctccagtctctctggaaagattctcgctaatggatttcctgctgctcggtctctgtctatactggctgctgaggaggccctcgggggtggtcttgtgtctgctgggggcctgctttcagatgctgcccgccgcccccagcgggtgcccgcagctgtgccggtgcgaggggcggctgctgtactgcgaggcgctcaacctcaccgaggcgccccacaacctgtccggcctgctgggcttgtccctgcgctacaacagcctctcggagctgcgcgccggccagttcacggggttaatgcagctcacgtggctctatctggatcacaatcacatctgctccgtgcagggggacgcctttcagaaactgcgccgagttaaggaactcacgctgagttccaaccagatcacccaactgcccaacaccaccttccggcccatgcccaacctgcgcagcgtggacctctcgtacaacaagctgcaggcgctcgcgcccgacctcttccacgggctgcggaagctcaccacgctgcatatgcgggccaacgccatccagtttgtgcccgtgcgcatcttccaggactgccgcagcctcaagtttctcgacatcggatacaatcagctcaagagtctggcgcgcaactctttcgccggcttgtttaagctcaccgagctgcacctcgagcacaacgacttggtcaag

SEQ ID NO: 15886 - DNA, 3014 bp, Homo sapiens
  source 1..3014: mol_type = unassigned DNA
aagctcgggctccggcacgtagttgggaaacttgcgggtcctagaagtcgcctccccgccttgccggccgcccttgcagccccgagccgagcagcaaagtgagacattgtgcgcctgccagatccgccggccgcggaccggggctgcctcggaaacacagaggggtcttctctcgccctgcatataattagcctgcacacaaagggagcagctgaatggaggttgtcactctctggaaaaggatttctgaccgagcgcttccaatggacattctccagtctctctggaaagattctcgctaatggatttcctgctgctcggtctctgtctatactggctgctgaggaggccctcgggggtggtcttgtgtctgctgggggcctgctttcagatgctgcccgccgcccccagcgggtgcccgcagctgtgccggtgcgaggggcggctgctgtactgcgaggcgctcaacctcaccgaggcgccccacaacctgtccggcctgctgggcttgtccctgcgctacaacagcctctcggagctgcgcgccggccagttcacggggttaatgcagctcacgtggctctatctggatcacaatcacatctgctccgtgcagggggacgcctttcagaaactgcgccgagttaaggaactcacgctgagttccaaccagatcacccaactgcccaacaccaccttccggcccatgcccaacctgcgcagcgtggacctctcgtacaacaagctgcaggcgctcgcgcccgacctcttccacgggctgcggaagctcaccacgctgcatatgcgggccaacgccatccagtttgtgcccgtgcgcatcttccaggactgccgcagcctcaagtttctcgacatcggatacaatcagctcaagagtctggcgcgcaactctttcgccggcttgtttaagctcaccgagctgcacctcgagcacaacgacttggtcaaggtgaacttcgcccacttcccgcgcctcatctccctgcactcgctctgcctgcggaggaacaaggtggccattgtggtcagctcgctggactgggtttggaacctggagaaaatggacttgtcgggcaacgagatcgagtacatggagccccatgtgttcgagaccgtgccgcacctgcagtccctgcagctggactccaaccgcctcacctacatcgagccccggatcctcaactcttggaagtccctgacaagcatcaccctggccgggaacctgtgggattgcgggcgcaacgtgtgtgccctagcctcgtggctcaacaacttccaggggcgctacgatggcaacttgcagtgcgccagcccggagtacgcacagggcgaggacgtcctggacgccgtgtacgccttccacctgtgcgaggatggggccgagcccaccagcggccacctgctctcggccgtcaccaaccgcagtgatctggggccccctgccagctcggccaccacgctcgcggacggcggggaggggcagcacgacggcacattcgagcctgccaccgtggctcttccaggcggcgagcacgccgagaacgccgtgcagatccacaaggtggtcacgggcaccatggccctcatcttctccttcctcatcgtggtcctggtgctctacgtgtcctggaagtgtttcccagccagcctcaggcagctcagacagtgctttgtcacgcagcgcaggaagcaaaagcagaaacagaccatgcatcagatggctgccatgtctgcccaggaatactacgttgattacaaaccgaaccacattgagggagccctggtgatcatcaacgagtatggctcgtgtacctgccaccagcagcccgcgagggaatgcgaggtgtgattgtcccagtggctctcaacccatgcgctaccaaatacgcctgggcagccgggacgggccggcgggcaccaggctggggtctccttgtctgtgctctgatatgctccttgactgaaactttaaggggatctctcccagagacttgacattttagctttattgtgtcttaaaaacaaaagcgaattaaaacacaacaaaaaaccccaccccacaaccttcaggacagtctatcttaaatttcatatgagaactccttcctccctttgaagatctgtccatattcaggaatctgagagtgtaaaaaagttctgtcaacagattcagtccccagtcctccttctctgagcagacctctcatccgcagcatatatctgctagatcttctaagagctgaaatggagacttctggaagaaggtgggaaagaaatccatctcggcttaattaaccatttatcgcatcatattactcccatcttaaaagtgcacgcgttgtttttctgaaccctcacacaaaggctactactgtggtcccatatctgtcggcccatgagaaacagtgttcttggacctcacagccaagcagcactgaactgcagcaaaatccagcaacacattcagcagcgagcagcctgctgagctccactggtttatccggggccaccaaccccaaagaactgggatgaaagcagatgtgagagaggaaaaggatctgtttttgttttattttctaccaggcccagctctttgtggggggaataaaaaagaagaaaaatcgagctccaagctggtgccctgccaagcttcctcccctcccttcctagtccaagcactccaccgtctgtgcagactgcataacagcaatttctggaaacaggctgaagaatctgggccagtccagaggcagtggattcctggtttatgtgtggtggggtttttaggaattttatttttcaccttaattctttcaacaactgccagctgtttgaagcacatctgtaataaacagcttctgtttgtaaaatgagactgaagttatcctctccagagaaattcctgaatcttctctgtagttcaatgccttcactgacagtttggctcaaaaagtatgagtgtggtaaatattaaagaatgttaatacaagtgt

SEQ ID NO: 15887 - DNA, 4023 bp, Homo sapiens
  source 1..4023: mol_type = unassigned DNA
cctgtgcaagctcgcgccgcacactgcctggtggagggaaggagcccgggcgccgctcgccgctccccgcgccgccgtccgcacctccccaccgcccgccgcccgccgcccgccgcccgcaaagcatgagtgagcccgctctctgcagctgcccggggcgcgaatggcaggctgtttccgcggagtaaaaggtggcgccggtcagtggtcgtttccaatgacggacattaaccagactgtcagatcctggggagtcgcgagccccgagtttggagttttttccccccacaacgtcacagtccgaactgcagagggaaaggaaggcggcaggaaggcgaagctcgggctccggcacgtagttgggaaacttgcgggtcctagaagtcgcctccccgccttgccggccgcccttgcagccccgagccgagcagcaaagtgagacattgtgcgcctgccagatccgccggccgcggaccggggctgcctcggaaacacagaggggtcttctctcgccctgcatataattagcctgcacacaaagggagcagctgaatggaggttgtcactctctggaaaaggatttctgaccgagcgcttccaatggacattctccagtctctctggaaagattctcgctaatggatttcctgctgctcggtctctgtctatactggctgctgaggaggccctcgggggtggtcttgtgtctgctgggggcctgctttcagatgctgcccgccgcccccagcgggtgcccgcagctgtgccggtgcgaggggcggctgctgtactgcgaggcgctcaacctcaccgaggcgccccacaacctgtccggcctgctgggcttgtccctgcgctacaacagcctctcggagctgcgcgccggccagttcacggggttaatgcagctcacgtggctctatctggatcacaatcacatctgctccgtgcagggggacgcctttcagaaactgcgccgagttaaggaactcacgctgagttccaaccagatcacccaactgcccaacaccaccttccggcccatgcccaacctgcgcagcgtggacctctcgtacaacaagctgcaggcgctcgcgcccgacctcttccacgggctgcggaagctcaccacgctgcatatgcgggccaacgccatccagtttgtgcccgtgcgcatcttccaggactgccgcagcctcaagtttctcgacatcggatacaatcagctcaagagtctggcgcgcaactctttcgccggcttgtttaagctcaccgagctgcacctcgagcacaacgacttggtcaaggtgaacttcgcccacttcccgcgcctcatctccctgcactcgctctgcctgcggaggaacaaggtggccattgtggtcagctcgctggactgggtttggaacctggagaaaatggacttgtcgggcaacgagatcgagtacatggagccccatgtgttcgagaccgtgccgcacctgcagtccctgcagctggactccaaccgcctcacctacatcgagccccggatcctcaactcttggaagtccctgacaagcatcaccctggccgggaacctgtgggattgcgggcgcaacgtgtgtgccctagcctcgtggctcaacaacttccaggggcgctacgatggcaacttgcagtgcgccagcccggagtacgcacagggcgaggacgtcctggacgccgtgtacgccttccacctgtgcgaggatggggccgagcccaccagcggccacctgctctcggccgtcaccaaccgcagtgatctggggccccctgccagctcggccaccacgctcgcggacggcggggaggggcagcacgacggcacattcgagcctgccaccgtggctcttccaggcggcgagcacgccgagaacgccgtgcagatccacaaggtggtcacgggcaccatggccctcatcttctccttcctcatcgtggtcctggtgctctacgtgtcctggaagtgtttcccagccagcctcaggcagctcagacagtgctttgtcacgcagcgcaggaagcaaaagcagaaacagaccatgcatcagatggctgccatgtctgcccaggaatactacgttgattacaaaccgaaccacattgagggagccctggtgatcatcaacgagtatggctcgtgtacctgccaccagcagcccgcgagggaatgcgaggtgtgattgtcccagtggctctcaacccatgcgctaccaaatacgcctgggcagccgggacgggccggcgggcaccaggctggggtctccttgtctgtgctctgatatgctccttgactgaaactttaaggggatctctcccagagacttgacattttagctttattgtgtcttaaaaacaaaagcgaattaaaacacaacaaaaaaccccaccccacaaccttcaggacagtctatcttaaatttcatatgagaactccttcctccctttgaagatctgtccatattcaggaatctgagagtgtaaaaaaggtggccataagacagagagagaataatcgtgctttgttttatgctactcctcccaccctgcccatgattaaacatcatgtatgtagaagatcttaagtccatacgcatttcatgaagaaccattggaaagaggaatctgcaatctgggagcttaagagcaaatgatgaccatagaaagctatgttcttactttgtgtgtgtgtctgtatgtttctgcgttgtgtgtctttgtaggcaagcaaacgttgtctacacaaacgggaatttagctcacatcatttcatgcccctgtgcctctagctctggagattggtggggggaggtggggggaaacggcaggaataagggaaagtggtagttttaactaaggttttgtaacacttgaaatcttttctttctcaaattaattaatctttaagcttcaagaaacttgctctgacccctctaagcaaactactaagcatttaaaagagaatctaatttttaaaggtgtagcaccttttttttattcttcccacagagggtgctaatctcattatgctgtgctatctgaaaagaacttaaggccacaattcacgtctcgtcctgggcattgtgatggattgaccctccatttgcagtaccttcccagctgattaaagttcagcagtggtattgaggtttttcgaatatttatatagaaaaaaagtcttttcacatgacaaatgacactctcacaccagtcttagccctagtagttttttaggttggaccagaggaagcaggttaaatgagacctgtcctctgctgcactcagaaaaaataggcagtccctgatgctcagatcttagccttgatattaatagttgagaccacctacccacaatgcagcctatactcccaagactacaaagttaccatcgcaaaggaaaggttattccagtaaaaggaaatagttttctcaaccatttaaaaatattcttctgaactcatcaaagtagaagagcccccaaccttttctctctgccttcaagaaggcagacatttggtatgatttagcatcaacaacacatttatgagtatatgtaagtaatcagaggggcaaatgccacttgttattcctcccaagttttccaagcaagtacacacagatctctggtaggattaggggccacttgtgtttccggcttattttagtcgacttgtcagcaagtttgatgcctagtctatctgacatggcccagtagaacagggcattgatggatcacatgagatggtagaaggaacatcatcacatacccctctcacagagaaaattatcaaagaaccagaaattatatctgttttggagcaagagtgtcataatgtttcagggtagtcaaaataaacataaattatctcctctagatgagtggcgatgttggctgatttgggtctgccattgacagaatgtcaaataaaaaggaattagctagaatatgaccattaaatgtgcttctgaaatatattttgagataggtttagaatgtca

SEQ ID NO: 15888 - DNA, 765 bp, Homo sapiens
  source 1..765: mol_type = unassigned DNA
acgtcacagtccgaactgcagagggaaaggaaggcggcaggaaggcgaagctcgggctccggcacgtagttgggaaacttgcgggtcctagaagtcgcctccccgccttgccggccgcccttgcagccccgagccgagcagcaaagtgagacattatttctgaccgagcgcttccaatggacattctccagtctctctggaaagattctcgctaatggatttcctgctgctcggtctctgtctatactggctgctgaggaggccctcgggggtggtcttgtgtctgctgggggcctgctttcagatgctgcccgccgcccccagcgggtgcccgcagctgtgccggtgcgaggggcggctgctgtactgcgaggcgctcaacctcaccgaggcgccccacaacctgtccggcctgctgggcttgtccctgcgctacaacagcctctcggagctgcgcgccggccagttcacggggttaatgcagctcacgtggctctatctggatcacaatcacatctgctccgtgcagggggacgcctttcagaaactgcgccgagttaaggaactcacgctgagttccaaccagatcacccaactgcccaacaccaccttccggcccatgcccaacctgcgcagcgtggacctctcgtacaacaagctgcaggcgctcgcgcccgacctcttccacgggctgcggaagctcaccacgctgcatatgcgggccaacgccatccagtttgtgcccgtgcgcatcttccaggactg

SEQ ID NO: 15889 - DNA, 2216 bp, Homo sapiens
  source 1..2216: mol_type = unassigned DNA
tgctgctccaggagctcttctctgcaacaagccacccatctgccatcaacaagttaagaccaagagaactaacggctgcggaaaggagactgaagctttgattaaccagctgagcagttagaggtggagaaatttaataacttatattcaaaactgatttagggatcagagcaatcacagaaaatgaaaccaatgctttccagagggatatcctaaggaaaaaacaactcgtcctggtggattcaattttacttggaaagcctgggacacagaaaacaggaaactggtcaaaggctcctacatgttagagccttttacagactcactgcgttgagtctaacaaccgcgactgaatgcagcctccaatgtgctcagaagaatgggcttacatttcaagtggccattaggggcccctatgctggcagcaatatatgcaatgagtatggttttaaaaatgctgcctgccctgggtatggcgtgtccacccaaatgccgctgcgagaagctgctcttctactgcgactctcagggcttccactcagtgccaaacgccacagacaagggctctctgggcctgtccctgaggcacaatcacatcacagagctcgaaagagatcaatttgccagcttcagtcaacttacttggctccacttagatcacaatcaaatttcaacagtaaaagaagatgcttttcaaggactatataaacttaaggaattaatcttaagttccaacaaaatattttacttgccaaacacaacttttacccaactgattaacctgcaaaatttggacctgtcttttaatcagctgtcatctctgcacccagagctcttctatggccttcggaagctgcagaccttgcatttacgttccaactccctgcggactatcccagtacgcctgttctgggactgtcgtagtctggagtttctggatttgagcacaaatcgtttgcgaagtttggctcgcaatggatttgcaggattaattaaactgagagagcttcacctagagcacaaccagctgacgaagattaattttgctcatttcctacggctaagcagtctgcacacgctcttcttacaatggaacaaaatcagcaacttgacatgtgggatggagtggacctggggcactttagaaaagctagacctgactggaaatgaaatcaaagccatcgacttgacagtgtttgaaacgatgcccaatcttaaaatactcctcatggataacaacaagttaaacagccttgattccaagatcttaaactccctgagatccctcacaaccgttggtctctctggcaatctgtgggaatgcagcgcccgaatatgtgctctggcctcctggctgggcagtttccaaggtcggtgggaacactccatcctatgccacagtcctgaccacacccaaggagaggatattctagatgcagtccatggatttcagctctgctggaatttgtcaaccactgtcactgtcatggctacaacttatagagatccaaccactgaatatacaaaaagaataagctcatcaagttaccatgtgggagacaaagaaatcccaactactgcaggcatagcagttactaccgaggaacactttcctgaaccagacaatgccatcttcactcagcgggtaattacgggaacaatggctttattgttttctttcttttttattatttttatagtgttcatctccaggaagtgctgccctcccactttaagaagaattaggcagtgctcaatggttcagaaccacaggcagctccgatcccaaacacgactccatatgtcaaacatgtcagaccaaggaccgtataatgaatatgaacccacccatgaaggacccttcatcatcattaatggttatggacagtgcaagtgtcagcagctgccatacaaagaatgtgaagtataatatctacccatcatcaaaaatcacatcagataagtaacctattttacatagtagaggctaaatacatatctaatttttaccaatggtgacattaagcctaattttccaaactaagtggagacttagtttttgaagtgttgaagtatttttaattttttaaatgaaaccatattttaagtgttaaatgaatcaatgctcacattaatttgcactcctgttggaaagtctaaaatgcttacttcaaaataagaaatgtatgtaattatatacaatcgtgtgtaaacct

SEQ ID NO: 15890 - DNA, 3192 bp, Homo sapiens
  source 1..3192: mol_type = unassigned DNA
acataagactgcattcactgaaaccaaagcaacagtccgagcagctttcagaatgacagtctgcagaagtgagctgagcgtgtgcgcggtacggggctctcctgccttctgggctccaacgcagctctgtggctgaactgggtgctcatcacgggaactgctggggtatggaatacagatgtggcagctcaggtagccccaaattgcctggaagaatacatcatgtttttcgataagaagaaattgtaggatccagttttttttttaaccgccccctccccaccccccaaaaaactgtaaagatgcaaaaacgtaatatccatgaagatcctattacctaggaagattttgatgttttgctgcgaatgcggtgttgggatttatttgttcttggagtgttctgcgtggctggcaaagaataatgttccaaaatcggtccatctcccaaggggtccaatttttcttcctgggtgtcagcgagccctgactcactacagtgcagctgacaggggctgtcatgcaactggcccctaagccaaagcaaaagacctaaggacgacctttgaacaatacaaaggatgggtttcaatgtaattaggctactgagcggatcagctgtagcactggttatagcccccactgtcttactgacaatgctttcttctgccgaacgaggatgccctaagggctgtaggtgtgaaggcaaaatggtatattgtgaatctcagaaattacaggagataccctcaagtatatctgctggttgcttaggtttgtcccttcgctataacagccttcaaaaacttaagtataatcaatttaaagggctcaaccagctcacctggctataccttgaccataaccatatcagcaatattgacgaaaatgcttttaatggaatacgcagactcaaagagctgattcttagttccaatagaatctcctattttcttaacaataccttcagacctgtgacaaatttacggaacttggatctgtcctataatcagctgcattctctgggatctgaacagtttcggggcttgcggaagctgctgagtttacatttacggtctaactccctgagaaccatccctgtgcgaatattccaagactgccgcaacctggaacttttggacctgggatataaccggatccgaagtttagccaggaatgtctttgctggcatgatcagactcaaagaacttcacctggagcacaatcaattttccaagctcaacctggccctttttccaaggttggtcagccttcagaacctttacttgcagtggaataaaatcagtgtcataggacagaccatgtcctggacctggagctccttacaaaggcttgatttatcaggcaatgagatcgaagctttcagtggacccagtgttttccagtgtgtcccgaatctgcagcgcctcaacctggattccaacaagctcacatttattggtcaagagattttggattcttggatatccctcaatgacatcagtcttgctgggaatatatgggaatgcagcagaaatatttgctcccttgtaaactggctgaaaagttttaaaggtctaagggagaatacaattatctgtgccagtcccaaagagctgcaaggagtaaatgtgatcgatgcagtgaagaactacagcatctgtggcaaaagtactacagagaggtttgatctggccagggctctcccaaagccgacgtttaagcccaagctccccaggccgaagcatgagagcaaaccccctttgcccccgacggtgggagccacagagcccggcccagagaccgatgctgacgccgagcacatctctttccataaaatcatcgcgggcagcgtggcgcttttcctgtccgtgctcgtcatcctgctggttatctacgtgtcatggaagcggtaccctgcgagcatgaagcagctgcagcagcgctccctcatgcgaaggcacaggaaaaagaaaagacagtccctaaagcaaatgactcccagcacccaggaattttatgtagattataaacccaccaacacggagaccagcgagatgctgctgaatgggacgggaccctgcacctataacaaatcgggctccagggagtgtgagatacctttatcaatgaatgtgtcaacctttctggcatacgaccagcccacaataagttactgtggggtgcatcatgaacttctctcccataagtcctttgaaacgaatgcacaggaagatacgatggaaacacacctagagactgagctggacctgagcacaatcacaacagctggccgaatcagtgaccataaacagcagctagcttaactgagatcattggtagccaggggttgctaccaaactttgtaacctcaaggacaaaatgaggaagatgtgttcattgtggactctaaaaacaaaacaaaacacaaaatcccctgttcaaataaacaaaaaatccaagattgattcatgaaataaagaagacatgaattgttttaagtctacactttgtaattagctaagttgtgcagtattttttgacttaaacagagtatgaccctgaaaaataaaagaatctttttttttcaaaactcatcctacctacctgtaaaaactgtacaaagctaatgtatttttcatattgtaaagtttcaattgtagaaacaactggtatgtacagtaccataatttaattacattttactttaaaaactttacacatttcagtttctaaaattttaaattaacaaaaattatttcttgtgttattcagagttactcagttttgtaaggactgttttgttactgcttttgtgcccagaaaccttgactctaaaattctgtgctgtgcgaaacatgcacgatttttattatgcttactgcgtagaattttatctacttgttccagaaataatacattaaccaaaaaggatttaattgttcagacttgtaagaggttcttcaattacataggcaggtttttcttaaaaatgaaaaaaaaatcaaagatttttttaacagttctcagacttaactgttgccttgaattacagcctagtttctaagcagtgaaatgtaatgataaagagggatattttaacatatttccgaatgaatgactcattatttcattcttttgagtaaccattgttaagggttgggggaaagcatggacaaaacatcactggaaaca

SEQ ID NO: 15891 - DNA, 3530 bp, Homo sapiens
  source 1..3530: mol_type = unassigned DNA
aacagtccgagcagctttcagaatgacagtctgcagaagtgagctgagcgtgtgcgcggtacggggctctcctgccttctgggctccaacgcagctctgtggctgaactgggtgctcatcacgggaactgctggggtatggaatacagatgtggcagctcaggtagccccaaattgcctggaagaatacatcatgtttttcgataagaagaaattgtaggatccagttttttttttaaccgccccctccccaccccccaaaaaactgtaaagatgcaaaaacgtaatatccatgaagatcctattacctaggaagattttgatgttttgctgcgaatgcggtgttgggatttatttgttcttggagtgttctgcgtggctggcaaagaataatgttccaaaatcggtccatctcccaaggggtccaatttttcttcctgggtgtcagcgagccctgactcactacagtgcagctgacaggggctgtcatgcaactggcccctaagccaaagcaaaagacctaaggacgacctttgaacaatacaaaggatgggtttcaatgtaattaggctactgagcggatcagctgtagcactggttatagcccccactgtcttactgacaatgctttcttctgccgaacgaggatgccctaagggctgtaggtgtgaaggcaaaatggtatattgtgaatctcagaaattacaggagataccctcaagtatatctgctggttgcttaggtttgtcccttcgctataacagccttcaaaaacttaagtataatcaatttaaagggctcaaccagctcacctggctataccttgaccataaccatatcagcaatattgacgaaaatgcttttaatggaatacgcagactcaaagagctgattcttagttccaatagaatctcctattttcttaacaataccttcagacctgtgacaaatttacggaacttggatctgtcctataatcagctgcattctctgggatctgaacagtttcggggcttgcggaagctgctgagtttacatttacggtctaactccctgagaaccatccctgtgcgaatattccaagactgccgcaacctggaacttttggacctgggatataaccggatccgaagtttagccaggaatgtctttgctggcatgatcagactcaaagaacttcacctggagcacaatcaattttccaagctcaacctggccctttttccaaggttggtcagccttcagaacctttacttgcagtggaataaaatcagtgtcataggacagaccatgtcctggacctggagctccttacaaaggcttgatttatcaggcaatgagatcgaagctttcagtggacccagtgttttccagtgtgtcccgaatctgcagcgcctcaacctggattccaacaagctcacatttattggtcaagagattttggattcttggatatccctcaatgacatcagtcttgctgggaatatatgggaatgcagcagaaatatttgctcccttgtaaactggctgaaaagttttaaaggtctaagggagaatacaattatctgtgccagtcccaaagagctgcaaggagtaaatgtgatcgatgcagtgaagaactacagcatctgtggcaaaagtactacagagaggtttgatctggccagggctctcccaaagccgacgtttaagcccaagctccccaggccgaagcatgagagcaaaccccctttgcccccgacggtgggagccacagagcccggcccagagaccgatgctgacgccgagcacatctctttccataaaatcatcgcgggcagcgtggcgcttttcctgtccgtgctcgtcatcctgctggttatctacgtgtcatggaagcggtaccctgcgagcatgaagcagctgcagcagcgctccctcatgcgaaggcacaggaaaaagaaaagacagtccctaaagcaaatgactcccagcacccaggaattttatgtagattataaacccaccaacacggagaccagcgagatgctgctgaatgggacgggaccctgcacctataacaaatcgggctccagggagtgtgagatacctttatcaatgaatgtgtcaacctttctggcatacgaccagcccacaataagttactgtggggtgcatcatgaacttctctcccataagtcctttgaaacgaatgcacaggaagatacgatggaaacacacctagagactgagctggacctgagcacaatcacaacagctggccgaatcagtgaccataaacagcagctagcttaactgagatcattggtagccaggggttgctaccaaactttgtaacctcaaggacaaaacatcactggaaacaaaggctgtaaccacagcaacagactttgtgatacagttaaaaggtgcagctgccagtgacaaataaaaacttttgttacatctcattattttcaggccaaggtgggagtatagtgcataataattgtacagtagcaatttttatcctaattaacccatagcggtttacctaaaagtaaccatcagtcagtgcaaaatgtgcctggttcttaagacaactttttatttagaactgtgagaccggtattttggaaacatttcaaaggaaacatatgaatttgttttgcgttgtgcactacatcatttctctcctgaggaagaattttaaacatgtacagctcattcaatatagatatgagccatggtggagaactttatcactcaagtagacggtaaacatccttaatatgttctaaattgtttatattgctatccataatgggattcacctccaaattatcaaagaaataactcagagtaatttgacaccagcccagatcatatattgattatacaattgtattataaagttcattcaaatcaaattaagaaaacctgagtctttagaagctgaaataatcaacttgtttgtgctgtttgcttgacataggttattgtttgaaaatattgttactttatcaatagtaatcatgcattcttgtgtttttttttaatggaaaactgcaagtttcaattactgttgcactagaagtgctttttatgttgtcattttatattcatgccatcaaaagtagattgacaatacatcaatctaacaggggccaatcaaaacaatgaagaaaagaataactgaaaacaatgtcaaacttttaaatttttatctcttccaaagaagttatatctataaaatctagttttatgcaggtttgtcacagcaaatgtaaaagcggattcaagaagaatgaacttaaaaactgtggagcaaatttttgttgaaaatatataaagtcagaaagaaaaaagatgtaaatgttggaagaagcaaattctattactaattcaaatgaaactaaatgtcaaacacagtacttgtgtcaactatttagcatcccagattttgtaacatattttgcataaattatttgctcttcaaaaatttttgtcattttaaatctaattttaatctttatgttttccattttctaa

SEQ ID NO: 15892 - DNA, 3616 bp, Homo sapiens
  source 1..3616: mol_type = unassigned DNA
agtgtatcacaaactcaagcattagcaccaacaagctctgagcatcatcagtctctggaaagccttctgaattagacaagggctgcctcccagcacagctacaaaacactttaaacctgaccagctaaatggataaacctagcctgcatagcttttaaactggggtctcatacagcacaggaggcctacttgcttcaagaactgaaaatccagaggatgaattgctttatctgggaatggcaaaagccagcacaataaggaatgccagtttgtatggggctactagctcacatgcgggatcagaatggtgtgaatgacagccgcactgtgtcatgaaggtggtggtggtttccgcacaagagaccaaataagaagaaagctgagagaggggggaaacgtttttggatgacaaaggatgggtttccatttaattacgcagctgaaaggcatgagtgtggtgctggtgctacttcctacactgctgcttgttatgctcacgggtgctcagagagcttgcccaaagaactgcagatgtgatggcaaaattgtgtactgtgagtctcatgctttcgcagatatccctgagaacatttctggagggtcacaaggcttatcattaaggttcaacagcattcagaagctcaaatccaatcagtttgccggccttaaccagcttatatggctttatcttgaccataattacattagctcagtggatgaagatgcatttcaagggatccgtagactgaaagaattaattctaagctccaacaaaattacttatctgcacaataaaacatttcacccagttcccaatctccgcaatctggacctctcctacaataagcttcagacattgcaatctgaacaatttaaaggccttcggaaactcatcattttgcacttgagatctaactcactaaagactgtgcccataagagtttttcaagactgtcggaatcttgattttttggatttgggttacaatcgtcttcgaagcttgtcccgaaatgcatttgctggcctcttgaagttaaaggagctccacctggagcacaaccagttttccaagatcaactttgctcattttccacgtctcttcaacctccgctcaatttacttacaatggaacaggattcgctccattagccaaggtttgacatggacttggagttccttacacaacttggatttatcagggaatgacatccaaggaattgagccgggcacatttaaatgcctccccaatttacaaaaattgaatttggattccaacaagctcaccaatatctcacaggaaactgtcaatgcgtggatatcattaatatccatcacattgtctggaaatatgtgggaatgcagtcggagcatttgtcctttattttattggcttaagaatttcaaaggaaataaggaaagcaccatgatatgtgcgggacctaagcacatccagggtgaaaaggttagtgatgcagtggaaacatataatatctgttctgaagtccaggtggtcaacacagaaagatcacacctggtgccccaaactccccagaaacctctgattatccctagacctaccatcttcaaacctgacgtcacccaatccacctttgaaacaccaagcccttccccagggtttcagattcctggcgcagagcaagagtatgagcatgtttcatttcacaaaattattgccgggagtgtggctctctttctctcagtggccatgatcctcttggtgatctatgtgtcttggaaacgctacccagccagcatgaaacaactccagcaacactctcttatgaagaggcggcggaaaaaggccagagagtctgaaagacaaatgaattcccctttacaggagtattatgtggactacaagcctacaaactctgagaccatggatatatcggttaatggatctgggccctgcacatataccatctctggctccagggaatgtgaggtatgaaccatgatcctcctaaaagcatttctactgcggggaaggagaggtaaatgtttgaagccctagaggtgtctctaatcactagaaagattaatgacccttttgcttttgggttttgctcagtgtgaaaggttacttaattaaattacaaccaccaggaaattgactgctttttttttttttttaaatggttgaaacttgaaggaagttcattcaaggataagttggaataaagcactatgttaaaacatctgctttttaacaatttgtatacaggggttggacttaaaaacacacatacaaacaaaactcttttcattctgaaatttctgtctggttcttggtgtttgactgttgtaatggagtaaagaagagggccagcttaatttaaaaataaagtgagtttaccaaaattccagaaggtaatgaagatttaaaccaaagagcaattttcccaagggttgattttgttgtaaatttttagttttaatgaaagcatgcaacagggatctcacacccatgttacttgccatttagttattataccagcatagagaatgtcagaggcctactgtgtaattgtatcaggctcctaaggcttctttctttttttttttttgtttccttctttcctactttctttcactccttcctttccttcctttctcttccttctttttttgtttgtttgtttgttttttaattactgggatatagatccgatttcaaaggtttttatgcactggctatttgtgtttaatcagaatgaaacttcaattccatgctttggctttgtccctggtaactaaaatcaggtcacaattttgtggatgatttagcaataataaaatggcagtcataacagggactgtttgtcagtattgctgtcatccccaaaagaaatgatatgtattcttgttaaacttattaaaaaataagtgatacaaatatttataaataaaaggagagaggtttgagttctgggtatcctccctttctgtaacagcctcaaataaaggtgtaccttccatgttatattatttttgtttttataagaataaatttggacccggtttctgattatttaatttaaaagatcacttacaggatcatgttagtgagcagacaaatagtcacaaatttcaaacttgtcaataagtaatgctggatgtaaattgttcttttcttggtaatgttgatcattatgtgcaaagactgactactaaggccttgttgctggaagaaactagtgaagagaggttaaattctggcaatataatgttttagtatctgattttagatgatcactctttcaaaagacagttttaatgagtaattaaagatgttgccctttctaatgctagttaacagttggaaaatataattgctctttgatagcatatactccaatttttccatagtcctaactacaaatgctaatgaaaatgttttcagacaaagcactgaatttgaaataatctctaactcagtacaatttggactattgaactgttcttcaaagaattcattttcttcttttttgtgtatcattgaaaataagagaagtaatcccagataataaattcctaaaaggaaactgtataagcaattgcccttaaaaattaaaaagaataaaagattttctat

SEQ ID NO: 15893 - DNA, 2247 bp, Homo sapiens
  source 1..2247: mol_type = unassigned DNA
acaaactcaagcattagcaccaacaagctctgagcatcatcagtctctggaaagccttctgaattagacaagggctgcctcccagcacagctacaaaacactttaaacctgaccagctaaatggataaacctagcctgcatagcttttaaactggggtctcatacagcacaggaggcctacttgcttcaagaactgaaaatccagaggatgaattgctttatctgggaatggcaaaagccagcacaataaggaatgccaggtggtggtggtttccgcacaagagaccaaataagaagaaagctgagagaggggggaaacgtttttggatgacaaaggatgggtttccatttaattacgcagctgaaaggcatgagtgtggtgctggtgctacttcctacactgctgcttgttatgctcacgggtgctcagagagcttgcccaaagaactgcagatgtgatggcaaaattgtgtactgtgagtctcatgctttcgcagatatccctgagaacatttctggagggtcacaaggcttatcattaaggttcaacagcattcagaagctcaaatccaatcagtttgccggccttaaccagcttatatggctttatcttgaccataattacattagctcagtggatgaagatgcatttcaagggatccgtagactgaaagaattaattctaagctccaacaaaattacttatctgcacaataaaacatttcacccagttcccaatctccgcaatctggacctctcctacaataagcttcagacattgcaatctgaacaatttaaaggccttcggaaactcatcattttgcacttgagatctaactcactaaagactgtgcccataagagtttttcaagactgtcggaatcttgattttttggatttgggttacaatcgtcttcgaagcttgtcccgaaatgcatttgctggcctcttgaagttaaaggagctccacctggagcacaaccagttttccaagatcaactttgctcattttccacgtctcttcaacctccgctcaatttacttacaatggaacaggattcgctccattagccaaggtttgacatggacttggagttccttacacaacttggatttatcagggaatgacatccaaggaattgagccgggcacatttaaatgcctccccaatttacaaaaattgaatttggattccaacaagctcaccaatatctcacaggaaactgtcaatgcgtggatatcattaatatccatcacattgtctggaaatatgtgggaatgcagtcggagcatttgtcctttattttattggcttaagaatttcaaaggaaataaggaaagcaccatgatatgtgcgggacctaagcacatccagggtgaaaaggttagtgatgcagtggaaacatataatatctgttctgaagtccaggtggtcaacacagaaagatcacacctggtgccccaaactccccagaaacctctgattatccctagacctaccatcttcaaacctgacgtcacccaatccacctttgaaacaccaagcccttccccagggtttcagattcctggcgcagagcaagagtatgagcatgtttcatttcacaaaattattgccgggagtgtggctctctttctctcagtggccatgatcctcttggtgatctatgtgtcttggaaacgctacccagccagcatgaaacaactccagcaacactctcttatgaagaggcggcggaaaaaggccagagagtctgaaagacaaatgaattcccctttacaggagtattatgtggactacaagcctacaaactctgagaccatggatatatcggttaatggatctgggccctgcacatataccatctctggctccagggaatgtgagatgccacaccacatgaagcccttgccatattacagctatgaccagcctgtgatcgggtactgccaggcccaccagccactccatgtcaccaagggctatgagacagtgtctccagagcaggacgaaagccccggcctggagctgggccgagaccacagcttcatcgccaccatcgccaggtcggcagcaccggccatctacctagagagaattgcaaactaacgctgaagccaactcctcactggggagctccatgggggggagggagggccttcatcttaaaggagaatgggtgtccacaatcgcgcaatcgagcaagctcatcgttcctgttaaaacatttatggcatagagaaaag

SEQ ID NO: 15894 - DNA, 2227 bp, Homo sapiens
  source 1..2227: mol_type = unassigned DNA
aaacactttaaacctgaccagctaaatggataaacctagcctgcatagcttttaaactggggtctcatacagcacaggaggcctacttgcttcaagaactgaaaatccagaggatgaattgctttatctgggaatggcaaaagccagcacaataaggaatgccagtttgtatggggctactagctcacatgcgggatcagaatggtgtgaatgacagccgcactgtgtcatgaaggtggtggtggtttccgcacaagagaccaaataagaagaaagctgagagaggggggaaacgtttttggatgacaaaggatgggtttccatttaattacgcagctgaaaggcatgagtgtggtgctggtgctacttcctacactgctgcttgttatgctcacgggtgctcagagagcttgcccaaagaactgcagatgtgatggcaaaattgtgtactgtgagtctcatgctttcgcagatatccctgagaacatttctggagggtcacaaggcttatcattaaggttcaacagcattcagaagctcaaatccaatcagtttgccggccttaaccagcttatatggctttatcttgaccataattacattagctcagtggatgaagatgcatttcaagggatccgtagactgaaagaattaattctaagctccaacaaaattacttatctgcacaataaaacatttcacccagttcccaatctccgcaatctggacctctcctacaataagcttcagacattgcaatctgaacaatttaaaggccttcggaaactcatcattttgcacttgagatctaactcactaaagactgtgcccataagagtttttcaagactgtcggaatcttgattttttggatttgggttacaatcgtcttcgaagcttgtcccgaaatgcatttgctggcctcttgaagttaaaggagctccacctggagcacaaccagttttccaagatcaactttgctcattttccacgtctcttcaacctccgctcaatttacttacaatggaacaggattcgctccattagccaaggtttgacatggacttggagttccttacacaacttggatttatcagggaatgacatccaaggaattgagccgggcacatttaaatgcctccccaatttacaaaaattgaatttggattccaacaagctcaccaatatctcacaggaaactgtcaatgcgtggatatcattaatatccatcacattgtctggaaatatgtgggaatgcagtcggagcatttgtcctttattttattggcttaagaatttcaaaggaaataaggaaagcaccatgatatgtgcgggacctaagcacatccagggtgaaaaggttagtgatgcagtggaaacatataatatctgttctgaagtccaggtggtcaacacagaaagatcacacctggtgccccaaactccccagaaacctctgattatccctagacctaccatcttcaaacctgacgtcacccaatccacctttgaaacaccaagcccttccccagggtttcagattcctggcgcagagcaagagtatgagcatgtttcatttcacaaaattattgccgggagtgtggctctctttctctcagtggccatgatcctcttggtgatctatgtgtcttggaaacgctacccagccagcatgaaacaactccagcaacactctcttatgaagaggcggcggaaaaaggccagagagtctgaaagacaaatgaattcccctttacaggagtattatgtggactacaagcctacaaactctgagaccatggatatatcggttaatggatctgggccctgcacatataccatctctggctccagggaatgtgagatgccacaccacatgaagcccttgccatattacagctatgaccagcctgtgatcgggtactgccaggcccaccagccactccatgtcaccaagggctatgagacagtgtctccagagcaggacgaaagccccggcctggagctgggccgagaccacagcttcatcgccaccatcgccaggtcggcagcaccggccatctacctagagagaattgcaaactaacgctgaagccaactcctcactggggagctccatgggggggagggagggccttcatcttaaaggagaatgggtgtccacaatcgcgcaatcgagcaagctcatcgttcctgttaaaacatttatggcatagagaaaagaaaaa

SEQ ID NO: 15895 - DNA, 2976 bp, Homo sapiens
  source 1..2976: mol_type = unassigned DNA
ctgagcatcatcagtctctggaaagccttctgaattagacaagggctgcctcccagcacagctacaaaacactttaaacctgaccagctaaatggataaacctagcctgcatagcttttaaactggggtctcatacagcacaggaggcctacttgcttcaagaactgaaaatccagaggatgaattgctttatctgggaatggcaaaagccagcacaataaggaatgccaggtttccatttaattacgcagctgaaaggcatgagtgtggtgctggtgctacttcctacactgctgcttgttatgctcacgggtgctcagagagcttgcccaaagaactgcagatgtgatggcaaaattgtgtactgtgagtctcatgctttcgcagatatccctgagaacatttctggagggtcacaaggcttatcattaaggttcaacagcattcagaagctcaaatccaatcagtttgccggccttaaccagcttatatggctttatcttgaccataattacattagctcagtggatgaagatgcatttcaagggatccgtagactgaaagaattaattctaagctccaacaaaattacttatctgcacaataaaacatttcacccagttcccaatctccgcaatctggacctctcctacaataagcttcagacattgcaatctgaacaatttaaaggccttcggaaactcatcattttgcacttgagatctaactcactaaagactgtgcccataagagtttttcaagactgtcggaatcttgattttttggatttgggttacaatcgtcttcgaagcttgtcccgaaatgcatttgctggcctcttgaagttaaaggagctccacctggagcacaaccagttttccaagatcaactttgctcattttccacgtctcttcaacctccgctcaatttacttacaatggaacaggattcgctccattagccaaggtttgacatggacttggagttccttacacaacttggatttatcagggaatgacatccaaggaattgagccgggcacatttaaatgcctccccaatttacaaaaattgaatttggattccaacaagctcaccaatatctcacaggaaactgtcaatgcgtggatatcattaatatccatcacattgtctggaaatatgtgggaatgcagtcggagcatttgtcctttattttattggcttaagaatttcaaaggaaataaggaaagcaccatgatatgtgcgggacctaagcacatccagggtgaaaaggttagtgatgcagtggaaacatataatatctgttctgaagtccaggtggtcaacacagaaagatcacacctggtgccccaaactccccagaaacctctgattatccctagacctaccatcttcaaacctgacgtcacccaatccacctttgaaacaccaagcccttccccagggtttcagattcctggcgcagagcaagagtatgagcatgtttcatttcacaaaattattgccgggagtgtggctctctttctctcagtggccatgatcctcttggtgatctatgtgtcttggaaacgctacccagccagcatgaaacaactccagcaacactctcttatgaagaggcggcggaaaaaggccagagagtctgaaagacaaatgaattcccctttacaggagtattatgtggactacaagcctacaaactctgagaccatggatatatcggttaatggatctgggccctgcacatataccatctctggctccagggaatgtgagatgccacaccacatgaagcccttgccatattacagctatgaccagcctgtgatcgggtactgccaggcccaccagccactccatgtcaccaagggctatgagacagtgtctccagagcaggacgaaagccccggcctggagctgggccgagaccacagcttcatcgccaccatcgccaggtcggcagcaccggccatctacctagagagaattgcaaactaacgctgaagccaactcctcactggggagctccatgggggggagggagggccttcatcttaaaggagaatgggtgtccacaatcgcgcaatcgagcaagctcatcgttcctgttaaaacatttatggcatagagaaaagaaaaagagaaaaaaaaactgcttgaagagggcagcgaatgcacctgcagcattaccgggaggactgcagaactttctttgctttaaaacataaaacaaacaaaaatgctcccggatgtaaatagtaagagtgtcaagttcttataaaaatagatttcaccctagctacatataggtttgtttgtatatttgatttttctacactgcatggttcctgggctggagaaccacaggggagcaaataaacaggggtgggtgggaagctagggaaacaaccgttttcctctttaggtgtgtgtaattctcacagattttatttaaattgctttcatttattttttctttaaaaatgctgtttgttcttgttttgtttgttttaatttttttctttcctggtcaagtttctaatacaaaacatgagcattaaagcttatgttgtaccaaaagaaaatgtgctttaccacggaccacggagaaagttgaccacaaagtttgacaaaactactggaaaacccaataagtctgggtgaatgacccttcatgacaaatgccatatatggtacatgatagaaggaattttgttttgtcccattggcagccctcactgtgtaggatgcctgagagagccatgaagatctccgaatgagaagaccagcagaatcattctcatgtggactaaggctataagagagatatgaccatgggctcaatgaatgaaactgccaagctgacaaatttctaaacacaagataatgtgtaacattgctttttaaattaattatcaattagcttttgtgtagtttttatcaataaaagaaaaaatattgaaaaataaatata

SEQ ID NO: 15896 - DNA, 2332 bp, Homo sapiens
  source 1..2332: mol_type = unassigned DNA
agagaaggggtatcaccgcttccggaccccggcctgtacttgaaggcaaagagaactacaaatcccagcgtcacccgcggccttgaagccccgcccctgacaaactgaaggtcccggtaagcatcgcgtcagtacttatggcgcctgccgggttgtggtgacgaaagcagttgccatggagttgctctgagtaaccctgaggcagtgggacgccaagactggagaggaagcgactgcggggagtatttccattttaaccggaaacaatccctgaacccacaggaatgaatgcctaatggtggagtttcagccatcagtgacaggctgaacccagactcccagggcacctgcttgcacctttgaatgatggcctgaactatgaacaaacgggactatatgaacacttcggtacaggagccccctcttgactactccttcagaagcatccacgtcattcaagatctggtaaatgaggagccaaggacaggactacgaccactgaagcgttcaaagtcggggaaatcactgacccagtccctgtggctgaataacaatgttctcaatgatctgagagacttcaaccaggtggcttcacagctgttggagcacccagagaacctggcctggatcgacctgtcctttaatgacctgacttccattgaccctgtcctaacaactttcttcaacctgagtgtcctctatcttcacggcaacagcatccagcgcctgggggaggtgaataagctggctgtccttcctcggctccgtagcctgacactccatgggaaccccatggaggaagagaaagggtataggcaatatgtgctgtgcaccctgtcccgtatcaccacgttcgacttcagtggggtcaccaaagcagaccgcaccacagctgaagtctggaaacgcatgaacatcaagcccaagaaggcctggaccaagcagaatacactttgaggctcccacgaccctagtagtcctaaaggcctaagcatagacagcatggtttgacaataaataatttgagctgttgagcagatgagaagtcacttacaccttgtagagatgttctctaactcaggcaactgcaagtagctctagccttttcttttcttttttttttttttgagacggagtctcactctgtcacacaggctggagtgcagtggcacgatcttggctcactgcaacctcagcctcccaggttcaagagattctcctgcctcagcctccccagtagctgtgattaaaggcgcctgccaccatgactggctaattttgttgttgttgttgttgttttgagacggtttcactcgtcaccccagctggagtgcagtggtgcgatctcagctcactgcaacctccgcctgctgggttcaagcgattctcctgcctcagcctcctgagtagctgggattacaggcgcctgctaccacatccagctaatttttttttttgagacggagtctcgctctgtcacccaggctggagtgcagtggcacgatctcggctcactgcaaactccgccttccaggttcacgccattctcctgcctcagcctcccaagtagctgggactataggcacctactaccacgcctggctaattttttgtatttttagtagagacggggtttcaccatgttagccaggatggtctccatctcctgaccttgtgatccacccacctcggcttcccccagctaattttttatattttagtagagacaaggtttcgccatgttggccaggctggtcttgaactcctgacctcaggtgatccgtctgctttggcctcccaaagtgctgggattagaagcgtgagccaccacgcccagcctttttttgtatttttagtagagatggggtttcgccatgttggccaggctggtctcaaactcctgacctcaggtgatctgcccacctcagcctcccaaagtgctaggattacaggataagccactgcacctggccagctctagtcttattttgctgaaaaagggaggcaattgagggaaaggcctgctggcctgggacactggagacgtgggtttaccacacagccttgggaaatttatctaactctctgggcccctttgtacttttcagcttagagatttgggggttaaagtagatcagtaatttccaaactcttcacagagtaccagggtctgtagagatgcctcacaggcctccatgacaggccaagaagatggcctatgatctctgaaaccagcccccacttcaatcagatcaaagtaattccattctgttttatatgctgggattctgcttaagatttcatttgataaaaagaatcttctgcttaaaaa

SEQ ID NO: 15897 - DNA, 3601 bp, Homo sapiens
  source 1..3601: mol_type = unassigned DNA
ctttcggactcggttatggaggaggccttccgctcgcagcggcctctccagcaccccttttaggcctgagcacccgcaggggtgcccaggccgcacgccaaacgcgggcccgcgccggttacctggctgcgcgctcccgctctgcctcgcgattctccggaatcgtacctcttcgtgggctcgcgccagcgctgtgagcgcacaattagtttaaactatggccccgccccctcgcgctgccctctgattggcctctgtcggcggggcccgcttaaggacccgggaaaaggaagtttgagggccactgggaaagagaaggggtatcaccgcttccggaccccggcctgtacttgaaggcaaagagaactacaaatcccagcgtcacccgcggccttgaagccccgcccctgacaaactgaaggtcccggtaagcatcgcgtcagtacttatggcgcctgccgggttgtggtgacgaaagcagttgccatggagttgctctgagtaaccctgaggcagtgggacgccaagactggagaggaagcgactgcggatctggtaaatgaggagccaaggacaggactacgaccactgaagcgttcaaagtcggggaaatcactgacccagtccctgtggctgaataacaatgttctcaatgatctgagagacttcaaccaggtggcttcacagctgttggagcacccagagaacctggcctggatcgacctgtcctttaatgacctgacttccattgaccctgtcctaacaactttcttcaacctgagtgtcctctatcttcacggcaacagcatccagcgcctgggggaggtgaataagctggctgtccttcctcggctccgtagcctgacactccatgggaaccccatggaggaagagaaagggtatagcaggccctggactccccgacctgtcctgtgctctggtcctccagcccagggcccaggtagggaccatgtcccctgccattgcattggccttcctgccactggtggtaacattgctggtgcggtaccggcactacttccgattgctggtgcgcacggtcttgctgcgaagcctccgagactgcctgtcagggctgcggatcgaggagcgggccttcagctacgtgctcacccatgccctgcccggtgaccctggtcacatcctcaccaccctggaccactggagcagccgctgcgagtacttgagccacatggggcctgtcaaaggtcagatcctgatgcggctggtggaggagaaggcccctgcttgtgtgctggaattgggaacctactgtggatactctaccctgcttattgcccgagccctgccccctgggggtcgccttcttactgtggagcgggacccacgcacggcagcagtggctgaaaaactcatccgcctggccggctttgatgagcacatggtggagctcatcgtgggcagctcagaggacgtgatcccgtgcctacgcacccagtatcagctgagtcgggcagacctggtgctcctggcacaccggccacgatgttacctgagggacctgcagctgctggaggcccatgccctactgccagcaggtgccaccgtgctggctgaccatgtgctcttccctggtgcaccccgcttcttgcagtatgctaagagctgtggccgctaccgctgccgcctccaccacactggccttccagacttccctgccatcaaggatggaatagctcagctcacctatgctggaccaggctgaggtccaggcccaggggtacttactgatgcccacccccacccccacccaagcagggacctcaaaatcccctccctttcctgtttggggccttgacacacgctgggctcagggctagggagtctctcttcccacctctgacctctttcagcctctacactgacctcaagtgtcaagttctatcaggctgcttggtctcactaggccccctctttccagagagaaccatggactgacagcaagaagcctgagctcccgacccagctctgtcactgatttgctgagtgactccaagggaatccccaccttgctctgagatttaatcttctctcttaacacgaaggaagctggatgggagagctccaggggcctcccagttctcggcctcagaaagcctcccatcctcagcccatgccattctgggtgggatcagaggaagtggcaatgagttagacgccctgcaggaatagctggatgcaagctgggccagagaaaatggcacagaaccctggacccagggccagggatgccctggccttccctaactctggcccacctagccaattaggtgtggctgatgtcccttgagtgccctcttcctaaagcccaaaagaagatgctggactcctctgggccccaccaacaaatagggaatagacatgggtggaaaatcactcctttgtctttattaaagaaacttagaccagacctggcaatcaaggggtgaggtactggccaggaaggtggagtaggtttcaggccctggggatttcaagtgcagactgatggcctgggaggggccaaagagaccagatcctggcagcagctgaggaggtgcccaagggcactttcaggcactggggccatcagctggttctgtgggcaggggttgggggttgggatgcagggtagtttgggctggcctggaatctccctgaggccaccctgccttgtctacctagatcatccactggtcctgatcctgttcgttgccttccatgtccacctggagaggaggctgggtgtgggtggggaggggcctcagccagcctcagccccagatcctgcccctggctggatccagggtttctgtaccccttggccatcaactgggtcaggagcaagggtccaggaacagaggccctcccccataccccttgcctacctcattgacctctccatcatccggtgactcattgtagtcattcatctcgtccatgtcctgcatatcctcatcatcctctgagtcctcttcactatcctcatcatcttcatcatcctcttcttcctcgtcatcatagtgctggtgggcaggacagagcctgtaagccctacaggcctgcatggaccagttcaagaactgacccacttgagcctctctctagggccaatgaatgaccccctaccccgacactccctccttgagtctagcaggctggtgcatgttctgcaggaccttaatgctaggcccaatgcccaccccttctatctccccttttaggcttttacccagatctgagaaccacaactgctctgggtcagagacaggacattcagaattagagcagagcctcggtccactgcggcccccacacaggccccacctgctagagccactcacctctgaggctggcttgccaataggaaccaggttgttgtctttctccgcgatgctttggagctgtgggcaaaggcacagaggaacaaggccagagcccaagtagggcaggtcaggggcatgggactggcccattctgcccagaagacaacccacacgtgttggggagaagcttcctcccagttctcagggagatacaatccctttcttgtcatctgccatttatgaacttgatccaa

SEQ ID NO: 15898 - DNA, 2402 bp, Homo sapiens
  source 1..2402: mol_type = unassigned DNA
ccaagactggagaggaagcgactgcggggagtatttccattttaaccggaaacaatccctgaacccacaggaatgaatgcctaatggtggagtttcagccatcagtgacaggctgaacccagactcccagggcacctgcttgcacctttgaatgatggcctgaactatgaacaaacgggactatatgaacacttcggtacaggagccccctcttgactactccttcagaagcatccacgtcattcaagatctggtaaatgaggagccaaggacaggactacgaccactgaagcgttcaaagtcggggaaatcactgacccagtccctgtggctgaataacaatgttctcaatgatctgagagacttcaaccaggtggcttcacagctgttggagcacccagagaacctggcctggatcgacctgtcctttaatgacctgacttccattgaccctgtcctaacaactttcttcaacctgagtgtcctctatcttcacggcaacagcatccagcgcctgggggaggtgaataagctggctgtccttcctcggctccgtagcctgacactccatgggaaccccatggaggaagagaaagggtataggtaagtgccctgcccctggaggtagcgtctagctgggctcccctaaaggaaaggaggaggagaaacaagaaatctacgaccattcttctgccatgcttggacctgggaagggagtaacagacctctaagcattccttgctctcagtcaggataaacctaatctttcccaaactatgctcaagtccctccattccttgcagtcagggaagacaacagcaactagtggagggggaaggggattctggtgggggtgctggcccccagcctaagtcttccccacaggcaatatgtgctgtgcaccctgtcccgtatcaccacgttcgacttcagtggggtcaccaaagcagaccgcaccacagctgaagtctggaaacgcatgaacatcaagcccaagaaggcctggaccaagcagaatacactttgaggctcccacgaccctagtagtcctaaaggcctaagcatagacagcatggtttgacaataaataatttgagctgttgagcagatgagaagtcacttacaccttgtagagatgttctctaactcaggcaactgcaagtagctctagccttttcttttcttttttttttttttgagacggagtctcactctgtcacacaggctggagtgcagtggcacgatcttggctcactgcaacctcagcctcccaggttcaagagattctcctgcctcagcctccccagtagctgtgattaaaggcgcctgccaccatgactggctaattttgttgttgttgttgttgttttgagacggtttcactcgtcaccccagctggagtgcagtggtgcgatctcagctcactgcaacctccgcctgctgggttcaagcgattctcctgcctcagcctcctgagtagctgggattacaggcgcctgctaccacatccagctaatttttttttttgagacggagtctcgctctgtcacccaggctggagtgcagtggcacgatctcggctcactgcaaactccgccttccaggttcacgccattctcctgcctcagcctcccaagtagctgggactataggcacctactaccacgcctggctaattttttgtatttttagtagagacggggtttcaccatgttagccaggatggtctccatctcctgaccttgtgatccacccacctcggcttcccccagctaattttttatattttagtagagacaaggtttcgccatgttggccaggctggtcttgaactcctgacctcaggtgatccgtctgctttggcctcccaaagtgctgggattagaagcgtgagccaccacgcccagcctttttttgtatttttagtagagatggggtttcgccatgttggccaggctggtctcaaactcctgacctcaggtgatctgcccacctcagcctcccaaagtgctaggattacaggataagccactgcacctggccagctctagtcttattttgctgaaaaagggaggcaattgagggaaaggcctgctggcctgggacactggagacgtgggtttaccacacagccttgggaaatttatctaactctctgggcccctttgtacttttcagcttagagatttgggggttaaagtagatcagtaatttccaaactcttcacagagtaccagggtctgtagagatgcctcacaggcctccatgacaggccaagaagatggcctatgatctctgaaaccagcccccacttcaatcagatcaaagtaattccattctgttttatatgctgggattctgcttaagatttcatttgataaaaagaatcttctgcttaaaaa

SEQ ID NO: 15899 - DNA, 3705 bp, Homo sapiens
  source 1..3705: mol_type = unassigned DNA
ctttcggactcggttatggaggaggccttccgctcgcagcggcctctccagcaccccttttaggcctgagcacccgcaggggtgcccaggccgcacgccaaacgcgggcccgcgccggttacctggctgcgcgctcccgctctgcctcgcgattctccggaatcgtacctcttcgtgggctcgcgccagcgctgtgagcgcacaattagtttaaactatggccccgccccctcgcgctgccctctgattggcctctgtcggcggggcccgcttaaggacccgggaaaaggaagtttgagggccactgggaaagagaaggggtatcaccgcttccggaccccggcctgtacttgaaggcaaagagaactacaaatcccagcgtcacccgcggccttgaagccccgcccctgacaaactgaaggtcccggtaagcatcgcgtcagtacttatggcgcctgccgggttgtggtgacgaaagcagttgccatggagttgctctgagtaaccctgaggcagtgggacgccaagactggagaggaagcgactgcggggagtatttccattttaaccggaaacaatccctgaacccacaggaatgaatgcctaatggtggagtttcagccatcagtgacaggctgaacccagactcccagggcacctgcttgcacctttgaatgatggcctgaactatgaacaaacgggactatatgaacacttcggtacaggagccccctcttgactactccttcagaagcatccacgtcattcaagatctggtaaatgaggagccaaggacaggactacgaccactgaagcgttcaaagtcggggaaatcactgacccagtccctgtggctgaataacaatgttctcaatgatctgagagacttcaaccaggtggcttcacagctgttggagcacccagagaacctggcctggatcgacctgtcctttaatgacctgacttccattgaccctgtcctaacaactttcttcaacctgagtgtcctctatcttcacggcaacagcatccagcgcctgggggaggtgaataagctggctgtccttcctcggctccgtagcctgacactccatgggaaccccatggaggaagagaaagggtatagcaggccctggactccccgacctgtcctgtgctctggtcctccagcccagcctccgagactgcctgtcagggctgcggatcgaggagcgggccttcagctacgtgctcacccatgccctgcccggtgaccctggtcacatcctcaccaccctggaccactggagcagccgctgcgagtacttgagccacatggggcctgtcaaaggtcagatcctgatgcggctggtggaggagaaggcccctgcttgtgtgctggaattgggaacctactgtggatactctaccctgcttattgcccgagccctgccccctgggggtcgccttcttactgtggagcgggacccacgcacggcagcagtggctgaaaaactcatccgcctggccggctttgatgagcacatggtggagctcatcgtgggcagctcagaggacgtgatcccgtgcctacgcacccagtatcagctgagtcgggcagacctggtgctcctggcacaccggccacgatgttacctgagggacctgcagctgctggaggcccatgccctactgccagcaggtgccaccgtgctggctgaccatgtgctcttccctggtgcaccccgcttcttgcagtatgctaagagctgtggccgctaccgctgccgcctccaccacactggccttccagacttccctgccatcaaggatggaatagctcagctcacctatgctggaccaggctgaggtccaggcccaggggtacttactgatgcccacccccacccccacccaagcagggacctcaaaatcccctccctttcctgtttggggccttgacacacgctgggctcagggctagggagtctctcttcccacctctgacctctttcagcctctacactgacctcaagtgtcaagttctatcaggctgcttggtctcactaggccccctctttccagagagaaccatggactgacagcaagaagcctgagctcccgacccagctctgtcactgatttgctgagtgactccaagggaatccccaccttgctctgagatttaatcttctctcttaacacgaaggaagctggatgggagagctccaggggcctcccagttctcggcctcagaaagcctcccatcctcagcccatgccattctgggtgggatcagaggaagtggcaatgagttagacgccctgcaggaatagctggatgcaagctgggccagagaaaatggcacagaaccctggacccagggccagggatgccctggccttccctaactctggcccacctagccaattaggtgtggctgatgtcccttgagtgccctcttcctaaagcccaaaagaagatgctggactcctctgggccccaccaacaaatagggaatagacatgggtggaaaatcactcctttgtctttattaaagaaacttagaccagacctggcaatcaaggggtgaggtactggccaggaaggtggagtaggtttcaggccctggggatttcaagtgcagactgatggcctgggaggggccaaagagaccagatcctggcagcagctgaggaggtgcccaagggcactttcaggcactggggccatcagctggttctgtgggcaggggttgggggttgggatgcagggtagtttgggctggcctggaatctccctgaggccaccctgccttgtctacctagatcatccactggtcctgatcctgttcgttgccttccatgtccacctggagaggaggctgggtgtgggtggggaggggcctcagccagcctcagccccagatcctgcccctggctggatccagggtttctgtaccccttggccatcaactgggtcaggagcaagggtccaggaacagaggccctcccccataccccttgcctacctcattgacctctccatcatccggtgactcattgtagtcattcatctcgtccatgtcctgcatatcctcatcatcctctgagtcctcttcactatcctcatcatcttcatcatcctcttcttcctcgtcatcatagtgctggtgggcaggacagagcctgtaagccctacaggcctgcatggaccagttcaagaactgacccacttgagcctctctctagggccaatgaatgaccccctaccccgacactccctccttgagtctagcaggctggtgcatgttctgcaggaccttaatgctaggcccaatgcccaccccttctatctccccttttaggcttttacccagatctgagaaccacaactgctctgggtcagagacaggacattcagaattagagcagagcctcggtccactgcggcccccacacaggccccacctgctagagccactcacctctgaggctggcttgccaataggaaccaggttgttgtctttctccgcgatgctttggagctgtgggcaaaggcacagaggaacaaggccagagcccaagtagggcaggtcaggggcatgggactggcccattctgcccagaagacaacccacacgtgttggggagaagcttcctcccagttctcagggagatacaatccctttcttgtcatctgccatttatgaacttgatccaaata

SEQ ID NO: 15900 - DNA, 3822 bp, Homo sapiens
  source 1..3822: mol_type = unassigned DNA
ctttcggactcggttatggaggaggccttccgctcgcagcggcctctccagcaccccttttaggcctgagcacccgcaggggtgcccaggccgcacgccaaacgcgggcccgcgccggttacctggctgcgcgctcccgctctgcctcgcgattctccggaatcgtacctcttcgtgggctcgcgccagcgctgtgagcgcacaattagtttaaactatggccccgccccctcgcgctgccctctgattggcctctgtcggcggggcccgcttaaggacccgggaaaaggaagtttgagggccactgggaaagagaaggggtatcaccgcttccggaccccggcctgtacttgaaggcaaagagaactacaaatcccagcgtcacccgcggccttgaagccccgcccctgacaaactgaaggtcccggtaagcatcgcgtcagtacttatggcgcctgccgggttgtggtgacgaaagcagttgccatggagttgctctgagtaaccctgaggcagtgggacgccaagactggagaggaagcgactgcggggagtatttccattttaaccggaaacaatccctgaacccacaggaatgaatgcctaatggtggagtttcagccatcagtgacaggctgaacccagactcccagggcacctgcttgcacctttgaatgatggcctgaactatgaacaaacgggactatatgaacacttcggtacaggagccccctcttgactactccttcagaagcatccacgtcattcaagatctggtaaatgaggagccaaggacaggactacgaccactgaagcgttcaaagtcggggaaatcactgacccagtccctgtggctgaataacaatgttctcaatgatctgagagacttcaaccaggtggcttcacagctgttggagcacccagagaacctggcctggatcgacctgtcctttaatgacctgacttccattgaccctgtcctaacaactttcttcaacctgagtgtcctctatcttcacggcaacagcatccagcgcctgggggaggtgaataagctggctgtccttcctcggctccgtagcctgacactccatgggaaccccatggaggaagagaaagggtatagcaggccctggactccccgacctgtcctgtgctctggtcctccagcccagggcccaggtagggaccatgtcccctgccattgcattggccttcctgccactggtggtaacattgctggtgcggtaccggcactacttccgattgctggtgcgcacggtcttgctgcgaagcctccgagactgcctgtcagggctgcggatcgaggagcgggccttcagctacgtgctcacccatgccctgcccggtgaccctggtcacatcctcaccaccctggaccactggagcagccgctgcgagtacttgagccacatggggcctgtcaaaggtcagatcctgatgcggctggtggaggagaaggcccctgcttgtgtgctggaattgggaacctactgtggatactctaccctgcttattgcccgagccctgccccctgggggtcgccttcttactgtggagcgggacccacgcacggcagcagtggctgaaaaactcatccgcctggccggctttgatgagcacatggtggagctcatcgtgggcagctcagaggacgtgatcccgtgcctacgcacccagtatcagctgagtcgggcagacctggtgctcctggcacaccggccacgatgttacctgagggacctgcagctgctggaggcccatgccctactgccagcaggtgccaccgtgctggctgaccatgtgctcttccctggtgcaccccgcttcttgcagtatgctaagagctgtggccgctaccgctgccgcctccaccacactggccttccagacttccctgccatcaaggatggaatagctcagctcacctatgctggaccaggctgaggtccaggcccaggggtacttactgatgcccacccccacccccacccaagcagggacctcaaaatcccctccctttcctgtttggggccttgacacacgctgggctcagggctagggagtctctcttcccacctctgacctctttcagcctctacactgacctcaagtgtcaagttctatcaggctgcttggtctcactaggccccctctttccagagagaaccatggactgacagcaagaagcctgagctcccgacccagctctgtcactgatttgctgagtgactccaagggaatccccaccttgctctgagatttaatcttctctcttaacacgaaggaagctggatgggagagctccaggggcctcccagttctcggcctcagaaagcctcccatcctcagcccatgccattctgggtgggatcagaggaagtggcaatgagttagacgccctgcaggaatagctggatgcaagctgggccagagaaaatggcacagaaccctggacccagggccagggatgccctggccttccctaactctggcccacctagccaattaggtgtggctgatgtcccttgagtgccctcttcctaaagcccaaaagaagatgctggactcctctgggccccaccaacaaatagggaatagacatgggtggaaaatcactcctttgtctttattaaagaaacttagaccagacctggcaatcaaggggtgaggtactggccaggaaggtggagtaggtttcaggccctggggatttcaagtgcagactgatggcctgggaggggccaaagagaccagatcctggcagcagctgaggaggtgcccaagggcactttcaggcactggggccatcagctggttctgtgggcaggggttgggggttgggatgcagggtagtttgggctggcctggaatctccctgaggccaccctgccttgtctacctagatcatccactggtcctgatcctgttcgttgccttccatgtccacctggagaggaggctgggtgtgggtggggaggggcctcagccagcctcagccccagatcctgcccctggctggatccagggtttctgtaccccttggccatcaactgggtcaggagcaagggtccaggaacagaggccctcccccataccccttgcctacctcattgacctctccatcatccggtgactcattgtagtcattcatctcgtccatgtcctgcatatcctcatcatcctctgagtcctcttcactatcctcatcatcttcatcatcctcttcttcctcgtcatcatagtgctggtgggcaggacagagcctgtaagccctacaggcctgcatggaccagttcaagaactgacccacttgagcctctctctagggccaatgaatgaccccctaccccgacactccctccttgagtctagcaggctggtgcatgttctgcaggaccttaatgctaggcccaatgcccaccccttctatctccccttttaggcttttacccagatctgagaaccacaactgctctgggtcagagacaggacattcagaattagagcagagcctcggtccactgcggcccccacacaggccccacctgctagagccactcacctctgaggctggcttgccaataggaaccaggttgttgtctttctccgcgatgctttggagctgtgggcaaaggcacagaggaacaaggccagagcccaagtagggcaggtcaggggcatgggactggcccattctgcccagaagacaacccacacgtgttggggagaagcttcctcccagttctcagggagatacaatccctttcttgtcatctgccatttatgaacttgatccaa

SEQ ID NO: 15901 - DNA, 983 bp, Homo sapiens
  source 1..983: mol_type = unassigned DNA
agagaaggggtatcaccgcttccggaccccggcctgtacttgaaggcaaagagaactacaaatcccagcgtcacccgcggccttgaagccccgcccctgacaaactgaaggtcccggtaagcatcgcgtcagtacttatggcgcctgccgggttgtggtgacgaaagcagttgccatggagttgctctgagtaaccctgaggcagtgggacgccaagactggagaggaagcgactgcggggagtatttccattttaaccggaaacaatccctgaacccacaggaatgaatgcctaatggtggagtttcagccatcagtgacaggctgaacccagactcccagggcacctgcttgcacctttgaatgatggcctgaactatgaacaaacgggactatatgaacacttcggtacaggagccccctcttgactactccttcagaagcatccacgtcattcaagatctggtaaatgaggagccaaggacaggactacgaccactgaagcgttcaaagtcggggaaatcactgacccagtccctgtggctgaataacaatgttctcaatgatctgagagacttcaaccaggtggcttcacagctgttggagcacccagagaacctggcctggatcgacctgtcctttaatgacctgacttccattgaccctgtcctaacaactttcttcaacctgagtgtcctctatcttcacggcaacagcatccagcgcctgggggaggtgaataagctggctgtccttcctcggctccgtagcctgacactccatgggaaccccatggaggaagagaaagggtatagagtaccagggtctgtagagatgcctcacaggcctccatgacaggccaagaagatggcctatgatctctgaaaccagcccccacttcaatcagatcaaagtaattccattctgttttatatgctgggattctgcttaagatttcatttgataaaaagaatcttctgctt

SEQ ID NO: 15902 - DNA, 842 bp, Homo sapiens
  source 1..842: mol_type = unassigned DNA
tttcggactcggttatggaggaggccttccgctcgcagcggcctctccagcaccccttttaggcctgagcacccgcaggggtgcccaggccgcacgccaaacgcgggcccgcgccggttacctggctgcgcgctcccgctctgcctcgcgattctccggaatcgtacctcttcgtgggctcgcgccagcgctgtgagcgcacaattagtttaaactatggccccgccccctcgcgctgccctctgattggcctctgtcggcggggcccgcttaaggacccgggaaaaggaagtttgagggccactgggaaagagaaggggtatcaccgcttccggaccccggcctgtacttgaaggcaaagagaactacaaatcccagcgtcacccgcggccttgaagccccgcccctgacaaactgaaggtcccgggagtatttccattttaaccggaaacaatccctgaacccacaggaatgaatgcctaatggtggagtttcagccatcagtgacaggctgaacccagactcccagggcacctgcttgcacctttgaatgatggcctgaactatgaacaaacgggactatatgaacacttcggtacaggagccccctcttgactactccttcagaagcatccacgtcattcaagatctggtaaatgaggagccaaggacaggactacgaccactgaagcgttcaaagtcggggaaatcactgacccagtccctgtggctgaataacaatgttctcaatgatctgagagacttcaaccaggtggcttcacagctgttggagcacccagagaacctggcctggatcgacctgtcctttaatgacctgactt

SEQ ID NO: 15903 - DNA, 814 bp, Homo sapiens
  source 1..814: mol_type = unassigned DNA
gaggcagtgggacgccaagactggagaggaagcgactgcgggaatgaatgcctaatggtggagtttcagccatcagtgacaggctgaacccagactcccagggcacctgcttgcacctttgaatgatggcctgaactatgaacaaacgggactatatgaacacttcggtacaggagccccctcttgactactccttcagaagcatccacgtcattcaagatctggtaaatgaggagccaaggacaggactacgaccactgaagcgttcaaagtcggggaaatcactgacccagtccctgtggctgaataacaatgttctcaatgatctgagagacttcaaccaggtggcttcacagctgttggagcacccagagaacctggcctggatcgacctgtcctttaatgacctgacttccattgaccctgtcctaacaactttcttcaacctgagtgtcctctatcttcacggcaacagcatccagcgcctgggggaggtgaataagctggctgtccttcctcggctccgtagcctgacactccatgggaaccccatggaggaagagaaagggtataggcaatatgtgctgtgcaccctgtcccgtatcaccacgttcgacttcagtggggtcaccaaagcagaccgcaccacagctgaagtctggaaacgcatgaacatcaagcccaagaaggcctggaccaagcagaatacactttgaggctcccacgaccctagtagtcctaaaggcctaagcatagacagcatggtttgacaataaataatttgagctgttgagcagatgagaagtcacttaca

SEQ ID NO: 15904 - DNA, 726 bp, Homo sapiens
  source 1..726: mol_type = unassigned DNA
aacaatccctgaacccacaggaatgaatgcctaatggtggagtttcagccatcagtgacaggctgaacccagactcccagggcacctgcttgcacctttgaatgatggcctgaactatgaacaaacgggactatatgaacacttcggtacaggagccccctcttgactactccttcagaagcatccacgtcattcaagatctggtaaatgaggagccaaggacaggactacgaccactgaagcgttcaaagtcggggaaatcactgacccagtccctgtggctgaataacaatgttctcaatgatctgagagacttcaaccaggtggcttcacagctgttggagcacccagagaacctggcctggatcgacctgtcctttaatgacctgacttccattgaccctgtcctaacaactttcttcaacctgagtgtcctctatcttcacggcaacagcatccagcgcctgggggaggtgaataagctggctgtccttcctcggctccgtagcctgacactccatgggaaccccatggaggaagagaaagggtatagagtaccagggtctgtagagatgcctcacaggcctccatgacaggccaagaagatggcctatgatctctgaaaccagcccccacttcaatcagatcaaagtaattccattctgttttatatgctgggattctgcttaagatttcatttgataaaaagaatcttctgcttaaaaa

SEQ ID NO: 15905 - DNA, 527 bp, Homo sapiens
  source 1..527: mol_type = unassigned DNA
ctatattccaagcagacagagctggaaggagacactgttccacttagaggcccagtggcaggtgcagggaacttatgggagtatttccattttaaccggaaacaatccctgaacccacaggaatgaatgcctaatggtggagtttcagccatcagtgacaggctgaacccagactcccagggcacctgcttgcacctttgaatgatggcctgaactatgaacaaacgggactatatgaacacttcggtacaggagccccctcttgactactccttcagaagcatccacgtcattcaagatctggtaaatgaggagccaaggacaggactacgaccactgaagcgttcaaagtcggggaaatcactgacccagtccctgtggctgaataacaatgttctcaatgatctgagagacttcaaccaggtggcttcacagctgttggagcacccagagaacctggcctggatcgacctgtcctttaatgacctgacttccattgaccctgtcctaacaactttcttcaacct

SEQ ID NO: 15906 - DNA, 1270 bp, Homo sapiens
  source 1..1270: mol_type = unassigned DNA
agcagttgccatggagttgctctgagtaaccctgaggcagtgggacgccaagactggagaggaagcgactgcggggagtatttccattttaaccggaaacaatccctgaacccacaggaatgaatgcctaatggtggagtttcagccatcagtgacagatctggtaaatgaggagccaaggacaggactacgaccactgaagcgttcaaagtcggggaaatcactgacccagtccctgtggctgaataacaatgttctcaatgatctgagagacttcaaccaggtggcttcacagctgttggagcacccagagaacctggcctggatcgacctgtcctttaatgacctgacttccattgaccctgtcctaacaactttcttcaacctgagtgtcctctatcttcacggcaacagcatccagcgcctgggggaggtgaataagctggctgtccttcctcggctccgtagcctgacactccatgggaaccccatggaggaagagaaagggtataggcaatatgtgctgtgcaccctgtcccgtatcaccacgttcgacttcagtggggtcaccaaagcagaccgcaccacagctgaagtctggaaacgcatgaacatcaagcccaagaaggcctggaccaagcagaatacactttgaggctcccacgaccctagtagtcctaaaggcctaagcatagacagcatggtttgacaataaataatttgagctgttgagcagatgagaagtcacttacaccttgtagagatgttctctaactcaggcaactgcaagtagctctagccttttcttttcttttttttttttttgagacggagtctcactctgtcacacaggctggagtgcagtggcacgatcttggctcactgcaacctcagcctcccaggttcaagagattctcctgcctcagcctccccagtagctgtgattaaaggcgcctgccaccatgactggctaattttgttgttgttgttgttgttttgagacggtttcactcgtcaccccagctggagtgcagtggtgcgatctcagctcactgcaacctccgcctgctgggttcaagcgattctcctgcctcagcctcctgagtagctgggattacaggcgcctgctaccacatccagctaatttttttttttgagacggagtctcgctctgtcacccaggctggagtgcagtggcacgatctcggctcactgcaaactccgccttccaggttcacgccattctcctgcctcagcctcccaagtagct

SEQ ID NO: 15907 - DNA, 8898 bp, Homo sapiens
  source 1..8898: mol_type = unassigned DNA
gagagcgcgcccggcaccggcggcttcccaggcccgcggccggctggcggcgcggagctgtcactgcggcaaacggcgaacgcgccggccccctcccccgccgcccgcaagcctggtgcagtcggcccatgagtatttcatgaagtgccgcagccggattcatggctcactggcgcaggaggggagagaggctgagtcctgtcaagcgccagcgccccacccgtcacggagcgcacgccgcgggggccaggctggggagggaagggtgtccagccctctcttttgggtggtgagatgctgaggcctgagggtttctagggcgcctagcacaggacccagctacggaggcaataaaaacttggtggagtctaagtcctgggaagggaaaaaaaggacggagggggcggggcctacagacaaccccgcccatcacaaagaccccgccttccagaacgctgacgtcacaatttggccccgcccctcattgtcagtcccgcggagccagaggaggcgccggtcgctggcagctgagcggcggaacccttcgctggcgggagcgcggttcggggccgcagaggtcaagagacaactgcctttgaaagagagtgagtgactgtttccaaaacagcaagcatagggagagccgccggaagtattgacggaaagcttgaattacctacatgattgatgatggtctccagctgtcaaagaagattgtggttgccaagagaaaggtaaccatttctcatccccttgagtggaattggatgcctctaggagcccacattggctggcagtagacatggccgaatttacaagctacaaggagacggcctccagccgccacttgcggtttaagctacagagtctaagccgccgccttgatgagttggaggaagccacaaaaaacctccagaaagcagaggatgaactcctggatctccaggacaaggtgattcaggcagaaggtagcaactccagcatgttggcggagattgaagtgctgcgccagcgggtgctgagaattgaaggcaaagacgaggaaattaagagagcagaggatctgtgtcgtctgatgaaggagaaacttgaagaggaagaaaacctcacccgggagctgaaatctgagattgagcggcttcagaaacgaatggctgaattagagaagctagaagaggccttcagcaggagtaagaatgactgtacccagctgtgtctgagcctgaatgaggagagaaatctgaccaagaaaatctcctctgagctggaaatgctcagagtcaaagtgaaagaactagaatcttctgaggaccgcctggataaaactgagcagagtttagcgtcagagttagaaaagctgaaatcattaactctgagctttgtaagtgagagaaaatacttgaatgaaaaggagaaagaaaatgagaaattgataaaagaactcactcaaaaactagagcagaacaaaaaaatgaaccgagattatacaaggaatgcttctaatctggaaagaaatgacctacggattgaggatggcatctcttccacactgccgtccaaagaatcaagaaggaagggtggtctggactacctaaagcaggtagagaatgaaacaagaaacaaatcagaaaatgaaaagaaccgcaatcaggaagacaacaaagtcaaagaccttaaccaagagattgagaaacttaagacacaaatcaaacactttgaatcgttggaagaagagcttaagaaaatgaagtccaaaaataacgaccttcaggataattacctaagtgaacaaaataaaaacaaattattagccagccaactggaggagataaagctacaaatcaagaaacagaaagagttagaaaatggagaggtagaaggggaagatgctttcctgtccagcaaaggcagacatgagaggactaagtttagaggccacggaagtgaagcttctgtgtccaagcacacagcgcgggaactgtctcctcagcataagcgggaacgactccggaacagggagtttgctctcaacaatgaaaactattctctgagcaacaggcaggtttcttctcccagtttcaccaacaggagggcagcaaaagcttctcacatgggggtgagtacagacagtgggactcaggagacaaagaaaactgaagaccggtttgtacccggctcctcccagagcgaagggaagaagtctagggagcagccctcagtgctgagtcgctaccccccggctgctcaggagcacagtaaagcgtggaaggggacttccaagccaggcaccgagagcggactgaagggaaaagtggagaagacaacacgaacgtttagtgacaccacccatggatctgttcccagtgacccattgggtagagctgacaaggcttctgacacctcctctgagactgtctttggcaagaggggacacgtgcttggcaacggaagtcaagtaactcaggctgcaaactctggctgttctaaggccattggagccctggcctcatctcgaagatcctcctcagaagggctctctaaaggcaaaaaggctgccaatggccttgaggctgataacagttgcccgaattccaaggctcctgttctatcgaagtatccttatagctgtagaagccaagagaacatccttcagggattttcaacctcacataaagaaggggttaatcaacctgcagcagttgtgatggaagacagcagtccgcatgaagccttgaggtgtcgagtcatcaaatccagtggcagagagaagccagactcagatgatgacttggacatagcatctcttgttactgccaagttggtaaatacaaccatcactccagagccagagcccaaaccacagcctaactctagagaaaaggctaaaacccgaggggcacctagaacctccctatttgagaatgataaagatgctggaatggagaatgaatctgtgaaatctgtcagagcctccaccaataccatggagctcccagataccaatggtgctggggtaaaaagccaaaggccctttagccccagagaggcgttgcggtctagagccatcatcaaacctgttattgttgataaggatgtgaaaaaaatcatgggaggatctggaacagagactacgttggagaaacagaaacccgtctccaaaccagggccaaacaaagtgacaagtagcattactatatatccatctgacagcagcagccccagagctgctccgggtgaggccctgagggagaggcacacatccactagcaatatccaggtggggctggcagagctcacatcagttagcaaccatgtcagctccccttttgagctctccattcacaaacatgacatcaccctgcagcttgcagaagcggagagaatggcagatgggcccctgaaggacaggccagaaacagtggtctctcggagcagcattataatcaagccatcggatcctgtggagaggaatagccatgcacctccagcggagacaatcaggtggaaaagccatagtgccccttcagaagtgggcttctcagatgccagacatgttactgtgcggaatgcctggaagagtaggcgagacttgaaatctttagaagaccccccaactcgaataggtaaaaacgtggaatctaccaatagcaatgcctacacccagaggtcttccacagacttctcagaactcgaacagcccaggtcctgcctttttgagcagggcactcgaagggtaggaccaagttcaggggatgcccctgagccctcctccagaaggacccaaagtagcctcactgtgtcagaggtgcttacccgtcggaatcgggtaggagacaccatcactgtcgcagcctggaaccactcagcaagcatggaggaagaaggggaagactgtacactcagtgtctacaggcaactgcacaactccctggatccgtctgaactgcctgggaagcaggggctgccagagtctgggcgagtacgggccgaggaacgattacggccaaccaggccctgtgctgaggagaactgagcccgctgggtgtctgttgtctgccctctgctcctgcttctcagctcttccaccgtcctgccccacgaaggatccaaggccagttaaccaggcaagacacaagccttggctggaaaactgtggtagagccgggctgtggctcaggtaatttttgccatttggccagagggaatcagagactacaagctggacagtcacccaggcccaaccttccccaatgcacgagtcctctctctctccttgtccctgtccaccaagtagttggaccattctggcccccaaacaagggaagataaagtccccagcacacagcaggagtcaaaaattcttctcggctccttggtgggttgtttctggatcctagggcagcctctgtctgtgtggttaatgttctggtttctcagtctcctcactatatccacttcactcctcatttgcccaatgggctcaagtaccccataagatttaccagccatcagctctatctagggggctttcatttctttccccttggagttcttttcttcagacttaaagcagaaaggggtctgtgctgcctctaaaggattatgagactaccctttaggttgaagtttgacctggctcctggcttaccagtctcctggaagcagagcatgcagatactcatgcggatacccattggaatgacatcatccctccccaaccccagctctctctgctcaccttccaaaggcacctggaggtgcaagcctcatgcatctcctttcctgagcaccagtaatgctgctggcatcgcctgctttctctccagtggctggagacttcaagctgacttcattgtttccaccttgggaaaatccctaggctaagctgggcctgacccagcatcctctgccttctaggaagtgcccagcaagagggaaagcagacccctttagtcactccacaagcaatagctccatgagaggcatggactgtgagactactccctcctgttcctccttctccatcccccatggaggaggcatcgcactttaccaagctgatgcattcctacagaagtgggccccggatttctgcaagtcgactatcatgatgacttcgctggaggaaaggtgatacgtacatacgcattgagggcctcagctttatatagttcaaaatgcagcaaacttttcagaaagccacgtaaataaattggttaggttccttataccagtcacatggggaagttgaaaagaattgtatattcttggcagtgctttttctttagcattctgtcaattcaaagaagggatcctctttcaaaggctacctttatgaagtagacactattgccctcagaatgagagaacattaaactaccagtctggtaagctggatttttttccccatggctttacttccttgctgtgtgaccttgggtgagtcattgtcttcttggagcctcagtttccctgtctgtaaaatgagttctttgaaatggatgatctctaagggcaccaaatctggtattctaaggttctcctgttttcaccatctataatagtatgggatgatttttgcttgtggaaggtatcatccgtgtgggttcttccctcctgccctcaattgtttttctgggccttgttttttagtttctgtatgttttaatctcatggggatgagctcagagaagctccgtgggcctgtttcccaatctgcaaagtgtgaagggattagatgggatggtctctgaggctctttgtggcatcagccttgcccagtgccacacagtatctcctggcgttctaggagtctaggtattatggaaagtacccaagtctgtgtatctcctgttcctgtgcatctcctatgaatttcctggcaagaggaagactcaagacttcctccagaggaatttgtcttctctgccttcactcagcatgggaaccagtgttcatcctgaccttgtctgtatcagatttggcagtgaggaggcttggggagcacctaccttactttcagggacaggaatctattgctcatacttctgcttcccagagttttgccaatctaaaggcattgtcatgtggcctgcctttcctgtccacatccccacctctgatgctcaagatgctatttccaagatctcttactgctgcttctcctggcttactggccagaaactagctcactcaaggctgccatccttcacttgcagcctccctgccattctccttcactggttggcaaccttgagagttcaaagaaaatcaacctctgtggtggtcaactaaaggtattaggaaactaagtctgtggctcttctctgctgatggaaacagaagggcgccaagccatgcctaaaaagatctcgccaataattcttgtctttgagtgttggagccctggattctggtgctatagctcctggtgccaaagtctggatctttccacatttcagcagcaccaacatctgctgctactcaaaatgtcctgttgaagagggacagctgtgatgcccttttgctggggctgccatcttgaaatctgagtgcaataggatttgcttgtaacagttatttcaggatattttgtttctttaatctgcacactttctagatagattttatttttaagtgtcctcagcattgcagaaaataacattgtaatagcaagtaaaggctggaggctgtttctctgggcttcaaatggctggcaaggctggctctcaaatcccaaagttgggaggcatgtttctgaaaagcaactgaggtgtgactgtttggacccaggcctcatcatcaggggtcctggaggaagcctccaagtagaggggagacctggtagttgaatagttgtttaatcaagccaaatagtcccactgcccccggtcaacaaacccacttttatgacagttttcttccgcagcttggctcttaaattttactggcaggtgtatggttgttggagggttcctagtgagttgggggacctggcaatagagctgcttggttggaggaagtgaagctggcttagtaccagcagctgatctcttccacgtgctgctgctttttttgccactctgatactaaaccagagaaagctgcaggtggataaagaagctgtggctgttttttgcttttgggtggcaatgagaaagagtcacagtgtgggttaaagggatctgcagtggggccaaggatgccaccccaccctcagctgtaggcaagcttgcacataaataacccccgtcagtggagtgttcgggatgcagggggcactatagtgttcttggacttgtcgtcctggggcagttttagttctttatatttagtgggtcagtgccaagtgctaccacttcccaataaaggaatggggacccagaggctgggtccctggctaccttgttatgaggttttgttatttctctgacaagattgctttggaaagagctgcttttagggattattttttgaataccccgagtggggagcagggttctcctcaaagcctcacaaccataggatcataggaaaggggccctattttcctgctgcttcccagctcagaacatatactgaatggaatgtatttttaagagaataaagtctatttttttgtattttaaagattgagagggctaagaaagtagccctcaaataaactgttattgcattataggcccctttgttgggggcagcctgttggtccacacctacttgctcaggcaggtgctctggtctctctcacccctgccccttagagtctaggtgcagcagctccaagcatgggaccaaggaggccagaacctgtcgctggaaaccagggcaaagcagtggctcagggctccttgggtgcatgtgtatcattggagctgcctgtctgcatgtatcctctggcgcgaatgctctctgttggctctgcagtacaatatgtaaccaataaagctccctcgtttccgtatactctgtgcgagtctgtgatgccagttttgtcaatgtcatccctgtgtatcatctgtcttctatgcgttggcgcagctctagtatatttatttatttcattgtgtaatacttaaaattgggtattttacctaaccaattactgatactgcaaggactggaaacattaactgccctgatcctggtgtgcagattctttccattactgccacgaattctaagactagggggggaaaagccttctccgttttcatcttccagtcagatcaccaatatatataatgatgtcccttaactcacagtaagaaagaataaaaccacatttaagggacattacttggatttgcagtaacagtgtttatcatctatctgtcagtcagtcaggagcccctgggaaggaaccagcatgtaacatgtttttatcatcttatatggcaaaagggactttgcagataaggatgctgggatgaggcagaacatcctagatgatccaggtgggccttaaatgtaatcacaggtagtatccttttaagagagagacaaaagatttgactacaggagaaggcaatgtgatgatggaagcagaaactggagttatgtgctctgaggatggaggaaggagccacgagccttcccacacctagaagctgaaaagagcaaggaaatgaactgatcctccctgctctgagagcctctgtaatgaatgcagccctgtgtacccattttagactttaagcttccagaactttcgaatagatttctgtttttttaagagccactaagtttgtggcaatctgttaaaccagctgttacctaagcccttgatcctatgtagtgcgcttcccaaaatgtacaccaccacctttagtagaattgggaagttttagcacatacccatggagggaatcaggaataaaggcagactggtctcccaaa

SEQ ID NO: 15908 - DNA, 3715 bp, Homo sapiens
  source 1..3715: mol_type = unassigned DNA
agctgagcggcggaacccttcgctggcgggagcgcggttcggggccgcagagattgatgatggtctccagctgtcaaagaagattgtggttgccaagagaaaggtaaccatttctcatccccttgagtggaattggatgcctctaggagcccacattggctggcagtagacatggccgaatttacaagctacaaggagacggcctccagccgccacttgcggtttaagctacagagtctaagccgccgccttgatgagttggaggaagccacaaaaaacctccagaaagcagaggatgaactcctggatctccaggacaaggtgattcaggcagaaggtagcaactccagcatgttggcggagattgaagtgctgcgccagcgggtgctgagaattgaaggcaaagacgaggaaattaagagagcagaggatctgtgtcgtctgatgaaggagaaacttgaagaggaagaaaacctcacccgggagctgaaatctgagattgagcggcttcagaaacgaatggctgaattagagaagctagaagaggccttcagcaggagtaagaatgactgtacccagctgtgtctgagcctgaatgaggagagaaatctgaccaagaaaatctcctctgagctggaaatgctcagagtcaaagtgaaagaactagaatcttctgaggaccgcctggataaaactgagcagagtttagcgtcagagttagaaaagctgaaatcattaactctgagctttgtaagtgagagaaaatacttgaatgaaaaggagaaagaaaatgagaaattgataaaagaactcactcaaaaactagagcagaacaaaaaaatgaaccgagattatacaaggaatgcttctaatctggaaagaaatgacctacggattgaggatggcatctcttccacactgccgtccaaagaatcaagaaggaagggtggtctggactacctaaagcaggtagagaatgaaacaagaaacaaatcagaaaatgaaaagaaccgcaatcaggaagacaacaaagtcaaagaccttaaccaagagattgagaaacttaagacacaaatcaaacactttgaatcgttggaagaagagcttaagaaaatgaagtccaaaaataacgaccttcaggataattacctaagtgaacaaaataaaaacaaattattagccagccaactggaggagataaagctacaaatcaagaaacagaaagagttagaaaatggagaggtagaaggggaagatgctttcctgtccagcaaaggcagacatgagaggactaagtttagaggccacggaagtgaagcttctgtgtccaagcacacagcgcgggaactgtctcctcagcataagcgggaacgactccggaacagggagtttgctctcaacaatgaaaactattctctgagcaacaggcaggtttcttctcccagtttcaccaacaggagggcagcaaaagcttctcacatgggggtgagtacagacagtgggactcaggagacaaagaaaactgaagaccggtttgtacccggctcctcccagagcgaagggaagaagtctagggagcagccctcagtgctgagtcgctaccccccggctgctcaggagcacagtaaagcgtggaaggggacttccaagccaggcaccgagagcggactgaagggaaaagtggagaagacaacacgaacgtttagtgacaccacccatggatctgttcccagtgacccattgggtagagctgacaaggcttctgacacctcctctgagactgtctttggcaagaggggacacgtgcttggcaacggaagtcaagtaactcaggctgcaaactctggctgttctaaggccattggagccctggcctcatctcgaagatcctcctcagaagggctctctaaaggcaaaaaggctgccaatggccttgaggctgataacagttgcccgaattccaaggctcctgttctatcgaagtatccttatagctgtagaagccaagagaacatccttcagggattttcaacctcacataaagaaggggttaatcaacctgcagcagttgtgatggaagacagcagtccgcatgaagccttgaggtgtcgagtcatcaaatccagtggcagagagaagccagactcagatgatgacttggacatagcatctcttgttactgccaagttggtaaatacaaccatcactccagagccagagcccaaaccacagcctaactctagagaaaaggctaaaacccgaggggcacctagaacctccctatttgagaatgataaagatgctggaatggagaatgaatctgtgaaatctgtcagagcctccaccaataccatggagctcccagataccaatggtgctggggtaaaaagccaaaggccctttagccccagagaggcgttgcggtctagagccatcatcaaacctgttattgttgataaggatgtgaaaaaaatcatgggaggatctggaacagagactacgttggagaaacagaaacccgtctccaaaccagggccaaacaaagtgacaagtagcattactatatatccatctgacagcagcagccccagagctgctccgggtgaggccctgagggagaggcacacatccactagcaatatccaggtggggctggcagagctcacatcagttagcaaccatgtcagctccccttttgagctctccattcacaaacatgacatcaccctgcagcttgcagaagcggagagaatggcagatgggcccctgaaggacaggccagaaacagtggtctctcggagcagcattataatcaagccatcggatcctgtggagaggaatagccatgcacctccagcggagacaatcaggtggaaaagccatagtgccccttcagaagtgggcttctcagatgccagacatgttactgtgcggaatgcctggaagagtaggcgagacttgaaatctttagaagaccccccaactcgaataggtaaaaacgtggaatctaccaatagcaatgcctacacccagaggtcttccacagacttctcagaactcgaacagcccaggtcctgcctttttgagcagggcactcgaagggtaggaccaagttcaggggatgcccctgagccctcctccagaaggacccaaagtagcctcactgtgtcagaggtgcttacccgtcggaatcgggtaggagacaccatcactgtcgcagcctggaaccactcagcaagcatgagcagctaaaggagctccccgtaggccctcagaacagcatgaaaagcacaagaagcagctgcagctgatggggagctctgggcaacaggaggaggcccggtgccctttctgtagggcacagtgagggggagccaggtcagcaagttctcggccgcctcagttagcagatcttcacaggctgctggcctctcagggatgaggagagccggggcttacactgggcctattttagataagcgtatacccaattccaagtgacactttcttttgccccccagacagctgtctgtctcatattatcagtctgagggcagggctggttcagtatagctcattacagctttgataaatccagaaccacctgccttatgtgagtgtgaggctcagggtgtcagaacagcatctggagaagcccctgggagtgtctttttgatgagaaacctgtgatgatgaaaaacttcttggacctgga

SEQ ID NO: 15909 - DNA, 8331 bp, Homo sapiens
  source 1..8331: mol_type = unassigned DNA
caggtcaagagacaactgcctttgaaagagagtgagtgactgtttccaaaacagcaagcatagggagagccgccggaagtattgacggaaagcttgaattacctacatgattgatgatggtctccagctgtcaaagaagattgtggttgccaagagaaaggtaaccatttctcatccccttgagtggaattggatgcctctaggagcccacattggctggcagtagacatggccgaatttacaagctacaaggagacggcctccagccgccacttgcggtttaagctacagagtctaagccgccgccttgatgagttggaggaagccacaaaaaacctccagaaagcagaggatgaactcctggatctccaggacaaggtgattcaggcagaaggtagcaactccagcatgttggcggagattgaagtgctgcgccagcgggtgctgagaattgaaggcaaagacgaggaaattaagagagcagaggatctgtgtcgtctgatgaaggagaaacttgaagaggaagaaaacctcacccgggagctgaaatctgagattgagcggcttcagaaacgaatggctgaattagagaagctagaagaggccttcagcaggagtaagaatgactgtacccagctgtgtctgagcctgaatgaggagagaaatctgaccaagaaaatctcctctgagctggaaatgctcagagtcaaagtgaaagaactagaatcttctgaggaccgcctggataaaactgagcagagtttagcgtcagagttagaaaagctgaaatcattaactctgagctttgtaagtgagagaaaatacttgaatgaaaaggagaaagaaaatgagaaattgataaaagaactcactcaaaaactagagcagaacaaaaaaatgaaccgagattatacaaggaatgcttctaatctggaaagaaatgacctacggattgaggatggcatctcttccacactgccgtccaaagaatcaagaaggaagggtggtctggactacctaaagcaggtagagaatgaaacaagaaacaaatcagaaaatgaaaagaaccgcaatcaggaagacaacaaagtcaaagaccttaaccaagagattgagaaacttaagacacaaatcaaacactttgaatcgttggaagaagagcttaagaaaatgaagtccaaaaataacgaccttcaggataattacctaagtgaacaaaataaaaacaaattattagccagccaactggaggagataaagctacaaatcaagaaacagaaagagttagaaaatggagaggtagaaggggaagatgctttcctgtccagcaaaggcagacatgagaggactaagtttagaggccacggaagtgaagcttctgtgtccaagcacacagcgcgggaactgtctcctcagcataagcgggaacgactccggaacagggagtttgctctcaacaatgaaaactattctctgagcaacaggcaggtttcttctcccagtttcaccaacaggagggcagcaaaagcttctcacatgggggtgagtacagacagtgggactcaggagacaaagaaaactgaagaccggtttgtacccggctcctcccagagcgaagggaagaagtctagggagcagccctcagtgctgagtcgctaccccccggctgctcaggagcacagtaaagcgtggaaggggacttccaagccaggcaccgagagcggactgaagggaaaagtggagaagacaacacgaacgtttagtgacaccacccatggatctgttcccagtgacccattgggtagagctgacaaggcttctgacacctcctctgagactgtctttggcaagaggggacacgtgcttggcaacggaagtcaagtaactcaggctgcaaactctggctgttctaaggccattggagccctggcctcatctcgaagatcctcctcagaagggctctctaaaggcaaaaaggctgccaatggccttgaggctgataacagttgcccgaattccaaggctcctgttctatcgaagtatccttatagctgtagaagccaagagaacatccttcagggattttcaacctcacataaagaaggggttaatcaacctgcagcagttgtgatggaagacagcagtccgcatgaagccttgaggtgtcgagtcatcaaatccagtggcagagagaagccagactcagatgatgacttggacatagcatctcttgttactgccaagttggtaaatacaaccatcactccagagccagagcccaaaccacagcctaactctagagaaaaggctaaaacccgaggggcacctagaacctccctatttgagaatgataaagatgctggaatggagaatgaatctgtgaaatctgtcagagcctccaccaataccatggagctcccagataccaatggtgctggggtaaaaagccaaaggccctttagccccagagaggcgttgcggtctagagccatcatcaaacctgttattgttgataaggatgtgaaaaaaatcatgggaggatctggaacagagactacgttggagaaacagaaacccgtctccaaaccagggccaaacaaagtgacaagtagcattactatatatccatctgacagcagcagccccagagctgctccgggtgaggccctgagggagaggcacacatccactagcaatatccaggtggggctggcagagctcacatcagttagcaaccatgtcagctccccttttgagctctccattcacaaacatgacatcaccctgcagcttgcagaagcggagagaatggcagatgggcccctgaaggacaggccagaaacagtggtctctcggagcagcattataatcaagccatcggatcctgtggagaggaatagccatgcacctccagcggagacaatcaggtggaaaagccatagtgccccttcagaagtgggcttctcagatgccagacatgttactgtgcggaatgcctggaagagtaggcgagacttgaaatctttagaagaccccccaactcgaataggtaaaaacgtggaatctaccaatagcaatgcctacacccagaggtcttccacagacttctcagaactcgaacagcccaggtcctgcctttttgagcagggcactcgaagggtaggaccaagttcaggggatgcccctgagccctcctccagaaggacccaaagtagcctcactgtgtcagaggtgcttacccgtcggaatcgggtaggagacaccatcactgtcgcagcctggaaccactcagcaagcatggaggaagaaggggaagactgtacactcagtgtctacaggcaactgcacaactccctggatccgtctgaactgcctgggaagcaggggctgccagagtctgggcgagtacgggccgaggaacgattacggccaaccaggccctgtgctgaggagaactgagcccgctgggtgtctgttgtctgccctctgctcctgcttctcagctcttccaccgtcctgccccacgaaggatccaaggccagttaaccaggcaagacacaagccttggctggaaaactgtggtagagccgggctgtggctcaggtaatttttgccatttggccagagggaatcagagactacaagctggacagtcacccaggcccaaccttccccaatgcacgagtcctctctctctccttgtccctgtccaccaagtagttggaccattctggcccccaaacaagggaagataaagtccccagcacacagcaggagtcaaaaattcttctcggctccttggtgggttgtttctggatcctagggcagcctctgtctgtgtggttaatgttctggtttctcagtctcctcactatatccacttcactcctcatttgcccaatgggctcaagtaccccataagatttaccagccatcagctctatctagggggctttcatttctttccccttggagttcttttcttcagacttaaagcagaaaggggtctgtgctgcctctaaaggattatgagactaccctttaggttgaagtttgacctggctcctggcttaccagtctcctggaagcagagcatgcagatactcatgcggatacccattggaatgacatcatccctccccaaccccagctctctctgctcaccttccaaaggcacctggaggtgcaagcctcatgcatctcctttcctgagcaccagtaatgctgctggcatcgcctgctttctctccagtggctggagacttcaagctgacttcattgtttccaccttgggaaaatccctaggctaagctgggcctgacccagcatcctctgccttctaggaagtgcccagcaagagggaaagcagacccctttagtcactccacaagcaatagctccatgagaggcatggactgtgagactactccctcctgttcctccttctccatcccccatggaggaggcatcgcactttaccaagctgatgcattcctacagaagtgggccccggatttctgcaagtcgactatcatgatgacttcgctggaggaaaggtgatacgtacatacgcattgagggcctcagctttatatagttcaaaatgcagcaaacttttcagaaagccacgtaaataaattggttaggttccttataccagtcacatggggaagttgaaaagaattgtatattcttggcagtgctttttctttagcattctgtcaattcaaagaagggatcctctttcaaaggctacctttatgaagtagacactattgccctcagaatgagagaacattaaactaccagtctggtaagctggatttttttccccatggctttacttccttgctgtgtgaccttgggtgagtcattgtcttcttggagcctcagtttccctgtctgtaaaatgagttctttgaaatggatgatctctaagggcaccaaatctggtattctaaggttctcctgttttcaccatctataatagtatgggatgatttttgcttgtggaaggtatcatccgtgtgggttcttccctcctgccctcaattgtttttctgggccttgttttttagtttctgtatgttttaatctcatggggatgagctcagagaagctccgtgggcctgtttcccaatctgcaaagtgtgaagggattagatgggatggtctctgaggctctttgtggcatcagccttgcccagtgccacacagtatctcctggcgttctaggagtctaggtattatggaaagtacccaagtctgtgtatctcctgttcctgtgcatctcctatgaatttcctggcaagaggaagactcaagacttcctccagaggaatttgtcttctctgccttcactcagcatgggaaccagtgttcatcctgaccttgtctgtatcagatttggcagtgaggaggcttggggagcacctaccttactttcagggacaggaatctattgctcatacttctgcttcccagagttttgccaatctaaaggcattgtcatgtggcctgcctttcctgtccacatccccacctctgatgctcaagatgctatttccaagatctcttactgctgcttctcctggcttactggccagaaactagctcactcaaggctgccatccttcacttgcagcctccctgccattctccttcactggttggcaaccttgagagttcaaagaaaatcaacctctgtggtggtcaactaaaggtattaggaaactaagtctgtggctcttctctgctgatggaaacagaagggcgccaagccatgcctaaaaagatctcgccaataattcttgtctttgagtgttggagccctggattctggtgctatagctcctggtgccaaagtctggatctttccacatttcagcagcaccaacatctgctgctactcaaaatgtcctgttgaagagggacagctgtgatgcccttttgctggggctgccatcttgaaatctgagtgcaataggatttgcttgtaacagttatttcaggatattttgtttctttaatctgcacactttctagatagattttatttttaagtgtcctcagcattgcagaaaataacattgtaatagcaagtaaaggctggaggctgtttctctgggcttcaaatggctggcaaggctggctctcaaatcccaaagttgggaggcatgtttctgaaaagcaactgaggtgtgactgtttggacccaggcctcatcatcaggggtcctggaggaagcctccaagtagaggggagacctggtagttgaatagttgtttaatcaagccaaatagtcccactgcccccggtcaacaaacccacttttatgacagttttcttccgcagcttggctcttaaattttactggcaggtgtatggttgttggagggttcctagtgagttgggggacctggcaatagagctgcttggttggaggaagtgaagctggcttagtaccagcagctgatctcttccacgtgctgctgctttttttgccactctgatactaaaccagagaaagctgcaggtggataaagaagctgtggctgttttttgcttttgggtggcaatgagaaagagtcacagtgtgggttaaagggatctgcagtggggccaaggatgccaccccaccctcagctgtaggcaagcttgcacataaataacccccgtcagtggagtgttcgggatgcagggggcactatagtgttcttggacttgtcgtcctggggcagttttagttctttatatttagtgggtcagtgccaagtgctaccacttcccaataaaggaatggggacccagaggctgggtccctggctaccttgttatgaggttttgttatttctctgacaagattgctttggaaagagctgcttttagggattattttttgaataccccgagtggggagcagggttctcctcaaagcctcacaaccataggatcataggaaaggggccctattttcctgctgcttcccagctcagaacatatactgaatggaatgtatttttaagagaataaagtctatttttttgtattttaaagattgagagggctaagaaagtagccctcaaataaactgttattgcattataggcccctttgttgggggcagcctgttggtccacacctacttgctcaggcaggtgctctggtctctctcacccctgccccttagagtctaggtgcagcagctccaagcatgggaccaaggaggccagaacctgtcgctggaaaccagggcaaagcagtggctcagggctccttgggtgcatgtgtatcattggagctgcctgtctgcatgtatcctctggcgcgaatgctctctgttggctctgcagtacaatatgtaaccaataaagctccctcgtttccgtatactctgtgcgagtctgtgatgccagttttgtcaatgtcatccctgtgtatcatctgtcttctatgcgttggcgcagctctagtatatttatttatttcattgtgtaatacttaaaattgggtattttacctaaccaattactgatactgcaaggactggaaacattaactgccctgatcctggtgtgcagattctttccattactgccacgaattctaagactagggggggaaaagccttctccgttttcatcttccagtcagatcaccaatatatataatgatgtcccttaactcacagtaagaaagaataaaaccacatttaagggacattacttggatttgcagtaacagtgtttatcatctatctgtcagtcagtcaggagcccctgggaaggaaccagcatgtaacatgtttttatcatcttatatggcaaaagggactttgcagataaggatgctgggatgaggcagaacatcctagatgatccaggtgggccttaaatgtaatcacaggtagtatccttttaagagagagacaaaagatttgactacaggagaaggcaatgtgatgatggaagcagaaactggagttatgtgctctgaggatggaggaaggagccacgagccttcccacacctagaagctgaaaagagcaaggaaatgaactgatcctccctgctctgagagcctctgtaatgaatgcagccctgtgtacccattttagactttaagcttccagaactttcgaatagatttctgtttttttaagagccactaagtttgtggcaatctgttaaaccagctgttacctaagcccttgatcctatgtagtgcgcttcccaaaatgtacaccaccacctttagtagaattgggaagttttagcacatacccatggagggaatcaggaataaaggcagactggtctcccaaaggctcag

SEQ ID NO: 15910 - DNA, 8502 bp, Homo sapiens
  source 1..8502: mol_type = unassigned DNA
ttgtcagtcccgcggagccagaggaggcgccggtcgctggcagctgagcggcggaacccttcgctggcgggagcgcggttcggggccgcagaggggacagccctctgggtcacctcagtcttggtatgattcatgcattacctatctcttccattctgtttatattctatccaggtcaagagacaactgcctttgaaagagagtgagtgactgtttccaaaacagcaagcatagggagagccgccggaagtattgacggaaagcttgaattacctacatgattgatgatggtctccagctgtcaaagaagattgtggttgccaagagaaaggtaaccatttctcatccccttgagtggaattggatgcctctaggagcccacattggctggcagtagacatggccgaatttacaagctacaaggagacggcctccagccgccacttgcggtttaagctacagagtctaagccgccgccttgatgagttggaggaagccacaaaaaacctccagaaagcagaggatgaactcctggatctccaggacaaggtgattcaggcagaaggtagcaactccagcatgttggcggagattgaagtgctgcgccagcgggtgctgagaattgaaggcaaagacgaggaaattaagagagcagaggatctgtgtcgtctgatgaaggagaaacttgaagaggaagaaaacctcacccgggagctgaaatctgagattgagcggcttcagaaacgaatggctgaattagagaagctagaagaggccttcagcaggagtaagaatgactgtacccagctgtgtctgagcctgaatgaggagagaaatctgaccaagaaaatctcctctgagctggaaatgctcagagtcaaagtgaaagaactagaatcttctgaggaccgcctggataaaactgagcagagtttagcgtcagagttagaaaagctgaaatcattaactctgagctttgtaagtgagagaaaatacttgaatgaaaaggagaaagaaaatgagaaattgataaaagaactcactcaaaaactagagcagaacaaaaaaatgaaccgagattatacaaggaatgcttctaatctggaaagaaatgacctacggattgaggatggcatctcttccacactgccgtccaaagaatcaagaaggaagggtggtctggactacctaaagcaggtagagaatgaaacaagaaacaaatcagaaaatgaaaagaaccgcaatcaggaagacaacaaagtcaaagaccttaaccaagagattgagaaacttaagacacaaatcaaacactttgaatcgttggaagaagagcttaagaaaatgaagtccaaaaataacgaccttcaggataattacctaagtgaacaaaataaaaacaaattattagccagccaactggaggagataaagctacaaatcaagaaacagaaagagttagaaaatggagaggtagaaggggaagatgctttcctgtccagcaaaggcagacatgagaggactaagtttagaggccacggaagtgaagcttctgtgtccaagcacacagcgcgggaactgtctcctcagcataagcgggaacgactccggaacagggagtttgctctcaacaatgaaaactattctctgagcaacaggcaggtttcttctcccagtttcaccaacaggagggcagcaaaagcttctcacatgggggtgagtacagacagtgggactcaggagacaaagaaaactgaagaccggtttgtacccggctcctcccagagcgaagggaagaagtctagggagcagccctcagtgctgagtcgctaccccccggctgctcaggagcacagtaaagcgtggaaggggacttccaagccaggcaccgagagcggactgaagggaaaagtggagaagacaacacgaacgtttagtgacaccacccatggatctgttcccagtgacccattgggtagagctgacaaggcttctgacacctcctctgagactgtctttggcaagaggggacacgtgcttggcaacggaagtcaagtaactcaggctgcaaactctggctgttctaaggccattggagccctggcctcatctcgaagatcctcctcagaagggctctctaaaggcaaaaaggctgccaatggccttgaggctgataacagttgcccgaattccaaggctcctgttctatcgaagtatccttatagctgtagaagccaagagaacatccttcagggattttcaacctcacataaagaaggggttaatcaacctgcagcagttgtgatggaagacagcagtccgcatgaagccttgaggtgtcgagtcatcaaatccagtggcagagagaagccagactcagatgatgacttggacatagcatctcttgttactgccaagttggtaaatacaaccatcactccagagccagagcccaaaccacagcctaactctagagaaaaggctaaaacccgaggggcacctagaacctccctatttgagaatgataaagatgctggaatggagaatgaatctgtgaaatctgtcagagcctccaccaataccatggagctcccagataccaatggtgctggggtaaaaagccaaaggccctttagccccagagaggcgttgcggtctagagccatcatcaaacctgttattgttgataaggatgtgaaaaaaatcatgggaggatctggaacagagactacgttggagaaacagaaacccgtctccaaaccagggccaaacaaagtgacaagtagcattactatatatccatctgacagcagcagccccagagctgctccgggtgaggccctgagggagaggcacacatccactagcaatatccaggtggggctggcagagctcacatcagttagcaaccatgtcagctccccttttgagctctccattcacaaacatgacatcaccctgcagcttgcagaagcggagagaatggcagatgggcccctgaaggacaggccagaaacagtggtctctcggagcagcattataatcaagccatcggatcctgtggagaggaatagccatgcacctccagcggagacaatcaggtggaaaagccatagtgccccttcagaagtgggcttctcagatgccagacatgttactgtgcggaatgcctggaagagtaggcgagacttgaaatctttagaagaccccccaactcgaataggtaaaaacgtggaatctaccaatagcaatgcctacacccagaggtcttccacagacttctcagaactcgaacagcccaggtcctgcctttttgagcagggcactcgaagggtaggaccaagttcaggggatgcccctgagccctcctccagaaggacccaaagtagcctcactgtgtcagaggtgcttacccgtcggaatcgggtaggagacaccatcactgtcgcagcctggaaccactcagcaagcatggaggaagaaggggaagactgtacactcagtgtctacaggcaactgcacaactccctggatccgtctgaactgcctgggaagcaggggctgccagagtctgggcgagtacgggccgaggaacgattacggccaaccaggccctgtgctgaggagaactgagcccgctgggtgtctgttgtctgccctctgctcctgcttctcagctcttccaccgtcctgccccacgaaggatccaaggccagttaaccaggcaagacacaagccttggctggaaaactgtggtagagccgggctgtggctcaggtaatttttgccatttggccagagggaatcagagactacaagctggacagtcacccaggcccaaccttccccaatgcacgagtcctctctctctccttgtccctgtccaccaagtagttggaccattctggcccccaaacaagggaagataaagtccccagcacacagcaggagtcaaaaattcttctcggctccttggtgggttgtttctggatcctagggcagcctctgtctgtgtggttaatgttctggtttctcagtctcctcactatatccacttcactcctcatttgcccaatgggctcaagtaccccataagatttaccagccatcagctctatctagggggctttcatttctttccccttggagttcttttcttcagacttaaagcagaaaggggtctgtgctgcctctaaaggattatgagactaccctttaggttgaagtttgacctggctcctggcttaccagtctcctggaagcagagcatgcagatactcatgcggatacccattggaatgacatcatccctccccaaccccagctctctctgctcaccttccaaaggcacctggaggtgcaagcctcatgcatctcctttcctgagcaccagtaatgctgctggcatcgcctgctttctctccagtggctggagacttcaagctgacttcattgtttccaccttgggaaaatccctaggctaagctgggcctgacccagcatcctctgccttctaggaagtgcccagcaagagggaaagcagacccctttagtcactccacaagcaatagctccatgagaggcatggactgtgagactactccctcctgttcctccttctccatcccccatggaggaggcatcgcactttaccaagctgatgcattcctacagaagtgggccccggatttctgcaagtcgactatcatgatgacttcgctggaggaaaggtgatacgtacatacgcattgagggcctcagctttatatagttcaaaatgcagcaaacttttcagaaagccacgtaaataaattggttaggttccttataccagtcacatggggaagttgaaaagaattgtatattcttggcagtgctttttctttagcattctgtcaattcaaagaagggatcctctttcaaaggctacctttatgaagtagacactattgccctcagaatgagagaacattaaactaccagtctggtaagctggatttttttccccatggctttacttccttgctgtgtgaccttgggtgagtcattgtcttcttggagcctcagtttccctgtctgtaaaatgagttctttgaaatggatgatctctaagggcaccaaatctggtattctaaggttctcctgttttcaccatctataatagtatgggatgatttttgcttgtggaaggtatcatccgtgtgggttcttccctcctgccctcaattgtttttctgggccttgttttttagtttctgtatgttttaatctcatggggatgagctcagagaagctccgtgggcctgtttcccaatctgcaaagtgtgaagggattagatgggatggtctctgaggctctttgtggcatcagccttgcccagtgccacacagtatctcctggcgttctaggagtctaggtattatggaaagtacccaagtctgtgtatctcctgttcctgtgcatctcctatgaatttcctggcaagaggaagactcaagacttcctccagaggaatttgtcttctctgccttcactcagcatgggaaccagtgttcatcctgaccttgtctgtatcagatttggcagtgaggaggcttggggagcacctaccttactttcagggacaggaatctattgctcatacttctgcttcccagagttttgccaatctaaaggcattgtcatgtggcctgcctttcctgtccacatccccacctctgatgctcaagatgctatttccaagatctcttactgctgcttctcctggcttactggccagaaactagctcactcaaggctgccatccttcacttgcagcctccctgccattctccttcactggttggcaaccttgagagttcaaagaaaatcaacctctgtggtggtcaactaaaggtattaggaaactaagtctgtggctcttctctgctgatggaaacagaagggcgccaagccatgcctaaaaagatctcgccaataattcttgtctttgagtgttggagccctggattctggtgctatagctcctggtgccaaagtctggatctttccacatttcagcagcaccaacatctgctgctactcaaaatgtcctgttgaagagggacagctgtgatgcccttttgctggggctgccatcttgaaatctgagtgcaataggatttgcttgtaacagttatttcaggatattttgtttctttaatctgcacactttctagatagattttatttttaagtgtcctcagcattgcagaaaataacattgtaatagcaagtaaaggctggaggctgtttctctgggcttcaaatggctggcaaggctggctctcaaatcccaaagttgggaggcatgtttctgaaaagcaactgaggtgtgactgtttggacccaggcctcatcatcaggggtcctggaggaagcctccaagtagaggggagacctggtagttgaatagttgtttaatcaagccaaatagtcccactgcccccggtcaacaaacccacttttatgacagttttcttccgcagcttggctcttaaattttactggcaggtgtatggttgttggagggttcctagtgagttgggggacctggcaatagagctgcttggttggaggaagtgaagctggcttagtaccagcagctgatctcttccacgtgctgctgctttttttgccactctgatactaaaccagagaaagctgcaggtggataaagaagctgtggctgttttttgcttttgggtggcaatgagaaagagtcacagtgtgggttaaagggatctgcagtggggccaaggatgccaccccaccctcagctgtaggcaagcttgcacataaataacccccgtcagtggagtgttcgggatgcagggggcactatagtgttcttggacttgtcgtcctggggcagttttagttctttatatttagtgggtcagtgccaagtgctaccacttcccaataaaggaatggggacccagaggctgggtccctggctaccttgttatgaggttttgttatttctctgacaagattgctttggaaagagctgcttttagggattattttttgaataccccgagtggggagcagggttctcctcaaagcctcacaaccataggatcataggaaaggggccctattttcctgctgcttcccagctcagaacatatactgaatggaatgtatttttaagagaataaagtctatttttttgtattttaaagattgagagggctaagaaagtagccctcaaataaactgttattgcattataggcccctttgttgggggcagcctgttggtccacacctacttgctcaggcaggtgctctggtctctctcacccctgccccttagagtctaggtgcagcagctccaagcatgggaccaaggaggccagaacctgtcgctggaaaccagggcaaagcagtggctcagggctccttgggtgcatgtgtatcattggagctgcctgtctgcatgtatcctctggcgcgaatgctctctgttggctctgcagtacaatatgtaaccaataaagctccctcgtttccgtatactctgtgcgagtctgtgatgccagttttgtcaatgtcatccctgtgtatcatctgtcttctatgcgttggcgcagctctagtatatttatttatttcattgtgtaatacttaaaattgggtattttacctaaccaattactgatactgcaaggactggaaacattaactgccctgatcctggtgtgcagattctttccattactgccacgaattctaagactagggggggaaaagccttctccgttttcatcttccagtcagatcaccaatatatataatgatgtcccttaactcacagtaagaaagaataaaaccacatttaagggacattacttggatttgcagtaacagtgtttatcatctatctgtcagtcagtcaggagcccctgggaaggaaccagcatgtaacatgtttttatcatcttatatggcaaaagggactttgcagataaggatgctgggatgaggcagaacatcctagatgatccaggtgggccttaaatgtaatcacaggtagtatccttttaagagagagacaaaagatttgactacaggagaaggcaatgtgatgatggaagcagaaactggagttatgtgctctgaggatggaggaaggagccacgagccttcccacacctagaagctgaaaagagcaaggaaatgaactgatcctccctgctctgagagcctctgtaatgaatgcagccctgtgtacccattttagactttaagcttccagaactttcgaatagatttctgtttttttaagagccactaagtttgtggcaatctgttaaaccagctgttacctaagcccttgatcctatgtagtgcgcttcccaaaatgtacaccaccacctttagtagaattgggaagttttagcacatacccatggagggaatcaggaataaaggcagactggtctcccaaaggctcag

SEQ ID NO: 15911 - DNA, 1190 bp, Homo sapiens
  source 1..1190: mol_type = unassigned DNA
ggagccagaggaggcgccggtcgctggcagctgagcggcggaacccttcgctggcgggagcgcggttcggggccgcagaggggacattgaataaacctgagtattgtgtgcctgtattttgactgcgacctatcagatgagatcaggtcaagagacaactgcctttgaaagagagtgagtgactgtttccaaaacagcaagcatagggagagccgccggaagtattgacggaaagcttgaattacctacatgattgatgatggtctccagctgtcaaagaagattgtggttgccaagagaaaggtaaccatttctcatccccttgagtggaattggatgcctctaggagcccacattggctggcagtagacatggccgaatttacaagctacaaggagacggcctccagccgccacttgcggtttaagctacagagtctaagccgccgccttgatgagttggaggaagccacaaaaaacctccagaaagcagaggatgaactcctggatctccaggacaaggtgattcaggcagaaggtagcaactccagcatgttggcggagattgaagtgctgcgccagcgggtgctgagaattgaaggcaaagacgaggaaattaagagagcagaggatctgtgtcgtctgatgaaggagaaacttgaagaggaagaaaacctcacccgggagctgaaatctgagattgagcggcttcagaaacgaatggctgaattagagaagctagaagaggccttcagcaggagtaagaatgactgtacccagctgtgtctgagcctgaatgaggagagaaatctgaccaagaaaatctcctctgagctggaaatgctcagagtcaaagtgaaagaactagaatcttctgaggaccgcctggataaaactgagcagagtttagcgtcagagttagaaaagctgaaatcattaactctgagctttgtaagtgagagaaaatacttgaatgaaaaggagaaagaaaatgagaaattgataaaagaactcactcaaaaactagagcagaacaaaaaaatgaaccgagattatacaaggaatgcttctaatctggaaagaaatgacctacggattgaggatggcatctcttccacactgccgtccaaagaatcaagaaggaagggtggtctggactacctaaagcaggtagagaatgaaacaagaaac

SEQ ID NO: 15912 - DNA, 613 bp, Homo sapiens
  source 1..613: mol_type = unassigned DNA
gtgatcctcccgcctcagcctcccaagaagctgggatgacaagtgtgtgccaccatgcctggctaatttttgtatttttagtagaaacagggtttcaccattttggccaggctgttctcaaactcctgacttcaagtcatccactcgcctcggccttccagagtgctgggattacaggcatgagccactgcgcccagtctgtctcattgttgatggggacattgaataaacctgagtattgtgtgcctgtattttgactgcgacctatcagatgagatcaggtcaagagacaactgcctttgaaagagagtgagtgactgtttccaaaacagcaagcatagggagagccgccggaagtattgacggaaagcttgaattacctacatgattgatgatggtctccagctgtcaaagaagattgtggttgccaagagaaaggtaaccatttctcatccccttgagtggaattggatgcctctaggagcccacattggctggcagtagacatggccgaatttacaagctacaaggagacggcctccagccgccacttgcggtttaagctacagagtctaagccgccgccttgatgagttggaggaagccacaaaaaa

SEQ ID NO: 15913 - DNA, 3553 bp, Homo sapiens
  source 1..3553: mol_type = unassigned DNA
agcgacaggatcccgaagagagagagagaaggcagcgagggaaggaggaccccggcaggcagcagcatgaaattcagcccagcgcactacctgctgcctctcctgcctgcgctggtcctcagcaccagacaggactatgaagagctagaaaagcagctgaaagaagtctttaaggagcgaagcaccattcttcgtcagctgacaaagacatcaagagaacttgatggaattaaagtcaatcttcagtccttaaaaaacgatgagcagtctgccaaaactgatgttcagaaacttctggaattaggacagaaacaaagagaagaaatgaagtctcttcaggaggccctgcaaaatcagcttaaggagacatcagagaaagcagaaaaacaccaggctactattaattttttaaagactgaagttgaaagaaagagcaaaatgatccgagacctccagaatgagaataaaagcttgaaaaacaaactcttgtcaggaaacaagctctgtggcattcacgcagaagagtcaaaaaaaatccaagcccagctgaaggagcttcgttatgggaagaaggatttattatttaaggcgcagcagcttactgatctggaacaaaaattagctgtagccaaaaatgaactggagaaagcagctcttgacagggagtcacagatgaaagcaatgaaagagactgtgcagctctgcttgacatctgttttccgtgatcagcctcctccccctttgagtttaatcacatcaaatccaactcggatgttactcccacccaggaatattgcctctaagcttccagatgcagcggccaaaagcaagcctcaacaaagtgcttctggaaacaatgagagctctcaagttgagtcaacaaaggaaggaaatccaagtaccactgcctgtgactctcaagatgagggcagaccgtgttccatgaagcacaaagaaagtcccccaagtaatgccactgcagaaaccgagcctatcccacagaaattgcaaatgcctccttgctctgaatgtgaggtgaaaaaagccccagaaaaaccattgaccagctttgaagggatggcagctagagaagaaaaaatactgtaaatactaagaaactgtgttaaaaacgtccatttgctattgtcttcatattctttttagaccacaagcttgatggaaatactgtttctaaagcatgcaactttttcacaattttatgtaactttataaagtagcctacacattttcaaagattccagaccaattatgatccttaagcaataacctcattgaattgaatacccacagtcagaaatattttgttgtcaacagtaaattgtcccatataaattggtctggtttaactcaaatgctatctaacatgtaattctcccggttcatttggatatctagtacttctatgatatagttgtcaaaatcaactggaggataataaaatattgtgggttctcagcattcttagaatccaaattacaaccatatcagtaagggtttggtccacatgagccaactgaagtcattttcctcaaggttggaatttgtgccaacctaaatacgttgtttctttgatggtgtttattgctattggtattattttgaactaataacaattattttgtctaaataatgctaagacaattctgttaagaattttgtcagctaacataattcattaagtatgtttggcatcatatggacaaaatatttggatgaatgactaaatttctgacacaattaaatattttggcattctatagacacatctcctatgtatgtctactgtaattaatccaagttaataaccaagttttctgaaatacttggcaggatttttggtatgaagttgggtagtggaatagggaatgaagagtgagttctaaaatacaaatatgaaagcaggtaatatatatcacaaaacaggggtctgatgaaagtacaatagccatgttgattcaataaacccagatgcatattttttgaaaaccaatgtgttattgaaacaaatcaatggcagtgttaatccataagagttctgattttctataggaatatcactaatcaaaaaaatgcactcatgaataattggaagatagctcacaagcaagaggaattgacccttgaataattatctgattaataggtttcatagggcattcaaagttgcagactcagttaatgactacagttaagttgtctggactgaaaagtcatttcttttgtttagaacctttttgcaaccgtagaaagcatattaaaccattggttttgcaggatggatctgtcaaaccacaatatatacatttggatcagtgtatcctaggagacagttaataaaaatgtattaaaggaaatctttaatcaataaatgaacttagattctgagatttaatggcatacctctgatcaaaatggcatatttaaagaaatttaaagatttggagaattggaaaatatcgttagctgtaaaagtaatattatgacatatttatgtagcacttctattttcagaatagttcagtgtcattcattagcacaggcaggtcccaaccacaatggttcaacttaacggttttttcatgattctgtgaaagcttcataatttctacatgctttgaattttgaattttgttattttttggagggctagtgatacatggtccatgaaatattcaacactttattataaaatagggtttgtgttagacaatttgcccaactgtaggatgaggtatatgttctgagcacgtttaagcaggtttaagttagggtgggctatgattttccatttaggtatctgaaatgcatttcagacttacaatgttttcaacctttgacttctttatctgtatgtaatcctattgttaaatcaaggagcattcatatttttcataaaaccggctacccaaggaaaaaaataattagctttatggatgatccatagagctttcagatgaagtgactaggataaaataaaagatgaaggtctgaggtttcttctgactccttcatatttctaaaaataatcatacaaactagaatactgctagtctcccaagtcctgttccttgtaattctcccactgttctcagtggccctaaccatctctataggttcctgacagggaagcagatcatttagttttaatttatgttcagtctcccacctccaccctggggcccaacttcccttgcaggccttgtgggtcctatagaaagttattcaccatgtaatctagcacagcatgttttgaagcatctttggaatgaaaaaaaagaagaatcaggctgttatttcctgaaattgttatgagagataacatgttgaaaggtaagaactcaggttgatattaatcatgtttttatcaatcttcattttaaagttgtttttgttctgtatattctaaattccttttattaattcctggcttgatcaagtgggctttggatccatatgatttttttttttttttttttttgagatgaaatctcgctcttgttgcccaggctggagtgcaatggagcgatcttgg

SEQ ID NO: 15914 - DNA, 5016 bp, Homo sapiens
  source 1..5016: mol_type = unassigned DNA
agcgagggaaggaggaccccggcaggcagcagcatgaaattcagcccagcgcactacctgctgcctctcctgcctgcgctggtcctcagcaccaggactatgaagagctagaaaagcagctgaaagaagtctttaaggagcgaagcaccattcttcgtcagctgacaaagacatcaagagaacttgatggaattaaagtcaatcttcagtccttaaaaaacgatgagcagtctgccaaaactgatgttcagaaacttctggaattaggacagaaacaaagagaagaaatgaagtctcttcaggaggccctgcaaaatcagcttaaggagacatcagagaaagcagaaaaacaccaggctactattaattttttaaagactgaagttgaaagaaagagcaaaatgatccgagacctccagaatgagaataaaagcttgaaaaacaaactcttgtcaggaaacaagctctgtggcattcacgcagaagagtcaaaaaaaatccaagcccagctgaaggagcttcgttatgggaagaaggatttattatttaaggcgcagcagcttactgatctggaacaaaaattagctgtagccaaaaatgaactggagaaagcagctcttgacagggagtcacagatgaaagcaatgaaagagactgtgcagctctgcttgacatctgttttccgtgatcagcctcctccccctttgagtttaatcacatcaaatccaactcggatgttactcccacccaggaatattgcctctaagcttccagatgcagcggccaaaagcaagcctcaacaaagtgcttctggaaacaatgagagctctcaagttgagtcaacaaaggaaggaaatccaagtaccactgcctgtgactctcaagatgagggcagaccgtgttccatgaagcacaaagaaagtcccccaagtaatgccactgcagaaaccgagcctatcccacagaaattgcaaatgcctccttgctctgaatgtgaggtgaaaaaagccccagaaaaaccattgaccagctttgaagggatggcagctagagaagaaaaaatactgtaaatactaagaaactgtgttaaaaacgtccatttgctattgtcttcatattctttttagaccacaagcttgatggaaatactgtttctaaagcatgcaactttttcacaattttatgtaactttataaagtagcctacacattttcaaagattccagaccaattatgatccttaagcaataacctcattgaattgaatacccacagtcagaaatattttgttgtcaacagtaaattgtcccatataaattggtctggtttaactcaaatgctatctaacatgtaattctcccggttcatttggatatctagtacttctatgatatagttgtcaaaatcaactggaggataataaaatattgtgggttctcagcattcttagaatccaaattacaaccatatcagtaagggtttggtccacatgagccaactgaagtcattttcctcaaggttggaatttgtgccaacctaaatacgttgtttctttgatggtgtttattgctattggtattattttgaactaataacaattattttgtctaaataatgctaagacaattctgttaagaattttgtcagctaacataattcattaagtatgtttggcatcatatggacaaaatatttggatgaatgactaaatttctgacacaattaaatattttggcattctatagacacatctcctatgtatgtctactgtaattaatccaagttaataaccaagttttctgaaatacttggcaggatttttggtatgaagttgggtagtggaatagggaatgaagagtgagttctaaaatacaaatatgaaagcaggtaatatatatcacaaaacaggggtctgatgaaagtacaatagccatgttgattcaataaacccagatgcatattttttgaaaaccaatgtgttattgaaacaaatcaatggcagtgttaatccataagagttctgattttctataggaatatcactaatcaaaaaaatgcactcatgaataattggaagatagctcacaagcaagaggaattgacccttgaataattatctgattaataggtttcatagggcattcaaagttgcagactcagttaatgactacagttaagttgtctggactgaaaagtcatttcttttgtttagaacctttttgcaaccgtagaaagcatattaaaccattggttttgcaggatggatctgtcaaaccacaatatatacatttggatcagtgtatcctaggagacagttaataaaaatgtattaaaggaaatctttaatcaataaatgaacttagattctgagatttaatggcatacctctgatcaaaatggcatatttaaagaaatttaaagatttggagaattggaaaatatcgttagctgtaaaagtaatattatgacatatttatgtagcacttctattttcagaatagttcagtgtcattcattagcacaggcaggtcccaaccacaatggttcaacttaacggttttttcatgattctgtgaaagcttcataatttctacatgctttgaattttgaattttgttattttttggagggctagtgatacatggtccatgaaatattcaacactttattataaaatagggtttgtgttagacaatttgcccaactgtaggatgaggtatatgttctgagcacgtttaagcaggtttaagttagggtgggctatgattttccatttaggtatctgaaatgcatttcagacttacaatgttttcaacctttgacttctttatctgtatgtaatcctattgttaaatcaaggagcattcatatttttcataaaaccggctacccaaggaaaaaaataattagctttatggatgatccatagagctttcagatgaagtgactaggataaaataaaagatgaaggtctgaggtttcttctgactccttcatatttctaaaaataatcatacaaactagaatactgctagtctcccaagtcctgttccttgtaattctcccactgttctcagtggccctaaccatctctataggttcctgacagggaagcagatcatttagttttaatttatgttcagtctcccacctccaccctggggcccaacttcccttgcaggccttgtgggtcctatagaaagttattcaccatgtaatctagcacagcatgttttgaagcatctttggaatgaaaaaaaagaagaatcaggctgttatttcctgaaattgttatgagagataacatgttgaaaggtaagaactcaggttgatattaatcatgtttttatcaatcttcattttaaagttgtttttgttctgtatattctaaattccttttattaattcctggcttgatcaagtgggctttggatccatatgatttttttttttttttttttttgagatgaaatctcgctcttgttgcccaggctggagtgcaatggagcgatcttggctcactgcaactctgcttcccaggttcaagtgattctccctgcctccgcctcccaagtagctgggattacaggtacctgccaccatgcccggctaatttttatatttttaatagagacggggtttcaccatgttggccaggctggtctcgaactcctgacctcaggcgatccacctgcctcagtctcctcccaaaatgctgggattacaggtgtgagccaccgtgcctggccagtgtgtttttttcctttaaatatatatggcattatacatccagcaaagtttactgtgttatactcattgcatcatttgtttaaaaaaaaaaaagaaacttgtagcaggagacatttaaaaatatatttaggagttccttttaataactaagttagagactctctttcagtaagttctatgactgtaccttaatgaatgcattttatttatctcaatttttatttgcttcaaaatagaatcggataagtttaaaatgttcctcttacatttgtgaatgtgtctatgagagaggggccatttctcacatattttaattaacaactaaataaacagacgttgttttaaaggaattaacacttaaatcccaaccatcctcatatagaataaaatatcaacctaaatctttactatagatagtataattctattatgtacctgtaatgataagcattgaaagattatttacattttgaaaaacatggaattgattcttattaagaaaaaagatattttccaatggagtaacttgttttaatagaggtacaaccagaaccaacaattgtatttctctatagttattttaaaatagtaatcaatgctatgtatttgatgtatatgtttctaaattagaaatttcttttggctttgtgtttttttaatgtgcgttaaatatgtaaactgaacctgttcctaaaatgcattaaacttgaatgctgtgtctatccaatgccaaaatgctcagaagaaaagtgaataattcagtcattcatctggatgtagttttctgtgtaatctcaaatatctgaatattgaaaaaactaggttgctaacttttttcattccttatgcaaatgtttagcatcatagtgctgtttcagatacagatctgtttcatcaaatatcctcaattacaagtctaagacagttatatgtaaagaaaatgtattattttagatgaacaatgtggataactgaactaaaacgatatttgtgaactttgctataatgaaatcttttatttttatagctcaggtattgtaattagcactaattgcagcagagactgaaataattattgacaccgtagagtaccatagagtaggttgaactggccagacctagacaatgaagaaaacacatactgtttacttaggagacattttcttagtcgtgtgtatagtcctaaatttccccaaactatgtgttcatttggattgtgttatataataacagtcgaatgatgaagaataaaagatgctgaaagatg

SEQ ID NO: 15915 - DNA, 4073 bp, Homo sapiens
  source 1..4073: mol_type = unassigned DNA
gaaaatgcataattgcagtccacgtgcctcggtttccgttagcaaccagaggcttctaaacaacctaccctccttccccattttctgtggtccaactaccctcggcgatcccaggcttggcggggcaccgcctggcctctcccgttcctttaggctgccgccgctgcctgccgccatggcagagttgggcctaaatgagcaccatcaaaatgaagttattaattatatgcgttttgctcgttcaaagagaggcttgagactcaaaactgtagattcctgcttccaagacctcaaggagagcaggctggtggaggacaccttcaccatagatgaagtctctgaagtcctcaatggattacaagctgtggttcatagtgaggtggaatctgagctcatcaacactgcctataccaatgtgttacttctgcgacagctgtttgcacaagctgagaagtggtatcttaagctacagacagacatctctgaacttgaaaaccgagaattattagaacaagttgcagaatttgaaaaagcagagattacatcttcaaacaaaaagcccatcttagatgtcacaaagccaaaacttgctccacttaatgaaggtggaacagcagaactcctaaacaaggaaattttaagacttcaagaagagaatgagaaattgaagtcaaggttgaagaccattgaaatacaggctacaaatgcactggatgaaaagtcaaaactagaaaaagcactgcaagatttacagcttgatcaaggaaatcaaaaggattttataaaggcccaagacttaagtaacttagaaaacactgtcgctgccttaaagagtgagtttcagaagacacttaatgacaagacagaaaaccagaagtcactggaggagaatctggcgacagccaagcacgatctactcagggttcaggagcagctgcacatggctgaaaaggaattagaaaagaaatttcagcaaacagcagcttatcgaaacatgaaagagattcttaccaagaagaatgaccaaatcaaagatctgaggaaaagactggcacaatatgaacctgaagattaaaactgaagatttcctctggaagctaccacatgcaaacatacaagcagtctcacctcaggcatgtattttgaaaagcattttgtcatatcccctctccttatttttctaatatttagactttgaatatttagaactagagttcctattttcagctagttgaaaacagagaaaacctagtgattctgtctggtcatcccacacacctctctactgagtgctccagagtcttagctcacatgcactgagaattctttacagcaaagaagagatttttagagtgggaagaagaggcttatccttctgcattagtataaagagtctgtatttttaataaatgttaaataagctaacaatgtttgtacttatgcattccccatgggtaaaaataaataatagcattgttaaagatagttattaccaaaaaaagagagttattacaaataaatatgtctctttatttttaaaaatgaaatcttaattcatttactctatttgatgataaactataaattcattgaaaatgtgaattctattatgggtagcctttttaccaattataaggaaaatttacagcagtgaacatgaacattcacttagcttcctcagtctctccatcttaaagatcatttatcagaggaggttcagcattttttgcagcataacttttcatgagtctgtattactaatggataagtcaaatccatcctgcacttctacagtttagaaagtatctggactcagaataaatgtaatatttatacttgtttccagaatgttattttacattttatgttcaataagaacactttttaaaagacgtatattcaacataaaatcagctatcagacttcagattagactttatttatgtgggtctataataattgtattttcaagaggttttcactatatttgtattggcctggttttctcagacgattttggacaaatcattagaaactgggcatcatatccacagttatgtaaggcagtgatatactataaggataaacaaagtcaagtccataaagcaataatccctcagaaggaaagtccttacttttcacatattaatatttagtaatttttcctgcttctaaaagtgagagtatcacaccctaaatgaacactgtctactaagagacatcattccatttccacaaatgaagattttattccaagaaacgagtttactgattggagcatagggcttgttgttatttttattcaagcttttagtaatagccttgaatttattatttttcttataggctttttgttaaaatagtgaaggaacaaatgttaaagggtaagataatttccctgcaaaaggacacagaaggcagtcttaagaagatgaatggatgagagaagggagagaataaaatgcaataacgagccagcatttactatgtattttctcctcacctgtctctccatatttaggtcacttaccagtttctgtgcccttttggagcttttgttgagggcttcattctcaccctgtatttctttagccctaaattgacactctctccaaaaatccattccattgtctgtggaccaagatgttctatgtaattcagaagcagaactcttggctaaagggctagtgtggccttcagaaaccattcaattattttctccctacacctttgtcagtttgaaaccagtgaggaaaaaaggtatgttgataagaaacctatattgctaggtagaatttgtacttgttttcttggtagcagttttgaaatattctgtacagtacgttcctattgtttaataataaattcaaaaatatttctaaaaccttaaaaccaactatgccaagcattaagataaacaaatatgatgttctttgacgtaaatcaacgtgatgattctttcacatgtaaacacattttagtgtttctggtttgtcatttttgttgttgttgttgttgttgttatttactctataccctttagcaaaatacagttttaaatttttattgtttttagtagtttcccaactttaagacttatctaatttaactgagaaagaaagcctttttcatatatatatatattggatttctaaggatggtggtttgagccttgattagacttttgatgtgctaagccagacaggcagtctgtacattgatggccatcacaatgcagctttggtttaatttaattcaggcctgctgctgagttatgcacagactttttgttgaccaaaataaaatataaagggttttcttctgtttgacatttgtgttcattttttctctttatgtattacattttaacctatattaaataaatgtttaaatgataatttgcttatgtcttataaaactcagcataagaaaaatactgccctaccttgactgtgtaatcttatttgataaagcctttgctattcattatttccattctgattaactgaaagagatttatagagatgctcaaattttaagcccttggtgcttttagatatatattggttgcaaaagtttggcattaatgatttccctctgcttatgtgtaaatgcctatgttccaaagctttgccactagatattcaaatcataaattgtcatgtaagccagtcttccagaaagaaaagctatttcagcaaaatgatatttcacatttagacaaaacagtagtatttagacaataatattttgacaaaaccattttcaaaactgcttaggaaaaaggggaaatattatacttaaaggtaatgacctctgtcttgaatagaggtgagtgggttggtgacaactggtttggaggcttttgtgggggactgtggtgtcttttggattgtgtcatcagctccttcatcaagtaagcgtgtagctgttattgcctattgtaaaacatgaattgatgtgaacagtactcaatctcttacattatatgaagtataacttcctctcttttttgcctataatacatcctttaacttttacagattaaaaaaccactgttagacaaagcaaaa

SEQ ID NO: 15916 - DNA, 2014 bp, Homo sapiens
  source 1..2014: mol_type = unassigned DNA
acacacatctgaagagcaaacagatggtgaaaccagtagcccaagatgagaaaacggactttttttgagacagcagttgaagctgaagcctcaaaagccgggcggggggaaagcatagcaattatgaaagacattcaaagtgggttaggggtgagggaaaggtcagccttttacttttcccacacccgctgttttctgaagaaggatggtaatgcgagcagaagggtgatggccaacctctgggctttgatgtgtgtcccctcctcccgcccccatcctgcaagctctggggaggtcggagactagtgtggtttcctcacacctcccaccatgctggcactgaggttatctaagagttgacagccccatctaaagccttgaatgaattaagtcttttttagctaaaaaatgaacaaaacctgagatgcatgagtgtccttaccaaaaggaagtccttgtttctaggacaggtctgtcttcgggcctgtgggtccatagaatcatcacagaaaaaatgatttcaggaggtctcccccgctttctgctcccaaggccgactctgactgagcctcggaggagagaaggaagccatttctgggaggccaaaacgtccgtcttccaggctcttgctgtaagtcagcccacttttacagatgaggaaccaagacccagggaagatgggaaggcagagaaaatccatcaagttgtaccctacccaccctttggtgacttttccaagaagctgggctaagttccaggagaaagctctgcagagttgggcctaaatgagcaccatcaaaatgaagttattaattatatgcgttttgctcgttcaaagagaggcttgagactcaaaactgtagattcctgcttccaagacctcaaggagagcaggctggtggaggacaccttcaccatagatgaagtctctgaagtcctcaatggattacaagctgtggttcatagtgaggtggaatctgagctcatcaacactgcctataccaatgtgttacttctgcgacagctgtttgcacaagctgagaagtggtatcttaagctacagacagacatctctgaacttgaaaaccgagaattattagaacaagttgcagaatttgaaaaagcagagattacatcttcaaacaaaaagcccatcttagatgtcacaaagccaaaacttgctccacttaatgaaggtggaacagcagaactcctaaacaaggaaattttaagacttcaagaagagaatgagaaattgaagtcaaggttgaagaccattgaaatacaggctacaaatgcactggatgaaaagtcaaaactagaaaaagcactgcaagatttacagcttgatcaaggaaatcaaaaggattttataaaggcccaagacttaagtaacttagaaaacactgtcgctgccttaaagagtgagtttcagaagacacttaatgacaagacagaaaaccagaagtcactggaggagaatctggcgacagccaagcacgatctactcagggttcaggagcagctgcacatggctgaaaaggaattagaaaagaaatttcagcaaacagcagcttatcgaaacatgaaagagattcttaccaagaagaatgaccaaatcaaagatctgaggaaaagactggcacaatatgaacctgaagattaaaactgaagatttcctctggaagctaccacatgcaaacatacaagcagtctcacctcaggcatgtattttgaaaagcattttgtcatatcccctctccttatttttctaatatttagactttgaatatttagaactagagttcctattttcagctagttgaaaacagagaaaacctagtgattctgtctggtcatcccacacacctctctactgagtgctccagagtcttagctcacatgcactgagaattctttacagcaaagaagagatttttagagtgggaagaagaggcttatccttctgcattagtataaagagtctgtatttttaataaatgttaaataagct

SEQ ID NO: 15917 - DNA, 1272 bp, Homo sapiens
  source 1..1272: mol_type = unassigned DNA
agatgcatgagtgtccttaccaaaaggaagtccttgtttctaggacaggtctgtcttcgggcctgtgggtccatagaatcatcacagaaaaaatgatttcaggaggtctcccccgctttctgctcccaaggccgactctgactgagcctcggaggagagaaggaagccatttctgggaggccaaaacgtccgtcttccaggctcttgctgtaagtcagcccacttttacagatgaggaaccaagacccagggaagatgggaaggcagagaaaatccatcaagttgtaccctacccaccctttggtgacttttccaagaagctgggctaagttccaggagaaagctctgctggtggaggacaccttcaccatagatgaagtctctgaagtcctcaatggattacaagctgtggttcatagtgaggtggaatctgagctcatcaacactgcctataccaatgtgttacttctgcgacagctgtttgcacaagctgagaagtggtatcttaagctacagacagacatctctgaacttgaaaaccgagaattattagaacaagttgcagaatttgaaaaagcagagattacatcttcaaacaaaaagcccatcttagatgtcacaaagccaaaacttgctccacttaatgaaggtggaacagcagaactcctaaacaaggaaattttaagacttcaagaagagaatgagaaattgaagtcaaggttgaagaccattgaaatacaggctacaaatgcactggatgaaaagtcaaaactagaaaaagcactgcaagatttacagcttgatcaaggaaatcaaaaggattttataaaggcccaagacttaagtaacttagaaaacactgtcgctgccttaaagagtgagtttcagaagacacttaatgacaagacagaaaaccagaagtcactggaggagaatctggcgacagccaagcacgatctactcagggttcaggagcagctgcacatggctgaaaagatatgaacctgaagattaaaactgaagatttcctctggaagctaccacatgcaaacatacaagcagtctcacctcaggcatgtattttgaaaagcattttgtcatatcccctctccttatttttctaatatttagactttgaatatttagaactagagttcctattttcagctagttgaaaacagagaaaacctagtgattctgtctggtcatcccacacacctctctactgagtgctccagagtcttagctcacatgcactgagaattctttaca

SEQ ID NO: 15918 - DNA, 1370 bp, Homo sapiens
  source 1..1370: mol_type = unassigned DNA
ctggccaccaagcgcctccgtggacacgcacttcctgcgaggcctccgtgcgcaccttggccgagccgaaccgagccgagtcctgtccttccaggccgttcgcaatggtggatgagttggtgctgctgctgcacgcgctcctgatgcggcaccgcgccctgagcatcgagaacagccagctcatggaacagctgcggctgctggtgtgcgagagggccagcctgctgcgccaggtacgtccgccgagctgcccggtgcccttccccgaaacgtttaatggcgagagctcccggctccccgagtttatcgtgcagacggcgtcttacatgctcgtgaacgagaaccgattctgcaacgacgccatgaaggtggcattcctaatcagcctcctcaccggggaagccgaggagtgggtggtgccctacatcgagatggatagccccatcctaggtgattaccgggccttcctcgatgagatgaaacagtgctttggctgggatgacgacgaagacgacgacgacgaagaagaggaggatgattattaggccctcgaccctcgggcctcgggggggagggccctgcacgccgccaccccctccccgcagccctcaccccgccaggagccactgctctcccccttgccctccggtccccttacctacccgcgcccgtctgctctctctcttcatttctccgtagtgcttgtctttgttccaggaatagcgctccagttacctgctgctggggtcggggctggagcctcactcactcggaagtgcttggaagtgtcatctaccctggccatccccgggatccctcccctgctaatctgaactgtgtcctgaaccccagctattggccaggcccctgttacaaactgcgcagaccacccatagccctgctgctgccacctgccctgctgccaggcttacatcttcccagagaactatgctgccacttcacatccactcaccacatcccacctacagactaccacctttcgagatcaggaccaacctggaaaatgccagagttggctatgccttttcagacattgatttggacagctcaccaacccctgaaggggccgttcagcctggttagttttctacctactccgagtgtcctcccctgccccaccagattgctgcaggggcgcggtgtgcctggcagccaaattgttgacacttcttttttcctatgcactggttttacacagctgtcatttttctttcaaaattgcagcagtcccacagatgtgtgcatttggacaaatagtacttaaaaacaaaacaaacaagcactcagcccagctcctcaatactacctggaaaaagcattggcattattttcaataaatatcaagcact

SEQ ID NO: 15919 - DNA, 5462 bp, Homo sapiens
  source 1..5462: mol_type = unassigned DNA
gaaccggtagtccgcggtggcgcggtccgcccctcacctggccagcggcgggcgctgaggggcccaatgggagccgcggcctggccgccccgccccgcgcctccggacgtctgtgccgggacaaggccgccgctggtgccgggtccttgaggagagcgcctcccgtccgaggccagccgcctctgtcagccgtccgcgcgggccgggtctgaagcgccgccgggacggcgaagagccgcggccgccgcggagaaggaggcagcgcaggaggccggagcggccgccgcgcccgagcacatggcgtccatcttactgaggagctgccgcggccgggcgcccgcccgcctcccgccgccgcctcggtacaccgtcccgcggggtagtccaggggatcctgctcatctcagctgtgccagcaccctggggttgaggaactgcctgaatgttccatttggctgctgcactcccatccaccctgtgtacacatcctccagaggcgatcacctcggctgttgggctctgaggcccgagtgccttcgcatagtgtcgagagcgccatggacctctacctctgtgggttttgtggctgtgggacctcagtgccttcctgtgcgtggctggcactcttcgcgccctgttcgcgatgactcggtagtagagaagtccctcaagtccttgaaggacaagaacaagaagctggaggaaggcggcccggtgtacagcccccccgcagaggtggtggtgaagaagtccctggggcagcgggtgctggacgagctgaagcactactaccatggcttccgcctgctatggatcgacaccaagatcgcggcacgcatgctctggcgcatcctcaacggccacagcctgacccgccgggagcgcaggcagtttctccggatctgcgctgacctcttccgcctggtgccgttccttgtgttcgtggtggtgccgttcatggagtttctgctgcctgttgctgtgaagctcttccccaacatgttgccatccacatttgagactcagtcactcaaggaggagaggctgaagaaggagcttcgggtcaagctggagctggccaagttcctccaggacaccatcgaggagatggccttgaagaacaaggcagccaagggcagcgccaccaaagacttctctgtgtttttccagaagatccgggaaacaggggagaggcccagcaatgaggaaatcatgcgtttttccaaattatttgaggatgagctgaccctggacaacctgacacggccgcagctggtggccctgtgcaagctgctggagctacagtccatcggcaccaacaacttcctgcgcttccagcttaccatgcggctgcgctccataaaggcagacgacaagctgattgctgaggaaggggtggacagcctgaatgtcaaggagctgcaggcagcgtgtcgggcacgaggcatgcgggccctgggcgtcacggaagaccgcctgaggggtcagctgaagcagtggctggacctgcacctgcatcaggagatccccacatcgctgctcatcctgtcccgggccatgtacctcccggacaccctctctccagccgaccagctcaagtccacactgcagaccctcccagagattgtggcaaaggaagcacaggtgaaagtggccgaggtggagggcgagcaggtggacaacaaggccaagctggaggccacgctgcaggaggaggcggccatccagcaggagcaccgtgagaaggagctgcagaagcgctcggaggtggcgaaggattttgagcccgaacgtgtggtagctgctccccaaaggccggggaccgagccacagccagaaatgcctgacacagtcctgcagtcagagaccttgaaggacactgccccggtgctggagggcttgaaggaggaagagatcacgaaggaggaaatcgacatcctcagcgatgcctgctctaagctgcaggagcagaagaagtcactcaccaaggagaaggaggagctggagctgctgaaggaggatgtgcaggactacagcgaggacttgcaggagatcaagaaggaactttcaaagactggtgaagaaaagtacgtggaagaatctaaagccagcaagagattgacaaaaagggtgcagcaaatgatcgggcagatcgatggcttgatctcgcagctggagatggaccagcaggctggcaagctggccccggccaacggcatgcccacgggggagaacgtcatcagtgtcgctgagctcatcaacgccatgaagcaagtcaagcacattcccgaaagcaagctcaccagcctggccgcagcactggatgaaaacaaggatggcaaggtcaacatcgacgacctcgtcaaggtgattgagctggtggacaaagaagatgttcacatctccaccagccaggtggctgagattgtagcaacactggaaaaagaggagaaggtggaggagaaggagaaggccaaagagaaggcagagaaggaggtcgcagaggtgaagagctagaaccactggcctgggcacctgtcctcctgctgtgccgtcaccctggcaagggccgtgagggcgattgctttgtggtgattctcagtggctcatctaatattttggctggaataaatcagagacttccataatcaagtaaattttaattttcatcattccacggagattcagtctgtctggaatcccggaacccctccacagaatcgtgtctggatccacactgtggtgtggctgccacggcctcctggctccagaggcagctgggctgggccaaggcaggaaggcgcccccatgtgtgtggcctcagtctcagcatctgactgtgctgccctgtccccagggaagagaatgaggaccacgtggactccgcccacacagagctggctgctgtgcccaccctcaggggcgtcaggagacacagcctggcctcctcagggctgaagatgcctccattcgcctgtggaccttgatttctagatttcagtgtcaatagacctgtcttcctgcacactttcagttggatgtgggtcattgtggagacagaggtgtctgccatctctgtggcctctggagagtgacgtctccctgctgggagtgctggttctcacgtgcggtttcccttgtgtatcggagctctttctcggctttctatttcccccagttctttaagcagtcaattggcacagagtttcccacgggggctgcagtggattcactgtgtcagggatgagcctggcttgggggttggtggggctctgaagcgcatttggggttctttgtagcttctaatgtgaggtttgagtccagtgcgcccacagcagcatgcccttctcaccccttgcagtgttgcaggctcaggcccctgggctccttcagcaagcaggctagtcaatgaggcatgaggatccggcacagggcatcccctggggcttcaagggcaatacccccgtgcttagggtttgccctgtgccctctgggtggggtggcctccccgcactcggcagcatggccaggctggccagggcgtgggcaggtggtgtcctgtggcacctccatcctcctgcccagccggctgtgtcacactcatctttttaaggtcaggttggttcctggcaaaaatgtacctccaggggcctccaagcataggatttggaagacaggaacggcacaggcgtccaggaaagcagctgcactcagacaatgccttctccattacttgaagcttctttctgttcagccattaaagaaacttgacaaaataggaacaggagatatttctcaattgtaaacctttgtgcagggacagttggcttccagaggctttcagctttcagttatttgagaagtttgttttagatccttaactaatatttatgaattctctcaccctgtgtaagtagcctggtgttcgtttgtccaagtgtacttacccttgagaacaagtcttgcagttgccaggtgtgtgcagacgcctctcctgtgagcggcatcgcgggcccagtcagctgccccggctctcatcctcgtcctcactgccttggctgagcactgttgacgtgaacagccactgcaacaggcagcccatcccactgtcccctctgccctggactccgcatggcctccaaaagccagcttgccctccgggtgctgcaggggctttgcaggtggggaaggctctggtgggtgcctttggtggcttccgtgacatcagccgtgctctgatgcaggcttgctccctcgtcattctccctcgtcattctccctcatcgttctgtgtgcatttttctctatgtcctgacctttcttcttgcacctaaaagtggtgtctgggtgcaaatgtaagcagtggtggatccagaaatatgagctttgtgtaataagcttcttaaaacagtcctttcttacacctgcccagggccagaccctcggtcttggcctttttcaggagctaggatatctgcgcctggtgaaaatgaaacgaattcctgatttaggaattcagtgtttcctcctcactccagctaagcactcacttttttttttttttttttttttttttgatacagagtctcgctctgtcacccaggctggagtgcagtggtgcgatctcggctcactgcaagctccacctcccgggttcaagcgattcttctgcctcagcctcctgagtaattgggattacaggcatgcgccaccatgcccagctaatttttttttttttttttgagacagagtcttgctctgtctcccaggctggagtgcaatggcgtgatctcggctcactgccagctccgcttcctgggttcacgccattctcctgcctcagcctcccgagtagccaggactacaagcacccgccaccacacctggctaatttttttgtatttttattagagacagtgttttaccgtgttagccaggatggtctcgatctcctgacttcgtgatctactcacctcggcctcccaaagtgctgggattacgggcaagtttttattagagatggggtttcatcatgttggtcaggctggtcttcaactcctgacctcaggtgatccacccgcctcagcctcccaaagtgctgggattacaggcatgagccaccgcgcccggcctgaactctcagttctaacgcagggattcaggaattgggctttcagactccttctgcagtgtcacagtccagactttttttaaatgaaggacaccccgcagtggctcacagtgggtcccagggctagcaggagcgtgctggggagccggctctgtctttgttcgcagtgggtcccggtgctggcaggagtgtgctggtgagccggctctgtctttgtaaatccttcaggggtcctacggctgactccaccggacagcccgtcctgggccgtgttaagcaccttttgtagaaatcgtatttttattaaaacatcaaatctgtgttcctgtaa

SEQ ID NO: 15920 - DNA, 2227 bp, Homo sapiens
  source 1..2227: mol_type = unassigned DNA
atgcgacacacatggccttttaggaatgttccatttggctgctgcactcccatccaccctgtgtacacatcctccagaggcgatcacctcggctgttgggctctgaggcccgagtgccttcgcatagtgtcgagagcgccatggacctctacctctgtgggttttgtggctgtgggacctcagtgccttcctgtgcgtggctggcactcttcgcgccctgttcgcgatgactcggtagtagagaagtccctcaagtccttgaaggacaagaacaagaagctggaggaaggcggcccggtgtacagcccccccgcagaggtggtggtgaagaagtccctggggcagcgggtgctggacgagctgaagcactactaccatggcttccgcctgctatggatcgacaccaagatcgcggcacgcatgctctggcgcatcctcaacggccacagcctgacccgccgggagcgcaggcagtttctccggatctgcgctgacctcttccgcctggtgccgttccttgtgttcgtggtggtgccgttcatggagtttctgctgcctgttgctgtgaagctcttccccaacatgttgccatccacatttgagactcagtcactcaaggaggagaggctgaagaaggagcttcgggtcaagctggagctggccaagttcctccaggacaccatcgaggagatggccttgaagaacaaggcagccaagggcagcgccaccaaagacttctctgtgtttttccagaagatccgggaaacaggggagaggcccagcaatgaggaaatcatgcgtttttccaaattatttgaggatgagctgaccctggacaacctgacacggccgcagctggtggccctgtgcaagctgctggagctacagtccatcggcaccaacaacttcctgcgcttccagcttaccatgcggctgcgctccataaaggcagacgacaagctgattgctgaggaaggggtggacagcctgaatgtcaaggagctgcaggcagcgtgtcgggcacgaggcatgcgggccctgggcgtcacggaagaccgcctgaggggtcagctgaagcagtggctggacctgcacctgcatcaggagatccccacatcgctgctcatcctgtcccgggccatgtacctcccggacaccctctctccagccgaccagctcaagtccacactgcagaccctcccagagattgtggcaaaggaagcacaggtgaaagtggccgaggtggagggcgagcaggtggacaacaaggccaagctggaggccacgctgcaggaggaggcggccatccagcaggagcaccgtgagaaggagctgcagaagcgctcggaggtggcgaaggattttgagcccgaacgtgtggtagctgctccccaaaggccggggaccgagccacagccagaaatgcctgacacagtcctgcagtcagagaccttgaaggacactgccccggtgctggagggcttgaaggaggaagagatcacgaaggaggaaatcgacatcctcagcgatgcctgctctaagctgcaggagcagaagaagtcactcaccaaggagaaggaggagctggagctgctgaaggaggatgtgcaggactacagcgaggacttgcaggagatcaagaaggaactttcaaagactggtgaagaaaagtacgtggaagaatctaaagccagcaagagattgacaaaaagggtgcagcaaatgatcgggcagatcgatggcttgatctcgcagctggagatggaccagcaggctggcaagctggccccggccaacggcatgcccacgggggagaacgtcatcagtgtcgctgagctcatcaacgccatgaagcaagtcaagcacattcccgaaagcaagctcaccagcctggccgcagcactggatgaaaacaaggatggcaaggtcaacatcgacgacctcgtcaaggtgattgagctggtggacaaagaagatgttcacatctccaccagccaggtggctgagattgtagcaacactggaaaaagaggagaaggtggaggagaaggagaaggccaaagagaaggcagagaaggaggtcgcagaggtgaagagctagaaccactggcctgggcacctgtcctcctgctgtgccgtcaccctggcaagggccgtgagggcgattgctttgtggtgattctcagtggctcatctaatattttggctggaataaatcagagacttcc

SEQ ID NO: 15921 - DNA, 6335 bp, Homo sapiens
  source 1..6335: mol_type = unassigned DNA
acatgctcctcctgtccttctggcggagcgtgcttcccgctgcggggacgttcgagcaatggcagccctgctgagatccgcgcgttggttgctgcgtgccggggcggccccgcgcctcccgctctccctgcgcctcctccctggcggcccgggccggctgcatgccgcctcctatctgcccgccgctcgcgccgggcccgtggccggaggactactgagcccagccaggctgtatgccattgctgccaaagaaaaagatattcaagaggagtccactttttcttctaggaagatttccaatcagtttgattgggctctaatgagactagatctttctgttcgaagaactggccgcattccaaagaagcttctacaaaaagtttttaatgatacctgccgctcaggtggcctaggtggtagtcatgccttgcttctactacgtagttgtggttctctcttgcctgaactaaagcttgaagagagaacagaatttgctcataggatatgggacacacttcagaaattaggtgctgtgtatgatgtgagtcactataatgctttacttaaagtctatcttcaaaatgaatataaattctcaccaactgatttcctggcaaaaatggaggaagcaaacattcaaccaaatcgagtgacataccagagattgattgcttcttattgtaatgtaggagatattgaaggtgccagcaagattcttggatttatgaaaactaaggatctcccagttacagaggcagtattcagtgcccttgtgacagggcatgccagagctggtgatatggagaatgcagaaaacattctcacagtgatgagagatgccggaattgagcctggtccagacacatacctcgcattattgaatgcatatgctgagaagggcgacattgaccatgttaagcagactctggagaaggtggagaagtccgagcttcaccttatggaccgtgatttactgcaaattatttttagcttcagtaaagctgggtatcctcagtatgtctcagaaattttggaaaaagttacatgtgaaagaagatatattccagatgcaatgaacctcattttacttttagtcactgaaaaattggaagatgtagcgttgcaaattttactagcatgccccgtatcaaaggaagatggcccaagtgtctttggcagtttctttttacaacactgtgtgactatgaatacgcctgtggagaagctaacagactactgtaagaagttaaaggaagtccagatgcactcctttcctctgcagttcaccctccattgtgctttactcgccaataaaactgatttggcaaaagccttaatgaaggctgtgaaggaggaaggttttcctatcagacctcactatttctggccattgctagttggacgtcggaaggaaaaaaatgttcaaggtataattgaaatcctcaaaggaatgcaagaattgggagtacatcctgatcaggaaacatatacagattatgtgattccatgctttgatagtgtaaactcagcacgagccattttgcaggaaaatggatgtctgtctgatagtgatatgttttctcaagctggattgagaagtgaagcagcaaatgggaacttagactttgtattatcatttttgaaatcaaatacattgcccatctcgctgcagtctataagaagtagcctactgctaggcttcaggaggtctatgaatataaatctttggagcgagataacagaattgttgtacaaggatggacgttattgccaggagcctcgaggaccgacggaagctgttggctattttctttataacttgattgacagcatgagtgactcagaggtacaggccaaggaggagcatttgagacaatacttccatcagctggagaagatgaatgtaaaaattcctgaaaatatctacagaggcattcgtaatctcctggaaagctaccatgttcctgaattgattaaggatgctcacttgttggttgagagtaagaatttagactttcaaaaaactgtgcaacttacatcatctgaattggagtccacacttgaaacactaaaagctgaaaatcaacctataagagatgtcctaaagcaactcatattagtgctttgttcagaagagaatatgcaaaaagcccttgaattgaaagcaaaatatgaatccgacatggttactggtggctatgcagctttaataaatttatgctgtcgacatgataaagtagaagatgccttgaacttgaaagaagaatttgaccgcttagattcatctgctgtccttgacaccggcaagtatgtaggccttgtaagagtattggcaaagcatggcaagctccaagatgctattaacattctgaaggagatgaaagagaaggatgttcttatcaaagatacaacagccttgtcctttttccacatgctaaatggcgcagctttaagaggtgaaattgaaacagtaaaacagttgcatgaagccatcgtgactctagggttagcagaaccatccaccaacataagtttcccattggtcactgtacacttggaaaagggcgacctatctactgctcttgaggtcgccattgactgctatgaaaagtataaagtattaccaaggattcatgatgtcttgtgtaaactggtagagaaaggcgagactgatctaattcagaaagcaatggactttgtgagccaagaacaaggtgaaatggtgatgctctatgatctcttctttgccttcctacaaacaggaaattacaaagaggccaagaagatcattgagactccagggattagagctcgatctgcaaggcttcagtggttttgtgacagatgtgttgcaaataatcaggttgaaactctggaaaaattagtggagctgacacagaagctatttgaatgtgatagagaccagatgtactacaatctgctaaaactgtataaaataaacggtgactggcaaagagctgatgcagtctggaataaaatccaagaagaaaatgttattcctcgtgaaaagacattaagattattagcagaaatccttagagagggtaaccaggaagttccgtttgacgtacctgagttgtggtatgaagatgaaaaacattccctgaattcttcgtcagcctcaaccacagaacctgatttccagaaagatatattgattgcctgccgattgaaccaaaaaaaaggggcatatgatattttcctgaatgcaaaagagcaaaacattgtgtttaatgctgaaacctacagcaatctcattaaattactgatgtcagaagattattttacacaagcaatggaagtgaaagcattcgcggagacccacatcaagggcttcacactgaacgatgctgccaacagccgcctcatcataacgcaagttaggcgggattatttgaaagaggctgtgacaacactgaaaacagtattggatcagcagcagaccccttctaggttagcagtgacccgtgtcatccaggcattggccatgaagggtgatgttgaaaacatagaagtagttcagaagatgttaaatggactcgaagactccattggactttcaaaaatggttttcatcaataacattgctttggctcaaataaagaataataacatagatgccgcaatagaaaacattgaaaatatgcttacttcagagaataaagtcattgaaccccaatacttcggcttggcatacttattcagaaaagtaatagaggagcagttggaaccagcagttgaaaagataagcatcatggcggagagattggccaatcagtttgcaatttataaacctgtcactgattttttccttcaacttgtggatgcaggcaaggtggatgatgccagagctctcctacagagatgtggtgcaattgctgaacaaaccccgattttgttgttgttcctccttaggaattctaggaaacaaggaaaggcatcaactgtgaaatctgtgttagaattgattcctgaattaaatgaaaaggaagaagcatacaattccctcatgaaaagctatgtctcagagaaagatgtcacatctgctaaagcactgtatgaacatttgactgcaaagaatacaaaattggatgatctgtttctaaagcgttacgcatctttgctgaagtatgctggagagcctgtccctttcattgaaccccctgaaagctttgaattttatgcacagcagctaagaaaattgagggaaaactcttcttgaaataaccaggcgatactttgttttgtatatatttgtgattctgtgtctacatgttattttgaagtatatctgagggaaaaataaatgaaaattttctttatgtacttatgtatgtgtgatgcatgttcaaagtcttattgaccataactctgtgcacttggttattggacatttttggagtttttttctctgggaaaaatcgatagtgttttcttcaatgctgctgctgtgtgaagccatactttttcaggattcttcccctaattggctctttggtttccctgctctgtttcatttatttcattaaaatgttattcctttatttaagattcacttattagtctgctgtttctctgaaaaattttagagctaggtatagtgaccgtgaactttctaacgcataatattctgtgatacagccattccgtacatgtgtgaagtcctgcataactttcgaactttgttaaatgttggcactaggagtcatcagatctaggcttcatcattttccagtgagaagcagagacccaaagggcctgttacttgtgcttggtcaggggactgtctgtcatgcctggaggctcttcggcacacttccccatctttcccttctgccactgtggcttcaagcacctctgttcatagagcgtctctgaaattgagtctcggtcatgacttatcccgaagtagagcaatgtgtttcctctcattgtagtttcaggactttgtcagtacaagctctgccctaggcttgttactttatactcatatcctgaaaagatgtgatttcatctatgaaggggtaaaatattggtttgtatttaattgtttgaaataaaagtgatccctatattgaatctcatgcctgttaatatctacactgtaagtagtgacttcaaaaaaattctaagataggtagtcaggagagtttgccattataaaaggtgtcttaataatatggaatattgacctaactggagatgaggtaattaattaccgaaatgttgaaaatgttttgagaactctccccattttggggtattccttgttcatttgaatttggtgactccctactgttccagtttcagtgccaacttgggtcacactgttcacatcaggggagaccttgccttggggacgtaggcgggcctcttgcaacttgtgctgttgaccttctgtcttgtggaactctctctcctgcatctgctacctgcccgcagatggtgtgagggagggttgatggcgggaagccaggaagtagatgtcatcatggtattggccaggcttttacttcaactctttttgtggcgttagatttaaggaagcagggggcatggccaacgttgagtcttggcccagtggacatagtgcggctttcccttgagcactgcccagatgcaggacctgcacatgttacaggtttgccaaaagcatctttttttttttttttttttttgagatagtcttgctctgttgcttaagccagagtgcagtggcgcaatctcagctcactgcaacctccgcctcctgggttcaagtgattcttgtgcctcagcctcccacgtagctgagattacaggcttgcaccaccatgttcagctaatttttgtatggtaaagacggagtttcaccatgttggccaggttggtctcgaactcctggccccaagtgatcctccccctgcgctcgcttcagcctcccaaagtgctgggattacaggtgtgagccaccacgcctggccaagagcctcactcctgtctttagtgattgcactgaagcaggcctcatttttttgcagtcatgctaaccacaagttagtcaacattcactaattgacattcattagaataggtctccaaggtgaggcataacgttggggtgtaatctggatttcgcagtcatctttttggggaaactgaaagtaccatctcatttgcatgaagtgactccacactggccctgtatatggactctggtaaaatgtgagtgtggtacagaggaaataggtaagacccccttatctagccctctcggcagcagcgggggggtgttacaaaggactagctgttcaaatatcttttgtattgtattg

SEQ ID NO: 15922 - DNA, 6422 bp, Homo sapiens
  source 1..6422: mol_type = unassigned DNA
acatgctcctcctgtccttctggcggagcgtgcttcccgctgcggggacgttcgagcaatggcagccctgctgagatccgcgcgttggttgctgcgtgccggggcggccccgcgcctcccgctctccctgcgcctcctccctggcggcccgggccggctgcatgccgcctcctatctgcccgccgctcgcgccgggcccgtggccgggtggcctaggtggtagtcatgccttgcttctactacgtagttgtggttctctcttgcctgaactaaagcttgaagagagaacagaatttgctcataggatatgggacacacttcagaaattaggtgctgtgtatgatgtgagtcactataatgctttacttaaagtctatcttcaaaatgaatataaattctcaccaactgatttcctggcaaaaatggaggaagcaaacattcaaccaaatcgagtgacataccagagattgattgcttcttattgtaatgtaggagatattgaaggtgccagcaagattcttggatttatgaaaactaaggatctcccagttacagaggcagtattcagtgcccttgtgacagggcatgccagagctggtgatatggagaatgcagaaaacattctcacagtgatgagagatgccggaattgagcctggtccagacacatacctcgcattattgaatgcatatgctgagaagggcgacattgaccatgttaagcagactctggagaaggtggagaagtccgagcttcaccttatggaccgtgatttactgcaaattatttttagcttcagtaaagctgggtatcctcagtatgtctcagaaattttggaaaaagttacatgtgaaagaagatatattccagatgcaatgaacctcattttacttttagtcactgaaaaattggaagatgtagcgttgcaaattttactagcatgccccgtatcaaaggaagatggcccaagtgtctttggcagtttctttttacaacactgtgtgactatgaatacgcctgtggagaagctaacagactactgtaagaagttaaaggaagtccagatgcactcctttcctctgcagttcaccctccattgtgctttactcgccaataaaactgatttggcaaaagccttaatgaaggctgtgaaggaggaaggttttcctatcagacctcactatttctggccattgctagttggacgtcggaaggaaaaaaatgttcaaggtataattgaaatcctcaaaggaatgcaagaattgggagtacatcctgatcaggaaacatatacagattatgtgattccatgctttgatagtgtaaactcagcacgagccattttgcaggaaaatggatgtctgtctgatagtgatatgttttctcaagctggattgagaagtgaagcagcaaatgggaacttagactttgtattatcatttttgaaatcaaatacattgcccatctcgctgcagtctataagaagtagcctactgctaggcttcaggaggtctatgaatataaatctttggagcgagataacagaattgttgtacaaggatggacgttattgccaggagcctcgaggaccgacggaagctgttggctattttctttataacttgattgacagcatgagtgactcagaggtacaggccaaggaggagcatttgagacaatacttccatcagctggagaagatgaatgtaaaaattcctgaaaatatctacagaggcattcgtaatctcctggaaagctaccatgttcctgaattgattaaggatgctcacttgttggttgagagtaagaatttagactttcaaaaaactgtgcaacttacatcatctgaattggagtccacacttgaaacactaaaagctgaaaatcaacctataagagatgtcctaaagcaactcatattagtgctttgttcagaagagaatatgcaaaaagcccttgaattgaaagcaaaatatgaatccgacatggttactggtggctatgcagctttaataaatttatgctgtcgacatgataaagtagaagatgccttgaacttgaaagaagaatttgaccgcttagattcatctgctgtccttgacaccggcaagtatgtaggccttgtaagagtattggcaaagcatggcaagctccaagatgctattaacattctgaaggagatgaaagagaaggatgttcttatcaaagatacaacagccttgtcctttttccacatgctaaatggcgcagctttaagaggtgaaattgaaacagtaaaacagttgcatgaagccatcgtgactctagggttagcagaaccatccaccaacataagtttcccattggtcactgtacacttggaaaagggcgacctatctactgctcttgaggtcgccattgactgctatgaaaagtataaagtattaccaaggattcatgatgtcttgtgtaaactggtagagaaaggcgagactgatctaattcagaaagcaatggactttgtgagccaagaacaaggtgaaatggtgatgctctatgatctcttctttgccttcctacaaacaggaaattacaaagaggccaagaagatcattgagactccagggattagagctcgatctgcaaggcttcagtggttttgtgacagatgtgttgcaaataatcaggttgaaactctggaaaaattagtggagctgacacagaagctatttgaatgtgatagagaccagatgtactacaatctgctaaaactgtataaaataaacggtgactggcaaagagctgatgcagtctggaataaaatccaagaagaaaatgttattcctcgtgaaaagacattaagattattagcagaaatccttagagagggtaaccaggaagttccgtttgacgtacctgagttgtggtatgaagatgaaaaacattccctgaattcttcgtcagcctcaaccacagaacctgatttccagaaagatatattgattgcctgccgattgaaccaaaaaaaaggggcatatgatattttcctgaatgcaaaagagcaaaacattgtgtttaatgctgaaacctacagcaatctcattaaattactgatgtcagaagattattttacacaagcaatggaagtgaaagcattcgcggagacccacatcaagggcttcacactgaacgatgctgccaacagccgcctcatcataacgcaagttaggcgggattatttgaaagaggctgtgacaacactgaaaacagtattggatcagcagcagaccccttctaggttagcagtgacccgtgtcatccaggcattggccatgaagggtgatgttgaaaacatagaagtagttcagaagatgttaaatggactcgaagactccattggactttcaaaaatggttttcatcaataacattgctttggctcaaataaagaataataacatagatgccgcaatagaaaacattgaaaatatgcttacttcagagaataaagtcattgaaccccaatacttcggcttggcatacttattcagaaaagtaatagaggagcagttggaaccagcagttgaaaagataagcatcatggcggagagattggccaatcagtttgcaatttataaacctgtcactgattttttccttcaacttgtggatgcaggcaaggtggatgatgccagagctctcctacagagatgtggtgcaattgctgaacaaaccccgattttgttgttgttcctccttaggaattctaggaaacaaggaaaggcatcaactgtgaaatctgtgttagaattgattcctgaattaaatgaaaaggaagaagcatacaattccctcatgaaaagctatgtctcagagaaagatgtcacatctgctaaagcactgtatgaacatttgactgcaaagaatacaaaattggatgatctgtttctaaagcgttacgcatctttgctgaagtatgctggagagcctgtccctttcattgaaccccctgaaagctttgaattttatgcacagcagctaagaaaattgagggaaaactcttcttgaaataaccaggcgatactttgttttgtatatatttgtgattctgtgtctacatgttattttgaagtatatctgagggaaaaataaatgaaaattttctttatgtacttatgtatgtgtgatgcatgttcaaagtcttattgaccataactctgtgcacttggttattggacatttttggagtttttttctctgggaaaaatcgatagtgttttcttcaatgctgctgctgtgtgaagccatactttttcaggattcttcccctaattggctctttggtttccctgctctgtttcatttatttcattaaaatgttattcctttatttaagattcacttattagtctgctgtttctctgaaaaattttagagctaggtatagtgaccgtgaactttctaacgcataatattctgtgatacagccattccgtacatgtgtgaagtcctgcataactttcgaactttgttaaatgttggcactaggagtcatcagatctaggcttcatcattttccagtgagaagcagagacccaaagggcctgttacttgtgcttggtcaggggactgtctgtcatgcctggaggctcttcggcacacttccccatctttcccttctgccactgtggcttcaagcacctctgttcatagagcgtctctgaaattgagtctcggtcatgacttatcccgaagtagagcaatgtgtttcctctcattgtagtttcaggactttgtcagtacaagctctgccctaggcttgttactttatactcatatcctgaaaagatgtgatttcatctatgaaggggtaaaatattggtttgtatttaattgtttgaaataaaagtgatccctatattgaatctcatgcctgttaatatctacactgtaagtagtgacttcaaaaaaattctaagataggtagtcaggagagtttgccattataaaaggtgtcttaataatatggaatattgacctaactggagatgaggtaattaattaccgaaatgttgaaaatgttttgagaactctccccattttggggtattccttgttcatttgaatttggtgactccctactgttccagtttcagtgccaacttgggtcacactgttcacatcaggggagaccttgccttggggacgtaggcgggcctcttgcaacttgtgctgttgaccttctgtcttgtggaactctctctcctgcatctgctacctgcccgcagatggtgtgagggagggttgatggcgggaagccaggaagtagatgtcatcatggtattggccaggcttttacttcaactctttttgtggcgttagatttaaggaagcagggggcatggccaacgttgagtcttggcccagtggacatagtgcggctttcccttgagcactgcccagatgcaggacctgcacatgttacaggtttgccaaaagcatctttttttttttttttttttttgagatagtcttgctctgttgcttaagccagagtgcagtggcgcaatctcagctcactgcaacctccgcctcctgggttcaagtgattcttgtgcctcagcctcccacgtagctgagattacaggcttgcaccaccatgttcagctaatttttgtatggtaaagacggagtttcaccatgttggccaggttggtctcgaactcctggccccaagtgatcctccccctgcgctcgcttcagcctcccaaagtgctgggattacaggtgtgagccaccacgcctggccaagagcctcactcctgtctttagtgattgcactgaagcaggcctcatttttttgcagtcatgctaaccacaagttagtcaacattcactaattgacattcattagaataggtctccaaggtgaggcataacgttggggtgtaatctggatttcgcagtcatctttttggggaaactgaaagtaccatctcatttgcatgaagtgactccacactggccctgtatatggactctggtaaaatgtgagtgtggtacagaggaaataggtaagacccccttatctagccctctcggcagcagcgggggggtgttacaaaggactagctgttcaaatatcttttgtattgtattgattcccctattgaatataaatatttaaagtataataactatactgtaggtgggcttatgagtgttctaaatatctaatagctaaattgaaataagtagaaatataaacaatttagcagctttctgtaatacatttacactcaaattataagcagctaattctaaaaaagatgtcactgtaaactattgagaactatagtattttatatataattatatgttcatgtatttgaacccaaaataattttaactgaaatgctttgaataaagtatactgtaaatatc

SEQ ID NO: 15923 - DNA, 5206 bp, Homo sapiens
  source 1..5206: mol_type = unassigned DNA
ccgcggctgggagacagcgagccagagtctgggtgtttgtgcgagagccacggcgggggctggggcgagtggccggcatggctgaaggctgcgctctgcaaccttgaagagccgctgcattgagaggccagggacagggagaccggtgcgatggcagagcgcggcccccgccgctgcgccgggccggcccggctggcgtgagccgccggaggagcggggctgcctctgcgcgtccatggagcagcgggaagggcgaaactccggagcgccgcgtccctgcgccgctgcggcggactgctgaaggggccgagcccgcgcggaccgccgaggaagagacccccgctccagcccgcaggccggctgcccgggggcggcgggggacatcggagggcagcggagcgagcagcgccgcgggagaggccggcgcgggaggcggccgcagcaatgccgggcccgctagggctgctctgcttcctcgccctggggctgctcggctcggccgggcccagcggcgcggcgccgcctctctgcgcggcgccctgcagctgcgacggcgaccgtcgggtggactgctccgggaaggggctgacggccgtgcccgaggggctcagcgccttcacccaagcgctggatatcagtatgaacaacattactcagttgccagaagatgcatttaagaactttccttttctagaagagctacaattggcgggcaacgacctttcttttatccacccaaaggccttgtctgggttgaaagaactcaaagttctaacgctccagaataatcagttgaaaacagtacccagtgaagccattcgagggctgagtgctttgcagtctttgcgtttagatgccaaccatattacctcagtccccgaggacagttttgaaggacttgttcagttacggcatctgtggctggatgacaacagcttgacggaggtgcctgtgcaccccctcagcaatctgcccaccctacaggcgctgaccctggctctcaacaagatctcaagcatccctgactttgcatttaccaacctttcaagcctggtagttctgcatcttcataacaataaaattagaagcctgagtcaacactgttttgatggactagataacctggagaccttagacttgaattataataacttgggggaatttcctcaggctattaaagcccttcctagccttaaagagctaggatttcatagtaattctatttctgttatccctgatggagcatttgatggtaatccactcttaagaactatacatttgtatgataatcctctgtcttttgtggggaactcagcatttcacaatttatctgatcttcattccctagtcattcgtggtgcaagcatggtgcagcagttccccaatcttacaggaactgtccacctggaaagtctgactttgacaggtacaaagataagcagcatacctaataatttgtgtcaagaacaaaagatgcttaggactttggacttgtcttacaataatataagagaccttccaagttttaatggttgccatgctctggaagaaatttctttacagcgtaatcaaatctaccaaataaaggaaggcacctttcaaggcctgatatctctaaggattctagatctgagtagaaacctgatacatgaaattcacagtagagcttttgccacacttgggccaataactaacctagatgtaagtttcaatgaattaacttcctttcctacggaaggcctgaatgggctaaatcaactgaaacttgtgggcaacttcaagctgaaagaagccttagcagcaaaagactttgttaacctcaggtctttatcagtaccatatgcttatcagtgctgtgcattttggggttgtgactcttatgcaaatttaaacacagaagataacagcctccaggaccacagtgtggcacaggagaaaggtactgctgatgcagcaaatgtcacaagcactcttgaaaatgaagaacatagtcaaataattatccattgtacaccttcaacaggtgcttttaagccctgtgaatatttactgggaagctggatgattcgtcttactgtgtggttcattttcttggttgcattatttttcaacctgcttgttattttaacaacatttgcatcttgtacatcactgccttcgtccaaattgtttataggcttgatttctgtgtctaacttattcatgggaatctatactggcatcctaacttttcttgatgctgtgtcctggggcagattcgctgaatttggcatttggtgggaaactggcagtggctgcaaagtagctgggtttcttgcagttttctcctcagaaagtgccatatttttattaatgctagcaactgtcgaaagaagcttatctgcaaaagatataatgaaaaatgggaagagcaatcatctcaaacagttccgggttgctgcccttttggctttcctaggtgctacagtagcaggctgttttccccttttccatagaggggaatattctgcatcacccctttgtttgccatttcctacaggtgaaacgccatcattaggattcactgtaacgttagtgctattaaactcactagcatttttattaatggccgttatctacactaaactatactgcaacttggaaaaagaggacctctcagaaaactcacaatctagcatgattaagcatgtcgcttggctaatcttcaccaattgcatctttttctgccctgtggcgtttttttcatttgcaccattgatcactgcaatctctatcagccccgaaataatgaagtctgttactctgatattttttccattgcctgcttgcctgaatccagtcctgtatgttttcttcaacccaaagtttaaagaagactggaagttactgaagcgacgtgttaccaagaaaagtggatcagtttcagtttccatcagtagccaaggtggttgtctggaacaggatttctactacgactgtggcatgtactcacatttgcagggcaacctgactgtttgcgactgctgcgaatcgtttcttttaacaaagccagtatcatgcaaacacttgataaaatcacacagctgtcctgcattggcagtggcttcttgccaaagacctgagggctactggtccgactgtggcacacagtcggcccactctgattatgcagatgaagaagattcctttgtctcagacagttctgaccaggtgcaggcctgtggacgagcctgcttctaccagagtagaggattccctttggtgcgctatgcttacaatctaccaagagttaaagactgaactactgtgtgtgtaaccgtttcccccgtcaaccaaaatcagtgtttatagagtgaaccctattctcatctttcatctgggaagcacttctgtaatcactgcctggtgtcacttagaagaaggagaggtggcagtttatttctcaaaccagtcattttcaaagaacaggtgcctaaattataaattggtgaaaaatgcaatgtccaagcaatgtatgatctgtttgaaacaaatatatgacttgaaaaggatcttaggtgtagtagagcaatataatgttagttttttctgatccataagaagcaaatttatacctatttgtgtattaagcacaagataaagaacagctgttaatattttttaaaaatctattttaaaatgtgattttctataactgaagaaaatatcttgctaattttacctaatgtttcatccttaatctcaggacaacttactgcagggccaaaaaagggactgtcccagctagaactgtgagagtatacataggcattactttattatgttttcacttgccatccttgacataagagaactataaattttgtttaagcaatttataaatctaaaacctgaagatgtttttaaaacaatattaacagctgttaggttaaaaaaatagctggacatttgttttcagtcattatacattgctttggtccaatcagtaattttttcttaagtgttttgtgattacactactagaaaaaaagtaaaaggctaattgctgtgtgggtttagtcgatttggctaaactactaactaatgtgggggtttaatagtatctgagggatttggtggcttcatgtaatgttctcattaatgaatacttcctaatatcgttggctctactaatattttccaatttgctgggatgtcacctagcaatagcttggattatatagaaagtaaactgtggtcaatacttgcatttaattagacgaaacggggagtaattatgacacgaagtacttatgtttatttcttagtgagctggattatcttgaacctgtgctattaaatggaaatttccatacatcttccccatactattttttataaaagagcctattcaatagctcagaggttgaactctggttaaacaagataatatgttattaataaaaatagaagaagaaagaataaagcttagtcctgtgtctttaaaaattaaaaattttacttgattcccatctatgggctttagacctattactgggtggagtcttaaagttataattgttcaatatgttttttgaacagtgtgctaaatcaatagcaaacccactgccatattagttattctgaatatactaaaaaaatccagctagattgcagtttaataattaaactgtacatactgtgcatataatgaatttttatcttatgtaaattatttttagaacacaagttgggaaatgtggcttctgttcatttcgtttaattaaagctacctcctaaactatagtggctgccagtagcagactgttaaattgtggtttatatactttttgcattgtaaatagtctttgttgtacattgtcagtgtaataaaaacagaatctttgtatatcaaaatcatgtagtttgtataaaatgtgggaaggatttatttacagtgtgttgtaattttgtaaggccaactatttacaagttttaaaaattgctatcatgtatatttacacatctgataaatattaaatcataacttggtaagaaactcctaattaaaaggttttttccaaaattcaggttattgaaaacttttcattttattcatttaaaaactagaataacagatatataaaagtgttaatctttgtgctatatggtatgaaatacaatattgtactcagtgttttgaattattaaagtttctagaaagcaa

SEQ ID NO: 15924 - DNA, 4611 bp, Homo sapiens
  source 1..4611: mol_type = unassigned DNA
aaaaaacgagcgtgcaagcagagatgctgctccacaccgctcaggccgcgagcagcagcaaggcgcaccgccactgtcgccgctgcagccagggctgctccgaaggccggcgtggcggcaaccggcacctctgtccccgccgcgcttctcctcgccgcccacgccgtggggtcaggaacgcggcgtctggcgctgcagacgcccgctgagttgcagaagcccacggagcggcgcccggcgcgccacggcccgtagcagtccggtgctgctctccgcccgcgtccggctcgtggccccctacttcgggcaccatggacacctcccggctcggtgtgctcctgtccttgcctgtgctgctgcagctggcgaccgggggcagctctcccaggtctggtgtgttgctgaggggctgccccacacactgtcattgcgagcccgacggcaggatgttgctcagggtggactgctccgacctggggctctcggagctgccttccaacctcagcgtcttcacctcctacctagacctcagtatgaacaacatcagtcagctgctcccgaatcccctgcccagtctccgcttcctggaggagttacgtcttgcgggaaacgctctgacatacattcccaagggagcattcactggcctttacagtcttaaagttcttatgctgcagaataatcagctaagacacgtacccacagaagctctgcagaatttgcgaagccttcaatccctgcgtctggatgctaaccacatcagctatgtgcccccaagctgtttcagtggcctgcattccctgaggcacctgtggctggatgacaatgcgttaacagaaatccccgtccaggcttttagaagtttatcggcattgcaagccatgaccttggccctgaacaaaatacaccacataccagactatgcctttggaaacctctccagcttggtagttctacatctccataacaatagaatccactccctgggaaagaaatgctttgatgggctccacagcctagagactttagatttaaattacaataaccttgatgaattccccactgcaattaggacactctccaaccttaaagaactaggatttcatagcaacaatatcaggtcgatacctgagaaagcatttgtaggcaacccttctcttattacaatacatttctatgacaatcccatccagtttgttgggagatctgcttttcaacatttacctgaactaagaacactgactctgaatggtgcctcacaaataactgaatttcctgatttaactggaactgcaaacctggagagtctgactttaactggagcacagatctcatctcttcctcaaaccgtctgcaatcagttacctaatctccaagtgctagatctgtcttacaacctattagaagatttacccagtttttcagtctgccaaaagcttcagaaaattgacctaagacataatgaaatctacgaaattaaagttgacactttccagcagttgcttagcctccgatcgctgaatttggcttggaacaaaattgctattattcaccccaatgcattttccactttgccatccctaataaagctggacctatcgtccaacctcctgtcgtcttttcctataactgggttacatggtttaactcacttaaaattaacaggaaatcatgccttacagagcttgatatcatctgaaaactttccagaactcaaggttatagaaatgccttatgcttaccagtgctgtgcatttggagtgtgtgagaatgcctataagatttctaatcaatggaataaaggtgacaacagcagtatggacgaccttcataagaaagatgctggaatgtttcaggctcaagatgaacgtgaccttgaagatttcctgcttgactttgaggaagacctgaaagcccttcattcagtgcagtgttcaccttccccaggccccttcaaaccctgtgaacacctgcttgatggctggctgatcagaattggagtgtggaccatagcagttctggcacttacttgtaatgctttggtgacttcaacagttttcagatcccctctgtacatttcccccattaaactgttaattggggtcatcgcagcagtgaacatgctcacgggagtctccagtgccgtgctggctggtgtggatgcgttcacttttggcagctttgcacgacatggtgcctggtgggagaatggggttggttgccatgtcattggttttttgtccatttttgcttcagaatcatctgttttcctgcttactctggcagccctggagcgtgggttctctgtgaaatattctgcaaaatttgaaacgaaagctccattttctagcctgaaagtaatcattttgctctgtgccctgctggccttgaccatggccgcagttcccctgctgggtggcagcaagtatggcgcctcccctctctgcctgcctttgccttttggggagcccagcaccatgggctacatggtcgctctcatcttgctcaattccctttgcttcctcatgatgaccattgcctacaccaagctctactgcaatttggacaagggagacctggagaatatttgggactgctctatggtaaaacacattgccctgttgctcttcaccaactgcatcctaaactgccctgtggctttcttgtccttctcctctttaataaaccttacatttatcagtcctgaagtaattaagtttatccttctggtggtagtcccacttcctgcatgtctcaatccccttctctacatcttgttcaatcctcactttaaggaggatctggtgagcctgagaaagcaaacctacgtctggacaagatcaaaacacccaagcttgatgtcaattaactctgatgatgtcgaaaaacagtcctgtgactcaactcaagccttggtaacctttaccagctccagcatcacttatgacctgcctcccagttccgtgccatcaccagcttatccagtgactgagagctgccatctttcctctgtggcatttgtcccatgtctctaattaatatgtgaaggaaaatgttttcaaaggttgagaacctgaaaatgtgagattgagtatatcagagcagtaattaataagaagagctgaggtgaaactcggtttaaaaaccaaaaaagaatctctcagttagtaagaaaaggctgaaaacctcttgatacttgagagtgaatataagtctaaatgctgctttgtataatttgttcagctaagggatagatcgatcacactatttaagtgagcccagatcaaaaaagcagattgaaattttctttagaaaagattctccatgatttgaattgcattctctttaaactcaccaatgtaatcattttgggaggagggagaacccacttgctttccaaatgggtttatttaaacccacaaactcaagaggttgttgggggaattaggaaaataagggttttcaatgacctacattgctaggtagaggctgtgatccatgggatttcattctaatgaccatgtgaagatgtttgagtcctcctttgcctttcctcagaaagaatccttctaaggcacaaatcccttagatggataatgtaaggtattgttaactcactcatattgagatcatttttagagataccaggttttatgtatcagcactagatggttccaccctcatgggataaaactgcttacaagtattttgaaagaaaaactgaccaaaattcttaaattgttactaaggcaatcatgcacaggtgacgtatgtcttatctgatttgtttttaactccttggtgcccaaagctcagaagggaattccactgccagcaatgaacatacctggaaaagaaagtaagcaatctgggattttttttctgggttagtaaagaatttttgcaataagttttatcagttgattcaaactgatgtgcatcttaatgatcaaatgtgcacattacataaattaagtccactgatacaacttcttacacatgtatctctagtagctctggcaaacccaatatctgacaccactttggactcaagagactcagtaacgtattatcctgtttatttagcttggttttagctgtgttctctctggataacccacttgatgttaggaacattacttctctgcttattccatattaatactgtgttaggtattttaagaagcaagttattaaataagaaaagtcaaagtattaattcttaccttctattatcctatattagcttcaatacatccaaaccaaatggctgttaggtagatttatttttatataagcatgtttattttgatcagatgttttaacttggatttgaaaaaatacatttatgagatgttttataagatgtgtaaatatagaactgtatttattactatagtaaaggttcagtaacattaaggaccatgataatgataataaaccttgtacagtggcatattctttgatttatattgtgtttctctgcccattttctttaaattcattaactgtatatatgtaaatatatagtacttgtaaatagattccaaatttgcttttctattgggtaaaaaataaatttgtaataaaatgtgtgactatgaaacaaaa

SEQ ID NO: 15925 - DNA, 2822 bp, Homo sapiens
  source 1..2822: mol_type = unassigned DNA
aaaaaacgagcgtgcaagcagagatgctgctccacaccgctcaggccgcgagcagcagcaaggcgcaccgccactgtcgccgctgcagccagggctgctccgaaggccggcgtggcggcaaccggcacctctgtccccgccgcgcttctcctcgccgcccacgccgtggggtcaggaacgcggcgtctggcgctgcagacgcccgctgagttgcagaagcccacggagcggcgcccggcgcgccacggcccgtagcagtccggtgctgctctccgcccgcgtccggctcgtggccccctacttcgggcaccatggacacctcccggctcggtgtgctcctgtccttgcctgtgctgctgcagctggcgaccgggggcagctctcccaggtctggtgtgttgctgaggggctgccccacacactgtcattgcgagcccgacggcaggatgttgctcagggtggactgctccgacctggggctctcggagctgccttccaacctcagcgtcttcacctcctacctagacctcagtatgaacaacatcagtcagctgctcccgaatcccctgcccagtctccgcttcctggaggagttacgtcttgcgggaaacgctctgacatacattcccaagggagcattcactggcctttacagtcttaaagttcttatgctgcagaataatcagctaagacacgtacccacagaagctctgcagaatttgcgaagccttcaatccctgcgtctggatgctaaccacatcagctatgtgcccccaagctgtttcagtggcctgcattccctgaggcacctgtggctggatgacaatgcgttaacagaaatccccgtccaggcttttagaagtttatcggcattgcaagccatgaccttggccctgaacaaaatacaccacataccagactatgcctttggaaacctctccagcttggtagttctacatctccataacaatagaatccactccctgggaaagaaatgctttgatgggctccacagcctagagactttagatttaaattacaataaccttgatgaattccccactgcaattaggacactctccaaccttaaagaactaggatttcatagcaacaatatcaggtcgatacctgagaaagcatttgtaggcaacccttctcttattacaatacatttctatgacaatcccatccagtttgttgggagatctgcttttcaacatttacctgaactaagaacactgactctgaatggtgcctcacaaataactgaatttcctgatttaactggaactgcaaacctggagagtctgactttaactggagcacagatctcatctcttcctcaaaccgtctgcaatcagttacctaatctccaagtgctagatctgtcttacaacctattagaagatttacccagtttttcagtctgccaaaagcttcagaaaattgacctaagacataatgaaatctacgaaattaaagttgacactttccagcagttgcttagcctccgatcgctgaatttggcttggaacaaaattgctattattcaccccaatgcattttccactttgccatccctaataaagctggacctatcgtccaacctcctgtcgtcttttcctataactgggttacatggtttaactcacttaaaattaacaggaaatcatgccttacagagcttgatatcatctgaaaactttccagaactcaaggttatagaaatgccttatgcttaccagtgctgtgcatttggagtgtgtgagaatgcctataagatttctaatcaatggaataaaggtgacaacagcagtatggacgaccttcataagaaagatgctggaatgtttcaggctcaagatgaacgtgaccttgaagatttcctgcttgactttgaggaagacctgaaagcccttcattcagtgcagtgttcaccttccccaggccccttcaaaccctgtgaacacctgcttgatggctggctgatcagaattggagtgtggaccatagcagttctggcacttacttgtaatgctttggtgacttcaacagttttcagatcccctctgtacatttcccccattaaactgttaattggggtcatcgcagcagtgaacatgctcacgggagtctccagtgccgtgctggctggtgtggatgcgttcacttttggcagctttgcacgacatggtgcctggtgggagaatggggttggttgccatgtcattggttttttgtccatttttgcttcagaatcatctgttttcctgcttactctggcagccctggagcgtgggttctctgtgaaatattctgcaaaatttgaaacgaaagctccattttctagcctgaaagtaatcattttgctctgtgccctgctggccttgaccatggccgcagttcccctgctgggtggcagcaagtatggcgcctcccctctctgcctgcctttgcttcctcatgatgaccattgcctacaccaagctctactgcaatttggacaagggagacctggagaatatttgggactgctctatggtaaaacacattgccctgttgctcttcaccaactgcatcctaaactgccctgtggctttcttgtccttctcctctttaataaaccttacatttatcagtcctgaagtaattaagtttatccttctggtggtagtcccacttcctgcatgtctcaatccccttctctacatcttgttcaatcctcactttaaggaggatctggtgagcctgagaaagcaaacctacgtctggacaagatcaaaacacccaagcttgatgtcaattaactctgatgatgtcga

SEQ ID NO: 15926 - DNA, 2664 bp, Homo sapiens
  source 1..2664: mol_type = unassigned DNA
tgctgctctccgcccgcgtccggctcgtggccccctacttcgggcaccatggacacctcccggctcggtgtgctcctgtccttgcctgtgctgctgcagctggcgaccgggggcagctctcccaggtctggtgtgttgctgaggggctgccccacacactgtcattgcgagcccgacggcaggatgttgctcagggtggactgctccgacctggggctctcggagctgccttccaacctcagcgtcttcacctcctacctagacctcagtatgaacaacatcagtcagctgctcccgaatcccctgcccagtctccgcttcctggaggagttacgtcttgcgggaaacgctctgacatacattcccaagggagcattcactggcctttacagtcttaaagttcttatgctgcagaataatcagctaagacacgtacccacagaagctctgcagaatttgcgaagccttcaatccctacatctccataacaatagaatccactccctgggaaagaaatgctttgatgggctccacagcctagagactttagatttaaattacaataaccttgatgaattccccactgcaattaggacactctccaaccttaaagaactaggatttcatagcaacaatatcaggtcgatacctgagaaagcatttgtaggcaacccttctcttattacaatacatttctatgacaatcccatccagtttgttgggagatctgcttttcaacatttacctgaactaagaacactgactctgaatggtgcctcacaaataactgaatttcctgatttaactggaactgcaaacctggagagtctgactttaactggagcacagatctcatctcttcctcaaaccgtctgcaatcagttacctaatctccaagtgctagatctgtcttacaacctattagaagatttacccagtttttcagtctgccaaaagcttcagaaaattgacctaagacataatgaaatctacgaaattaaagttgacactttccagcagttgcttagcctccgatcgctgaatttggcttggaacaaaattgctattattcaccccaatgcattttccactttgccatccctaataaagctggacctatcgtccaacctcctgtcgtcttttcctataactgggttacatggtttaactcacttaaaattaacaggaaatcatgccttacagagcttgatatcatctgaaaactttccagaactcaaggttatagaaatgccttatgcttaccagtgctgtgcatttggagtgtgtgagaatgcctataagatttctaatcaatggaataaaggtgacaacagcagtatggacgaccttcataagaaagatgctggaatgtttcaggctcaagatgaacgtgaccttgaagatttcctgcttgactttgaggaagacctgaaagcccttcattcagtgcagtgttcaccttccccaggccccttcaaaccctgtgaacacctgcttgatggctggctgatcagaattggagtgtggaccatagcagttctggcacttacttgtaatgctttggtgacttcaacagttttcagatcccctctgtacatttcccccattaaactgttaattggggtcatcgcagcagtgaacatgctcacgggagtctccagtgccgtgctggctggtgtggatgcgttcacttttggcagctttgcacgacatggtgcctggtgggagaatggggttggttgccatgtcattggttttttgtccatttttgcttcagaatcatctgttttcctgcttactctggcagccctggagcgtgggttctctgtgaaatattctgcaaaatttgaaacgaaagctccattttctagcctgaaagtaatcattttgctctgtgccctgctggccttgaccatggccgcagttcccctgctgggtggcagcaagtatggcgcctcccctctctgcctgcctttgccttttggggagcccagcaccatgggctacatggtcgctctcatcttgctcaattccctttgcttcctcatgatgaccattgcctacaccaagctctactgcaatttggacaagggagacctggagaatatttgggactgctctatggtaaaacacattgccctgttgctcttcaccaactgcatcctaaactgccctgtggctttcttgtccttctcctctttaataaaccttacatttatcagtcctgaagtaattaagtttatccttctggtggtagtcccacttcctgcatgtctcaatccccttctctacatcttgttcaatcctcactttaaggaggatctggtgagcctgagaaagcaaacctacgtctggacaagatcaaaacacccaagcttgatgtcaattaactctgatgatgtcgaaaaacagtcctgtgactcaactcaagccttggtaacctttaccagctccagcatcacttatgacctgcctcccagttccgtgccatcaccagcttatccagtgactgagagctgccatctttcctctgtggcatttgtcccatgtctctaattaatatgtgaaggaaaatgttttcaaaggttgagaacctgaaaatgtgagattgagtatatcagagcagtaattaataagaagagctgaggtgaaactcggtttaaa

SEQ ID NO: 15927 - DNA, 2800 bp, Homo sapiens
  source 1..2800: mol_type = unassigned DNA
ctgctctccgcccgcgtccggctcgtggccccctacttcgggcaccatggacacctcccggctcggtgtgctcctgtccttgcctgtgctgctgcagctggcgaccgggggcagctctcccaggtctggtgtgttgctgaggggctgccccacacactgtcattgcgagcccgacggcaggatgttgctcagggtggactgctccgacctggggctctcggagctgccttccaacctcagcgtcttcacctcctacctagacctcagtatgaacaacatcagtcagctgctcccgaatcccctgcccagtctccgcttcctggaggagttacgtcttgcgggaaacgctctgacatacattcccaagggagcattcactggcctttacagtcttaaagttcttatgctgcagaataatcagctaagacacgtacccacagaagctctgcagaatttgcgaagccttcaatccctgcgtctggatgctaaccacatcagctatgtgcccccaagctgtttcagtggcctgcattccctgaggcacctgtggctggatgacaatgcgttaacagaaatccccgtccaggcttttagaagtttatcggcattgcaagccatgaccttggccctgaacaaaatacaccacataccagactatgcctttggaaacctctccagcttggtagttctacatctccataacaatagaatccactccctgggaaagaaatgctttgatgggctccacagcctagagactttagatttaaattacaataaccttgatgaattccccactgcaattaggacactctccaaccttaaagaactacatttctatgacaatcccatccagtttgttgggagatctgcttttcaacatttacctgaactaagaacactgactctgaatggtgcctcacaaataactgaatttcctgatttaactggaactgcaaacctggagagtctgactttaactggagcacagatctcatctcttcctcaaaccgtctgcaatcagttacctaatctccaagtgctagatctgtcttacaacctattagaagatttacccagtttttcagtctgccaaaagcttcagaaaattgacctaagacataatgaaatctacgaaattaaagttgacactttccagcagttgcttagcctccgatcgctgaatttggcttggaacaaaattgctattattcaccccaatgcattttccactttgccatccctaataaagctggacctatcgtccaacctcctgtcgtcttttcctataactgggttacatggtttaactcacttaaaattaacaggaaatcatgccttacagagcttgatatcatctgaaaactttccagaactcaaggttatagaaatgccttatgcttaccagtgctgtgcatttggagtgtgtgagaatgcctataagatttctaatcaatggaataaaggtgacaacagcagtatggacgaccttcataagaaagatgctggaatgtttcaggctcaagatgaacgtgaccttgaagatttcctgcttgactttgaggaagacctgaaagcccttcattcagtgcagtgttcaccttccccaggccccttcaaaccctgtgaacacctgcttgatggctggctgatcagaattggagtgtggaccatagcagttctggcacttacttgtaatgctttggtgacttcaacagttttcagatcccctctgtacatttcccccattaaactgttaattggggtcatcgcagcagtgaacatgctcacgggagtctccagtgccgtgctggctggtgtggatgcgttcacttttggcagctttgcacgacatggtgcctggtgggagaatggggttggttgccatgtcattggttttttgtccatttttgcttcagaatcatctgttttcctgcttactctggcagccctggagcgtgggttctctgtgaaatattctgcaaaatttgaaacgaaagctccattttctagcctgaaagtaatcattttgctctgtgccctgctggccttgaccatggccgcagttcccctgctgggtggcagcaagtatggcgcctcccctctctgcctgcctttgccttttggggagcccagcaccatgggctacatggtcgctctcatcttgctcaattccctttgcttcctcatgatgaccattgcctacaccaagctctactgcaatttggacaagggagacctggagaatatttgggactgctctatggtaaaacacattgccctgttgctcttcaccaactgcatcctaaactgccctgtggctttcttgtccttctcctctttaataaaccttacatttatcagtcctgaagtaattaagtttatccttctggtggtagtcccacttcctgcatgtctcaatccccttctctacatcttgttcaatcctcactttaaggaggatctggtgagcctgagaaagcaaacctacgtctggacaagatcaaaacacccaagcttgatgtcaattaactctgatgatgtcgaaaaacagtcctgtgactcaactcaagccttggtaacctttaccagctccagcatcacttatgacctgcctcccagttccgtgccatcaccagcttatccagtgactgagagctgccatctttcctctgtggcatttgtcccatgtctctaattaatatgtgaaggaaaatgttttcaaaggttgagaacctgaaaatgtgagattgagtatatcagagcagtaattaataagaagagctgaggtgaaactcgg

SEQ ID NO: 15928 - DNA, 3406 bp, Homo sapiens
  source 1..3406: mol_type = unassigned DNA
gaacgcttgtgtctaactgatgctcctaatgcggaagcccctgaaaggcggttgtggtgcaaaggaaaacccacaggccaaggaatgggaagaccaaggttgacacttgtttgtcaagtgtcaataatcatctctgcccgggacctcagcatgaacaacctcacagagcttcagcctggcctcttccaccacctgcgcttcttggaggagctgcgtctctctgggaaccatctctcacacatcccaggacaagcattctctggtctctacagcctgaaaatcctgatgctgcagaacaatcagctgggaggaatccccgcagaggcgctgtgggagctgccgagcctgcagtcgctgcgcctagatgccaacctcatctccctggtcccggagaggagctttgaggggctgtcctccctccgccacctctggctggacgacaatgcactcacggagatccctgtcagggccctcaacaacctccctgccctgcaggccatgaccctggccctcaaccgcatcagccacatccccgactacgcgttccagaatctcaccagccttgtggtgctgcatttgcataacaaccgcatccagcatctggggacccacagcttcgaggggctgcacaatctggagacactagacctgaattataacaagctgcaggagttccctgtggccatccggaccctgggcagactgcaggaactggggttccataacaacaacatcaaggccatcccagaaaaggccttcatggggaaccctctgctacagacgatacacttttatgataacccaatccagtttgtgggaagatcggcattccagtacctgcctaaactccacacactatctctgaatggtgccatggacatccaggagtttccagatctcaaaggcaccaccagcctggagatcctgaccctgacccgcgcaggcatccggctgctcccatcggggatgtgccaacagctgcccaggctccgagtcctggaactgtctcacaatcaaattgaggagctgcccagcctgcacaggtgtcagaaattggaggaaatcggcctccaacacaaccgcatctgggaaattggagctgacaccttcagccagctgagctccctgcaagccctggatcttagctggaacgccatccggtccatccaccccgaggccttctccaccctgcactccctggtcaagctggacctgacagacaaccagctgaccacactgcccctggctggacttgggggcttgatgcatctgaagctcaaagggaaccttgctctctcccaggccttctccaaggacagtttcccaaaactgaggatcctggaggtgccttatgcctaccagtgctgtccctatgggatgtgtgccagcttcttcaaggcctctgggcagtgggaggctgaagaccttcaccttgatgatgaggagtcttcaaaaaggcccctgggcctccttgccagacaagcagagaaccactatgaccaggacctggatgagctccagctggagatggaggactcaaagccacaccccagtgtccagtgtagccctactccaggccccttcaagccctgtgagtacctctttgaaagctggggcatccgcctggccgtgtgggccatcgtgttgctctccgtgctctgcaatggactggtgctgctgaccgtgttcgctggcgggcctgtccccctgcccccggtcaagtttgtggtaggtgcgattgcaggcgccaacaccttgactggcatttcctgtggccttctagcctcagtcgatgccctgacctttggtcagttctctgagtacggagcccgctgggagacggggctaggctgccgggccactggcttcctggcagtacttgggtcggaggcatcggtgctgctgctcactctggccgcagtgcagtgcagcgtctccgtctcctgtgtccgggcctatgggaagtccccctccctgggcagcgttcgagcaggggtcctaggctgcctggcactggcagggctggccgccgcgctgcccctggcctcagtgggagaatacggggcctccccactctgcctgccctacgcgccacctgagggtcagccagcagccctgggcttcaccgtggccctggtgatgatgaactccttctgtttcctggtcgtggccggtgcctacatcaaactgtactgtgacctgccgcggggcgactttgaggccgtgtgggactgcgccatggtgaggcacgtggcctggctcatcttcgcagacgggctcctctactgtcccgtggccttcctcagctttgcctccatgctgggcctcttccctgtcacgcccgaggccgtcaagtctgtcctgctggtggtgctgcccctgcctgcctgcctcaacccactgctgtacctgctcttcaacccccacttccgggatgaccttcggcggcttcggccccgcgcaggggactcagggcccctagcctatgctgcggccggggagctggagaagagctcctgtgattctacccaggccctggtagccttctctgatgtggatctcattctggaagcttctgaagctgggcggccccctgggctggagacctatggcttcccctcagtgaccctcatctcctgtcagcagccaggggcccccaggctggagggcagccattgtgtagagccagaggggaaccactttgggaacccccaaccctccatggatggagaactgctgctgagggcagagggatctacgccagcaggtggaggcttgtcagggggtggcggctttcagccctctggcttggcctttgcttcacacgtgtaaatatccctccccattcttctcttcccctctcttccctttcctctctccccctcggtgaatgatggctgcttctaaaacaaatacaaccaaaactcagcagtgtgatctatagcaggatggcccagtccctggctccactgatcacctctctcctgtgaccatcaccaacgggtgcctcttggcctggctttcccttggccttcctcagcttcaccttgatactgggcctcttccttgtcatgtctgaagctgtggaccagagacctggacttttgtctgcttaagggaaatgagggaagtaaagacagtgaaggggtggagggttgatcagggcacagtggacagggagacctcacagagaaaggcctggaaggtgatttcccgtgtgactcatggataggatacaaaatgtgttccatgtaccattaatcttgacatatgccatgcataaagacttcctattaaaataagctttggaagagattacacatgatgtctttttcttagagattcacagtgcatgttagtgtaataaagagataagtcctacagtagtaaaatctattgaactttg

SEQ ID NO: 15929 - DNA, 3096 bp, Homo sapiens
  source 1..3096: mol_type = unassigned DNA
gaacgcttgtgtctaactgatgctcctaatgcggaagcccctgaaaggcggttgtggtgcaaaggaaaacccacaggccaaggaatgggaagaccaaggttgacacttgtttgtcaagtgtcaataatcatctctgcccgggacctcagcatgaacaacctcacagagcttcagcctggcctcttccaccacctgcgcttcttggaggagctgcgtctctctgggaaccatctctcacacatcccaggacaagcattctctggtctctacagcctgaaaatcctgatgctgcagaacaatcagctgggaggaatccccgcagaggcgctgtgggagctgccgagcctgcagtcgctgcgcctagatgccaacctcatctccctggtcccggagaggagctttgaggggctgtcctccctccgccacctctggctggacgacaatgcactcacggagatccctgtcagggccctcaacaacctccctgccctgcaggccatgaccctggccctcaaccgcatcagccacatccccgactacgcgttccagaatctcaccagccttgtggtgctagacctgaattataacaagctgcaggagttccctgtggccatccggaccctgggcagactgcaggaactatctctgaatggtgccatggacatccaggagtttccagatctcaaaggcaccaccagcctggagatcctgaccctgacccgcgcaggcatccggctgctcccatcggggatgtgccaacagctgcccaggctccgagtcctggaactgtctcacaatcaaattgaggagctgcccagcctgcacaggtgtcagaaattggaggaaatcggcctccaacacaaccgcatctgggaaattggagctgacaccttcagccagctgagctccctgcaagccctggatcttagctggaacgccatccggtccatccaccccgaggccttctccaccctgcactccctggtcaagctggacctgacagacaaccagctgaccacactgcccctggctggacttgggggcttgatgcatctgaagctcaaagggaaccttgctctctcccaggccttctccaaggacagtttcccaaaactgaggatcctggaggtgccttatgcctaccagtgctgtccctatgggatgtgtgccagcttcttcaaggcctctgggcagtgggaggctgaagaccttcaccttgatgatgaggagtcttcaaaaaggcccctgggcctccttgccagacaagcagagaaccactatgaccaggacctggatgagctccagctggagatggaggactcaaagccacaccccagtgtccagtgtagccctactccaggccccttcaagccctgtgagtacctctttgaaagctggggcatccgcctggccgtgtgggccatcgtgttgctctccgtgctctgcaatggactggtgctgctgaccgtgttcgctggcgggcctgtccccctgcccccggtcaagtttgtggtaggtgcgattgcaggcgccaacaccttgactggcatttcctgtggccttctagcctcagtcgatgccctgacctttggtcagttctctgagtacggagcccgctgggagacggggctaggctgccgggccactggcttcctggcagtacttgggtcggaggcatcggtgctgctgctcactctggccgcagtgcagtgcagcgtctccgtctcctgtgtccgggcctatgggaagtccccctccctgggcagcgttcgagcaggggtcctaggctgcctggcactggcagggctggccgccgcgctgcccctggcctcagtgggagaatacggggcctccccactctgcctgccctacgcgccacctgagggtcagccagcagccctgggcttcaccgtggccctggtgatgatgaactccttctgtttcctggtcgtggccggtgcctacatcaaactgtactgtgacctgccgcggggcgactttgaggccgtgtgggactgcgccatggtgaggcacgtggcctggctcatcttcgcagacgggctcctctactgtcccgtggccttcctcagctttgcctccatgctgggcctcttccctgtcacgcccgaggccgtcaagtctgtcctgctggtggtgctgcccctgcctgcctgcctcaacccactgctgtacctgctcttcaacccccacttccgggatgaccttcggcggcttcggccccgcgcaggggactcagggcccctagcctatgctgcggccggggagctggagaagagctcctgtgattctacccaggccctggtagccttctctgatgtggatctcattctggaagcttctgaagctgggcggccccctgggctggagacctatggcttcccctcagtgaccctcatctcctgtcagcagccaggggcccccaggctggagggcagccattgtgtagagccagaggggaaccactttgggaacccccaaccctccatggatggagaactgctgctgagggcagagggatctacgccagcaggtggaggcttgtcagggggtggcggctttcagccctctggcttggcctttgcttcacacgtgtaaatatccctccccattcttctcttcccctctcttccctttcctctctccccctcggtgaatgatggctgcttctaaaacaaatacaaccaaaactcagcagtgtgatctatagcaggatggcccagtccctggctccactgatcacctctctcctgtgaccatcaccaacgggtgcctcttggcctggctttcccttggccttcctcagcttcaccttgatactgggcctcttccttgtcatgtctgaagctgtggaccagagacctggacttttgtctgcttaagggaaatgagggaagtaaagacagtgaaggggtggagggttgatcagggcacagtggacagggagacctcacagagaaaggcctggaaggtgatttcccgtgtgactcatggataggatacaaaatgtgttccatgtaccattaatcttgacatatgccatgcataaagacttcctattaaaataagctttggaag

SEQ ID NO: 15930 - DNA, 3567 bp, Homo sapiens
  source 1..3567: mol_type = unassigned DNA
gcccgccgggaccgggaggaagcagctgcggccatcgcgccgtgcgtccgcgcccggccgccaggtgccccagtagcccgaccgccgagatgcccagcccgccggggctccgggcgctatggctttgcgccgcgctgtgcgcttcccggagggccggcggcgccccccagcccggcccggggcccaccgcctgcccggccccctgccactgccaggaggacggcatcatgctgtctgccgactgctctgagctcgggctgtccgccgttccgggggacctggaccccctgacggcttacctggacctcagcatgaacaacctcacagagcttcagcctggcctcttccaccacctgcgcttcttggaggagctgcgtctctctgggaaccatctctcacacatcccaggacaagcattctctggtctctacagcctgaaaatcctgatgctgcagaacaatcagctgggaggaatccccgcagaggcgctgtgggagctgccgagcctgcagtcgctgcgcctagatgccaacctcatctccctggtcccggagaggagctttgaggggctgtcctccctccgccacctctggctggacgacaatgcactcacggagatccctgtcagggccctcaacaacctccctgccctgcaggccatgaccctggccctcaaccgcatcagccacatccccgactacgcgttccagaatctcaccagccttgtggtgctgcatttgcataacaaccgcatccagcatctggggacccacagcttcgaggggctgcacaatctggagacactagacctgaattataacaagctgcaggagttccctgtggccatccggaccctgggcagactgcaggaactggggttccataacaacaacatcaaggccatcccagaaaaggccttcatggggaaccctctgctacagacgatacacttttatgataacccaatccagtttgtgggaagatcggcattccagtacctgcctaaactccacacactatctctgaatggtgccatggacatccaggagtttccagatctcaaaggcaccaccagcctggagatcctgaccctgacccgcgcaggcatccggctgctcccatcggggatgtgccaacagctgcccaggctccgagtcctggaactgtctcacaatcaaattgaggagctgcccagcctgcacaggtgtcagaaattggaggaaatcggcctccaacacaaccgcatctgggaaattggagctgacaccttcagccagctgagctccctgcaagccctggatcttagctggaacgccatccggtccatccaccccgaggccttctccaccctgcactccctggtcaagctggacctgacagacaaccagctgaccacactgcccctggctggacttgggggcttgatgcatctgaagctcaaagggaaccttgctctctcccaggccttctccaaggacagtttcccaaaactgaggatcctggaggtgccttatgcctaccagtgctgtccctatgggatgtgtgccagcttcttcaaggcctctgggcagtgggaggctgaagaccttcaccttgatgatgaggagtcttcaaaaaggcccctgggcctccttgccagacaagcagagaaccactatgaccaggacctggatgagctccagctggagatggaggactcaaagccacaccccagtgtccagtgtagccctactccaggccccttcaagccctgtgagtacctctttgaaagctggggcatccgcctggccgtgtgggccatcgtgttgctctccgtgctctgcaatggactggtgctgctgaccgtgttcgctggcgggcctgtccccctgcccccggtcaagtttgtggtaggtgcgattgcaggcgccaacaccttgactggcatttcctgtggccttctagcctcagtcgatgccctgacctttggtcagttctctgagtacggagcccgctgggagacggggctaggctgccgggccactggcttcctggcagtacttgggtcggaggcatcggtgctgctgctcactctggccgcagtgcagtgcagcgtctccgtctcctgtgtccgggcctatgggaagtccccctccctgggcagcgttcgagcaggggtcctaggctgcctggcactggcagggctggccgccgcgctgcccctggcctcagtgggagaatacggggcctccccactctgcctgccctacgcgccacctgagggtcagccagcagccctgggcttcaccgtggccctggtgatgatgaactccttctgtttcctggtcgtggccggtgcctacatcaaactgtactgtgacctgccgcggggcgactttgaggccgtgtgggactgcgccatggtgaggcacgtggcctggctcatcttcgcagacgggctcctctactgtcccgtggccttcctcagctttgcctccatgctgggcctcttccctgtcacgcccgaggccgtcaagtctgtcctgctggtggtgctgcccctgcctgcctgcctcaacccactgctgtacctgctcttcaacccccacttccgggatgaccttcggcggcttcggccccgcgcaggggactcagggcccctagcctatgctgcggccggggagctggagaagagctcctgtgattctacccaggccctggtagccttctctgatgtggatctcattctggaagcttctgaagctgggcggccccctgggctggagacctatggcttcccctcagtgaccctcatctcctgtcagcagccaggggcccccaggctggagggcagccattgtgtagagccagaggggaaccactttgggaacccccaaccctccatggatggagaactgctgctgagggcagagggatctacgccagcaggtggaggcttgtcagggggtggcggctttcagccctctggcttggcctttgcttcacacgtgtaaatatccctccccattcttctcttcccctctcttccctttcctctctccccctcggtgaatgatggctgcttctaaaacaaatacaaccaaaactcagcagtgtgatctatagcaggatggcccagtccctggctccactgatcacctctctcctgtgaccatcaccaacgggtgcctcttggcctggctttcccttggccttcctcagcttcaccttgatactgggcctcttccttgtcatgtctgaagctgtggaccagagacctggacttttgtctgcttaagggaaatgagggaagtaaagacagtgaaggggtggagggttgatcagggcacagtggacagggagacctcacagagaaaggcctggaaggtgatttcccgtgtgactcatggataggatacaaaatgtgttccatgtaccattaatcttgacatatgccatgcataaagacttcctattaaaataagctttggaagagattacacatgatgtctttttcttagagattcacagtgcatgttagtgtaataaagagataagtcctacagtagtaaaatctattgaactttg

SEQ ID NO: 15931 - DNA, 546 bp, Homo sapiens
  source 1..546: mol_type = unassigned DNA
cctgcccctctctgactgcaccgtcccggcgctcccaccgccgccgccgccgcccaatagagcccctggggcggtccccaccgacggtgcagcccgccgggaccgggaggaagcagctgcggccatcgcgccgtgcgtccgcgcccggccgccaggtgccccagtagcccgaccgccgagatgcccagcccgccggggctccgggcgctatggctttgcgccgcgctgtgcgcttcccggagggccggcggcgccccccagcccggcccggggcccaccgcctgcccggccccctgccactgccaggaggacggcatcatgctgtctgccgactgctctgagctcgggctgtccgccgttccgggggacctggaccccctgacggcttacctagcagtgcccgggatggtggctgagggtaaagctgacagaactggaggtggaggaagtagcaggccagagaagactcgaagatccttagaagaagccatagacagaactataggaggcgcccaggagctatgggctccagaagtttcctcttaa

SEQ ID NO: 15932 - DNA, 2487 bp, Homo sapiens
  source 1..2487: mol_type = unassigned DNA
atgcgcttggagggagagggccgctcagcgagggcgggacagaacctctcccgggctgggagtgcacggcgcggtgcgcccagggacctcagcatgaacaacctcacagagcttcagcctggcctcttccaccacctgcgcttcttggaggagctgcgtctctctgggaaccatctctcacacatcccaggacaagcattctctggtctctacagcctgaaaatcctgatgctgcagaacaatcagctgggaggaatccccgcagaggcgctgtgggagctgccgagcctgcagtcgctagacctgaattataacaagctgcaggagttccctgtggccatccggaccctgggcagactgcaggaactggggttccataacaacaacatcaaggccatcccagaaaaggccttcatggggaaccctctgctacagacgatacacttttatgataacccaatccagtttgtgggaagatcggcattccagtacctgcctaaactccacacactatctctgaatggtgccatggacatccaggagtttccagatctcaaaggcaccaccagcctggagatcctgaccctgacccgcgcaggcatccggctgctcccatcggggatgtgccaacagctgcccaggctccgagtcctggaactgtctcacaatcaaattgaggagctgcccagcctgcacaggtgtcagaaattggaggaaatcggcctccaacacaaccgcatctgggaaattggagctgacaccttcagccagctgagctccctgcaagccctggatcttagctggaacgccatccggtccatccaccccgaggccttctccaccctgcactccctggtcaagctggacctgacagacaaccagctgaccacactgcccctggctggacttgggggcttgatgcatctgaagctcaaagggaaccttgctctctcccaggccttctccaaggacagtttcccaaaactgaggatcctggaggtgccttatgcctaccagtgctgtccctatgggatgtgtgccagcttcttcaaggcctctgggcagtgggaggctgaagaccttcaccttgatgatgaggagtcttcaaaaaggcccctgggcctccttgccagacaagcagagaaccactatgaccaggacctggatgagctccagctggagatggaggactcaaagccacaccccagtgtccagtgtagccctactccaggccccttcaagccctgtgagtacctctttgaaagctggggcatccgcctggccgtgtgggccatcgtgttgctctccgtgctctgcaatggactggtgctgctgaccgtgttcgctggcgggcctgtccccctgcccccggtcaagtttgtggtaggtgcgattgcaggcgccaacaccttgactggcatttcctgtggccttctagcctcagtcgatgccctgacctttggtcagttctctgagtacggagcccgctgggagacggggctaggctgccgggccactggcttcctggcagtacttgggtcggaggcatcggtgctgctgctcactctggccgcagtgcagtgcagcgtctccgtctcctgtgtccgggcctatgggaagtccccctccctgggcagcgttcgagcaggggtcctaggctgcctggcactggcagggctggccgccgcgctgcccctggcctcagtgggagaatacggggcctccccactctgcctgccctacgcgccacctgagggtcagccagcagccctgggcttcaccgtggccctggtgatgatgaactccttctgtttcctggtcgtggccggtgcctacatcaaactgtactgtgacctgccgcggggcgactttgaggccgtgtgggactgcgccatggtgaggcacgtggcctggctcatcttcgcagacgggctcctctactgtcccgtggccttcctcagctttgcctccatgctgggcctcttccctgtcacgcccgaggccgtcaagtctgtcctgctggtggtgctgcccctgcctgcctgcctcaacccactgctgtacctgctcttcaacccccacttccgggatgaccttcggcggcttcggccccgcgcaggggactcagggcccctagcctatgctgcggccggggagctggagaagagctcctgtgattctacccaggccctggtagccttctctgatgtggatctcattctggaagcttctgaagctgggcggccccctgggctggagacctatggcttcccctcagtgaccctcatctcctgtcagcagccaggggcccccaggctggagggcagccattgtgtagagccagaggggaaccactttgggaacccccaaccctccatggatggagaactgctgctgagggcagagggatctacgccagcaggtggaggcttgtcagggggtggcggctttcagccctctggcttggcctttgcttcacacgtgtaa

SEQ ID NO: 15933 - DNA, 7701 bp, Homo sapiens
  source 1..7701: mol_type = unassigned DNA
gctggcggcggccttgctctgcgcgctcttcgcgccgccctccccgcccgcccgcctcaggattgaggaagtgcgtctgggcccggccccggcgcggggggcagacggcggtgggacggccaggccccggccccgccagtgtgtccgcccggccccgcgtcccggagcgcccgcacccggccccgccgccgcctcagagcaagaaagctttctgctcagccatggctacgagtccacgccttaatgcaccccacagccagcggcagtggcagtgacaacagcgggacctgcctttgaagatcggctgctgcaagggttgatggctggcatgtcgcaaagaccccccagcatgtactggtgtgtggggccggaggagtcagctgtgtgtccagaacgtgccatggagacgcttaacggtgccggggacacgggcggcaagccgtccacgcggggcggtgaccctgcagcgcggtcccgcaggacggaaggcatccgcgccgcgtacaggcggggagaccgcggcggcgcccgggacctgctggaggaggcctgcgaccagtgcgcgtcccagctggaaaagggccagcttctgagcatcccggcagcctatggggatctggagatggtccgctacctactcagcaagagactggtggagctgcccaccgagcccacggatgacaacccagccgtggtggcagcgtattttggacacacggcagttgtgcaggaattgcttgagccattgacacccaaacaaacagagtgggaacaaacagcacccttcagtggcactttccctttgtcctgccatctcctgccaggtccctgcagtccccagcggcttctgaactggatgctggccttggcttgccagcgagggcacctgggggttgtgaagctcctggtcctgacgcacggggctgacccggagagctacgctgtcaggaagaatgagttccctgtcatcgtgcgcttgcccctgtatgcggccatcaagtcagggaatgaagacattgcaatattcctgcttcggcatggggcctatttctgttcctacatcttgctggatagtcctgaccccagcaaacatctgctgagaaagtacttcattgaagccagtcccttgcccagcagttatccgggaaaaacagctctccgtgtgaaatggtcccatctcagactgccctgggtagacctagactggctcatagacatctcctgccagatcacggagctcgacctttctgccaactgcctggcgaccctcccctcggttatcccctggggcctcatcaatctccggaagctgaacctctccgacaaccacctgggggagctgcctggcgtgcagtcatcggacgaaatcatctgttccaggctacttgaaattgacatttccagcaacaagttgtcccacctccctcctggattcttgcacctctcaaaacttcaaaaactgacagcttcaaaaaattgtttagaaaaattgttcgaagaagaaaatgccactaactggataggtttacggaagctacaggaacttgatatatctgacaataaattgacagaactccctgccctgttccttcactctttcaagtccctcaattctctgaatgtctccagaaacaacctgaaggtgtttccagatccctgggcctgccctttgaaatgttgtaaagcttccagaaatgccctggaatgtctgccagacaaaatggctgtcttttggaaaaatcacctgaaggatgtggatttctcagaaaacgcactcaaagaagttcccctgggacttttccagcttgatgccctcatgttcttgaggttacaggggaaccagctggcggcacttccacctcaagagaagtggacctgcaggcagctcaaaaccctggatctctccagaaaccaacttggcaaaaatgaagatggactgaaaacgaagcgtattgcctttttcaccaccagaggtcgccagcgctccgggactgaggcagcaagtgtgctggaatttccggccttcctaagtgagtctttggaagtcctttgcctgaacgacaaccacctcgacacagtccctccctcggtttgcctactgaagagcttatcagagctctacttgggaaacaaccctggcctccgggagctccctcctgagctggggcagctgggcaacctctggcagctggacactgaagacctgaccatcagcaatgtgcctgcagaaatccaaaaagaaggccccaaagcaatgctgtcttacctgcgtgctcagctgcggaaagcggaaaagtgcaagctgatgaagatgatcatcgtgggtcccccgcgccagggcaagtccaccctcctggagatcttacagacggggagggccccccaggtggtgcatggagaggccaccatcaggaccaccaagtgggagctccagaggccggctggctcgagagccaaggttgagtccgtggagttcaacgtctgggacatcgggggaccggccagcatggccactgtcaaccagtgcttcttcacggacaaggccctgtacgtggtggtctggaacctggcgctgggggaggaggccgtggccaacctccagttctggctgctcaacatcgaggccaaggccccaaacgccgtggtgctggtggtcgggacgcacctggatttaattgaagccaagttccgtgtggaaaggattgcaacgctgcgtgcctatgtgctggcactctgccgctccccctccggctccagggccacaggcttcccagacatcaccttcaaacacttacatgagatttcctgcaagagcctggaaggtcaggaagggctgcgacagctgattttccacgtcacgtgcagcatgaaggacgtgggcagcaccatcggctgccagcgactggcagggcggctgatccccaggagctacctgagcctgcaggaggccgtgctggcagagcagcagcgccgcagccgggacgacgacgtgcagtacctgacggacaggcagctggagcagctggtggagcagacgcccgacaacgacatcaaggactacgaggacctgcagtcagccatcagcttcctcatagaaaccggcaccctgctccatttcccggacaccagccacggcctgaggaacctctacttcctcgaccctatttggctctccgaatgtctgcagaggatctttaatattaagggctctcggtcagtggccaagaatggggtgatcagagcagaagacctcaggatgctgctggtggggactggcttcacgcagcagacggaagagcagtacttccagttcctggccaagtttgagatcgccctgcccgtcgccaatgacagctacctcctgccccatctccttccatctaaacctggcctggacacccacggtatgcggcaccccacagccaacaccattcagagggtatttaagatgagcttcgttcccgttggcttctggcaaaggtttatagcacggatgctgatcagcctggcggagatggacctgcagctttttgaaaacaagaagaatactaaaagcaggaacaggaaagtcaccatttacagttttacaggaaaccagagaaatcgctgtagcacattcagagtgaaaagaaatcagaccatctattggcaggaagggctcctggtcacttttgatgggggctacctcagtgtggaatcttccgacgtgaactggaaaaagaagaaaagcggaggaatgaaaattgtttgccaatcagaagtgagggacttctcagccatggctttcatcacggaccacgtcaattccttgattgatcagtggtttcccgccctgacagccacagagagcgacgggacgccactcatggagcagtacgtgccctgcccggtctgcgagacagcctgggcccagcacacggaccccagtgagaaatcagaggatgtgcagtacttcgacatggaagactgtgtcctgacggccatcgagcgggacttcatctcctgccccagacacccggacctccccgtgccgctgcaggagctggtccctgaactgttcatgaccgacttcccggccaggctcttcctggagaacagcaagctggagcacagcgaggacgagggcagcgtcctgggccagggcggcagtggcaccgtcatctaccgggcccggtaccagggccagcctgtggccgtcaagcgcttccacatcaaaaaattcaagaactttgctaacgtaccggcagacaccatgctgaggcacctgcgggccaccgatgccatgaagaacttctccgagttccggcaggaggccagcatgctgcacgcgctgcagcacccctgcatcgtggcgctcatcggcatcagcatccacccgctctgcttcgccctggagctcgcgccgctcagcagcctcaacaccgtgctgtccgagaacgccagagattcttcctttatacccctgggacacatgctcacccaaaaaatagcctaccagatcgcctcgggcctggcctacctgcacaagaaaaacatcatcttctgtgacctgaagtcggacaacattctggtgtggtcccttgacgtcaaggagcacatcaacatcaagctatctgactacgggatttcgaggcagtcattccatgagggcgccctaggcgtggagggcactcctggctaccaggccccagagatcaggcctcgcattgtatatgatgagaaggtagatatgttctcctatggaatggtgctctacgagttgctgtcaggacagcgccctgcactgggccaccaccagctccagattgccaagaagctgtccaagggcatccgcccggttctggggcagccggaggaagtgcagttccggcgactgcaggcgctcatgatggagtgctgggacactaagccagagaagcgaccgctggccctgtcggtggtgagccagatgaaggacccgacttttgccaccttcatgtatgaactgtgctgtgggaagcagacagccttcttctcatcccagggccaggagtacaccgtggtgttttgggatggaaaagaggagtccaggaactacacggtggtgaacacagagaagggcctcatggaggtgcagaggatgtgctgccctgggatgaaggtgagctgccagctccaggtccagagatccctgtggacagccaccgaggaccagaaaatctacatctacaccctcaagggcatgtgccccttaaacacaccccaacaggccttggatactccagctgtcgtcacctgcttcttggccgtgcctgttattaaaaagaattcctacctggtcttagcgggcctcgccgatgggcttgtggctgtgtttcccgtggtgcggggcaccccaaaggacagctgctcctacctgtgctcacacacagccaacaggtccaagttcagcatcgcggatgaagacgcacggcagaacccctacccagtgaaggccatggaggtggtcaacagcggctctgaggtctggtacagcaatgggccgggcctccttgtcatcgactgtgcctccctggagatctgcaggcggctggagccctacatggccccctccatggttacgtcagtcgtgtgcagctctgagggcagaggggaggaggtcgtctggtgcctggatgacaaggccaactccttggtgatgtaccactccaccacctaccagctgtgtgcccggtacttctgcggggtccccagccccctcagggacatgtttcccgtgcggcccttggacacggaacccccggcagccagccacacggccaacccaaaggtgcctgagggggactccatcgcggacgtgagcatcatgtacagtgaggagctgggcacgcagatcctgatccaccaggaatcactcactgactactgctccatgtcctcctactcctcatccccaccccgccaggctgccaggtccccctcaagcctccccagctccccagcaagttcttccagtgtgcctttctccaccgactgcgaggactcagacatgctacatacgcccggtgctgcctccgacaggtctgagcatgacctgacccccatggacggggagaccttcagccagcacctgcaggccgtgaagatcctcgccgtcagagacctcatttgggtccccaggcgcggtggagatgttatcgtcattggcctggagaaggattctggcgcccagcggggccgagtcattgccgtcttaaaagcccgagagctgactccgcatggggtgctggtggatgctgccgtggtggcaaaggacactgttgtgtgcacctttgaaaatgaaaacacagagtggtgcctggccgtctggaggggctggggcgccagggagttcgacattttctaccagtcctacgaggagctgggccggctggaggcttgcactcgcaagagaaggtaattcctgtggaatgactgtcacacatcagagctggctggcccggggctgcagcctgacccctctgccatcggcctctagttctccaaggacctagaagacagatggagttctcccctgaactccttgctgctaagaagtgctgagaagttactcgcctggcggtggctccagggttctctggttctctggagcagagttctctgaataccccatcccccaactgctgattttacagccccagggaagacagtggtatcaggctgggagcggcctcctctggcctcccccatcagtttgcaggagcaggggtgcaggatcctgttctgagctgggtcaaacaaagcagggccgggccttcctgccatccccaggtctcagatggaattacactagaggccctccgctgggaagcacttgaggtagggcaggaggggggctgtgacccctgccctttccccgccagagacctcaggctctcagcacattccacaggctcctgagtccccgaggcctgggccagcttgggcaagccaagatcagatgtctctgtgttcgggaaggtctccgtgtgggaaagcccttgggggatcccgggtgaggagtgttgccccatccagagaatgaatgagttcctttaagtgccaccgccagcaagcccagaggcacacagtccgagtgcacccgcttagcctttacattcctctccaccgacaaaaggaaggggaaactcaatcagcaggacttcagaaagggccttgtgtttatagctttgtcaagtaaatttggacgcagctggagcacaggccctgtttgtttgcacataataatcttgtttatcactttaaaaaattcagtaatatctcagcagtcaggcttctggttgtgaaatcacattgtatgggatttataccaaattatgtatttgctaaacattcactgcacacgtgtacagcggagtacgaaaaggaacgttgtccacaggggatttatggatacaacagcaaacattttataaactatgcacatgcattacacacatgcacacacatatgcacacacatgtgcaaacatagccacttttttgtcaagagttaccctttggggctccttaaaccagaatgggagtttgaaagagagatcatactccagctgaagtttgttgacccttttctaaaattaaaaagatcaaatttagtatttgctggatatgcagggagatgagactcttttaatctcaaaataaacagattctttcaagaacg

SEQ ID NO: 15934 - DNA, 7671 bp, Homo sapiens
  source 1..7671: mol_type = unassigned DNA
gcggccgccgaggggacgcctcgcgacggttcctgggagagctggcggcggccttgctctgcgcgctcttcgcgccgccctccccgcccgcccgcctcaggattgaggaagtgcgtctgggcccggccccggcgcggggggcagacggcggtgggacggccaggccccggccccgccagtgtgtccgcccggccccgcgtcccggagcgcccgcacccggccccgccgccgcctcagagcaagaaagctttctgctcagccatggctacgagtccacgccttaatgcaccccacagccagcggcagtggcagtgacaacagcgggacctgcctttgaagatcggctgctgcaagggttgatggctggcatgtcgcaaagaccccccagcatgtactggtgtgtggggccggaggagtcagctgtgtgtccagaacgtgccatggagacgcttaacggtgccggggacacgggcggcaagccgtccacgcggggcggtgaccctgcagcgcggtcccgcaggacggaaggcatccgcgccgcgtacaggcggggagaccgcggcggcgcccgggacctgctggaggaggcctgcgaccagtgcgcgtcccagctggaaaagggccagcttctgagcatcccggcagcctatggggatctggagatggtccgctacctactcagcaagagactggtggagctgcccaccgagcccacggatgacaacccagccgtggtggcagcgtattttggacacacggcagttgtgcaggaattgcttgagtccttaccaggtccctgcagtccccagcggcttctgaactggatgctggccttggcttgccagcgagggcacctgggggttgtgaagctcctggtcctgacgcacggggctgacccggagagctacgctgtcaggaagaatgagttccctgtcatcgtgcgcttgcccctgtatgcggccatcaagtcagggaatgaagacattgcaatattcctgcttcggcatggggcctatttctgttcctacatcttgctggatagtcctgaccccagcaaacatctgctgagaaagtacttcattgaagccagtcccttgcccagcagttatccgggaaaaacagctctccgtgtgaaatggtcccatctcagactgccctgggtagacctagactggctcatagacatctcctgccagatcacggagctcgacctttctgccaactgcctggcgaccctcccctcggttatcccctggggcctcatcaatctccggaagctgaacctctccgacaaccacctgggggagctgcctggcgtgcagtcatcggacgaaatcatctgttccaggctacttgaaattgacatttccagcaacaagttgtcccacctccctcctggattcttgcacctctcaaaacttcaaaaactgacagcttcaaaaaattgtttagaaaaattgttcgaagaagaaaatgccactaactggataggtttacggaagctacaggaacttgatatatctgacaataaattgacagaactccctgccctgttccttcactctttcaagtccctcaattctctgaatgtctccagaaacaacctgaaggtgtttccagatccctgggcctgccctttgaaatgttgtaaagcttccagaaatgccctggaatgtctgccagacaaaatggctgtcttttggaaaaatcacctgaaggatgtggatttctcagaaaacgcactcaaagaagttcccctgggacttttccagcttgatgccctcatgttcttgaggttacaggggaaccagctggcggcacttccacctcaagagaagtggacctgcaggcagctcaaaaccctggatctctccagaaaccaacttggcaaaaatgaagatggactgaaaacgaagcgtattgcctttttcaccaccagaggtcgccagcgctccgggactgaggcagcaagtgtgctggaatttccggccttcctaagtgagtctttggaagtcctttgcctgaacgacaaccacctcgacacagtccctccctcggtttgcctactgaagagcttatcagagctctacttgggaaacaaccctggcctccgggagctccctcctgagctggggcagctgggcaacctctggcagctggacactgaagacctgaccatcagcaatgtgcctgcagaaatccaaaaagaaggccccaaagcaatgctgtcttacctgcgtgctcagctgcggaaagcggaaaagtgcaagctgatgaagatgatcatcgtgggtcccccgcgccagggcaagtccaccctcctggagatcttacagacggggagggccccccaggtggtgcatggagaggccaccatcaggaccaccaagtgggagctccagaggccggctggctcgagagccaaggttgagtccgtggagttcaacgtctgggacatcgggggaccggccagcatggccactgtcaaccagtgcttcttcacggacaaggccctgtacgtggtggtctggaacctggcgctgggggaggaggccgtggccaacctccagttctggctgctcaacatcgaggccaaggccccaaacgccgtggtgctggtggtcgggacgcacctggatttaattgaagccaagttccgtgtggaaaggattgcaacgctgcgtgcctatgtgctggcactctgccgctccccctccggctccagggccacaggcttcccagacatcaccttcaaacacttacatgagatttcctgcaagagcctggaaggtcaggaagggctgcgacagctgattttccacgtcacgtgcagcatgaaggacgtgggcagcaccatcggctgccagcgactggcagggcggctgatccccaggagctacctgagcctgcaggaggccgtgctggcagagcagcagcgccgcagccgggacgacgacgtgcagtacctgacggacaggcagctggagcagctggtggagcagacgcccgacaacgacatcaaggactacgaggacctgcagtcagccatcagcttcctcatagaaaccggcaccctgctccatttcccggacaccagccacggcctgaggaacctctacttcctcgaccctatttggctctccgaatgtctgcagaggatctttaatattaagggctctcggtcagtggccaagaatggggtgatcagagcagaagacctcaggatgctgctggtggggactggcttcacgcagcagacggaagagcagtacttccagttcctggccaagtttgagatcgccctgcccgtcgccaatgacagctacctcctgccccatctccttccatctaaacctggcctggacacccacggtatgcggcaccccacagccaacaccattcagagggtatttaagatgagcttcgttcccgttggcttctggcaaaggtttatagcacggatgctgatcagcctggcggagatggacctgcagctttttgaaaacaagaagaatactaaaagcaggaacaggaaagtcaccatttacagttttacaggaaaccagagaaatcgctgtagcacattcagagtgaaaagaaatcagaccatctattggcaggaagggctcctggtcacttttgatgggggctacctcagtgtggaatcttccgacgtgaactggaaaaagaagaaaagcggaggaatgaaaattgtttgccaatcagaagtgagggacttctcagccatggctttcatcacggaccacgtcaattccttgattgatcagtggtttcccgccctgacagccacagagagcgacgggacgccactcatggagcagtacgtgccctgcccggtctgcgagacagcctgggcccagcacacggaccccagtgagaaatcagaggatgtgcagtacttcgacatggaagactgtgtcctgacggccatcgagcgggacttcatctcctgccccagacacccggacctccccgtgccgctgcaggagctggtccctgaactgttcatgaccgacttcccggccaggctcttcctggagaacagcaagctggagcacagcgaggacgagggcagcgtcctgggccagggcggcagtggcaccgtcatctaccgggcccggtaccagggccagcctgtggccgtcaagcgcttccacatcaaaaaattcaagaactttgctaacgtaccggcagacaccatgctgaggcacctgcgggccaccgatgccatgaagaacttctccgagttccggcaggaggccagcatgctgcacgcgctgcagcacccctgcatcgtggcgctcatcggcatcagcatccacccgctctgcttcgccctggagctcgcgccgctcagcagcctcaacaccgtgctgtccgagaacgccagagattcttcctttatacccctgggacacatgctcacccaaaaaatagcctaccagatcgcctcgggcctggcctacctgcacaagaaaaacatcatcttctgtgacctgaagtcggacaacattctggtgtggtcccttgacgtcaaggagcacatcaacatcaagctatctgactacgggatttcgaggcagtcattccatgagggcgccctaggcgtggagggcactcctggctaccaggccccagagatcaggcctcgcattgtatatgatgagaaggtagatatgttctcctatggaatggtgctctacgagttgctgtcaggacagcgccctgcactgggccaccaccagctccagattgccaagaagctgtccaagggcatccgcccggttctggggcagccggaggaagtgcagttccggcgactgcaggcgctcatgatggagtgctgggacactaagccagagaagcgaccgctggccctgtcggtggtgagccagatgaaggacccgacttttgccaccttcatgtatgaactgtgctgtgggaagcagacagccttcttctcatcccagggccaggagtacaccgtggtgttttgggatggaaaagaggagtccaggaactacacggtggtgaacacagagaagggcctcatggaggtgcagaggatgtgctgccctgggatgaaggtgagctgccagctccaggtccagagatccctgtggacagccaccgaggaccagaaaatctacatctacaccctcaagggcatgtgccccttaaacacaccccaacaggccttggatactccagctgtcgtcacctgcttcttggccgtgcctgttattaaaaagaattcctacctggtcttagcgggcctcgccgatgggcttgtggctgtgtttcccgtggtgcggggcaccccaaaggacagctgctcctacctgtgctcacacacagccaacaggtccaagttcagcatcgcggatgaagacgcacggcagaacccctacccagtgaaggccatggaggtggtcaacagcggctctgaggtctggtacagcaatgggccgggcctccttgtcatcgactgtgcctccctggagatctgcaggcggctggagccctacatggccccctccatggttacgtcagtcgtgtgcagctctgagggcagaggggaggaggtcgtctggtgcctggatgacaaggccaactccttggtgatgtaccactccaccacctaccagctgtgtgcccggtacttctgcggggtccccagccccctcagggacatgtttcccgtgcggcccttggacacggaacccccggcagccagccacacggccaacccaaaggtgcctgagggggactccatcgcggacgtgagcatcatgtacagtgaggagctgggcacgcagatcctgatccaccaggaatcactcactgactactgctccatgtcctcctactcctcatccccaccccgccaggctgccaggtccccctcaagcctccccagctccccagcaagttcttccagtgtgcctttctccaccgactgcgaggactcagacatgctacatacgcccggtgctgcctccgacaggtctgagcatgacctgacccccatggacggggagaccttcagccagcacctgcaggccgtgaagatcctcgccgtcagagacctcatttgggtccccaggcgcggtggagatgttatcgtcattggcctggagaaggattctggcgcccagcggggccgagtcattgccgtcttaaaagcccgagagctgactccgcatggggtgctggtggatgctgccgtggtggcaaaggacactgttgtgtgcacctttgaaaatgaaaacacagagtggtgcctggccgtctggaggggctggggcgccagggagttcgacattttctaccagtcctacgaggagctgggccggctggaggcttgcactcgcaagagaaggtaattcctgtggaatgactgtcacacatcagagctggctggcccggggctgcagcctgacccctctgccatcggcctctagttctccaaggacctagaagacagatggagttctcccctgaactccttgctgctaagaagtgctgagaagttactcgcctggcggtggctccagggttctctggttctctggagcagagttctctgaataccccatcccccaactgctgattttacagccccagggaagacagtggtatcaggctgggagcggcctcctctggcctcccccatcagtttgcaggagcaggggtgcaggatcctgttctgagctgggtcaaacaaagcagggccgggccttcctgccatccccaggtctcagatggaattacactagaggccctccgctgggaagcacttgaggtagggcaggaggggggctgtgacccctgccctttccccgccagagacctcaggctctcagcacattccacaggctcctgagtccccgaggcctgggccagcttgggcaagccaagatcagatgtctctgtgttcgggaaggtctccgtgtgggaaagcccttgggggatcccgggtgaggagtgttgccccatccagagaatgaatgagttcctttaagtgccaccgccagcaagcccagaggcacacagtccgagtgcacccgcttagcctttacattcctctccaccgacaaaaggaaggggaaactcaatcagcaggacttcagaaagggccttgtgtttatagctttgtcaagtaaatttggacgcagctggagcacaggccctgtttgtttgcacataataatcttgtttatcactttaaaaaattcagtaatatctcagcagtcaggcttctggttgtgaaatcacattgtatgggatttataccaaattatgtatttgctaaacattcactgcacacgtgtacagcggagtacgaaaaggaacgttgtccacaggggatttatggatacaacagcaaacattttataaactatgcacatgcattacacacatgcacacacatatgcacacacatgtgcaaacatagccacttttttgtcaagagttaccctttggggctccttaaaccagaatgggagtttgaaagagagatcatactccagctgaagtttgttgacccttttctaaaattaaaaagatcaaatttagtatttgctggatatgcagggagatgagactcttttaatctcaaaataaacagattctttcaagaacgaa

SEQ ID NO: 15935 - DNA, 6271 bp, Homo sapiens
  source 1..6271: mol_type = unassigned DNA
gctggcggcggccttgctctgcgcgctcttcgcgccgccctccccgcccgcccgcctcaggattgaggaagtgcgtctgggcccggccccggcgcggggggcagacggcggtgggacggccaggccccggccccgccagtgtgtccgcccggccccgcgtcccggagcgcccgcacccggccccgccgccgcctcagagcaagaaagctttctgctcagccatggctacgagtccacgccttaatgcaccccacagccagcggcagtggcagtgacaacagcgggacctgcctttgaagatcggctgctgcaagggttgatggctggcatgtcgcaaagaccccccagcatgtactggtgtgtggggccggaggagtcagctgtgtgtccagaacgtgccatggagacgcttaacggtgccggggacacgggcggcaagccgtccacgcggggcggtgaccctgcagcgcggtcccgcaggacggaaggcatccgcgccgcgtacaggcggggagaccgcggcggcgcccgggacctgctggaggaggcctgcgaccagtgcgcgtcccagctggaaaagggccagcttctgagcatcccggcagcctatggggatctggagatggtccgctacctactcagcaagagactggtggagctgcccaccgagcccacggatgacaacccagccgtggtggcagcgtattttggacacacggcagttgtgcaggaattgcttgagtccttaccaggtccctgcagtccccagcggcttctgaactggatgctggccttggcttgccagcgagggcacctgggggttgtgaagctcctggtcctgacgcacggggctgacccggagagctacgctgtcaggaagaatgagttccctgtcatcgtgcgcttgcccctgtatgcggccatcaagtcagggaatgaagacattgcaatattcctgcttcggcatggggcctatttctgttcctacatcttgctggatagtcctgaccccagcaaacatctgctgagaaagtacttcattgaagccagtcccttgcccagcagttatccgggaaaaacagctctccgtgtgaaatggtcccatctcagactgccctgggtagacctagactggctcatagacatctcctgccagatcacggagctcgacctttctgccaactgcctggcgaccctcccctcggttatcccctggggcctcatcaatctccggaagctgaacctctccgacaaccacctgggggagctgcctggcgtgcagtcatcggacgaaatcatctgttccaggctacttgaaattgacatttccagcaacaagttgtcccacctccctcctggattcttgcacctctcaaaacttcaaaaactgacagcttcaaaaaattgtttagaaaaattgttcgaagaagaaaatgccactaactggataggtttacggaagctacaggaacttgatatatctgacaataaattgacagaactccctgccctgttccttcactctttcaagtccctcaattctctgaatgtctccagaaacaacctgaaggtgtttccagatccctgggcctgccctttgaaatgttgtaaagcttccagaaatgccctggaatgtctgccagacaaaatggctgtcttttggaaaaatcacctgaaggatgtggatttctcagaaaacgcactcaaagaagttcccctgggacttttccagcttgatgccctcatgttcttgaggttacaggggaaccagctggcggcacttccacctcaagagaagtggacctgcaggcagctcaaaaccctggatctctccagaaaccaacttggcaaaaatgaagatggactgaaaacgaagcgtattgcctttttcaccaccagaggtcgccagcgctccgggactgaggcagcaagtgtgctggaatttccggccttcctaagtgagtctttggaagtcctttgcctgaacgacaaccacctcgacacagtccctccctcggtttgcctactgaagagcttatcagagctctacttgggaaacaaccctggcctccgggagctccctcctgagctggggcagctgggcaacctctggcagctggacactgaagacctgaccatcagcaatgtgcctgcagaaatccaaaaagaaggccccaaagcaatgctgtcttacctgcgtgctcagctgcggaaagcggaaaagtgcaagctgatgaagatgatcatcgtgggtcccccgcgccagggcaagtccaccctcctggagatcttacagacggggagggccccccaggtggtgcatggagaggccaccatcaggaccaccaagtgggagctccagaggccggctggctcgagagccaaggttgagtccgtggagttcaacgtctgggacatcgggggaccggccagcatggccactgtcaaccagtgcttcttcacggacaaggccctgtacgtggtggtctggaacctggcgctgggggaggaggccgtggccaacctccagttctggctgctcaacatcgaggccaaggccccaaacgccgtggtgctggtggtcgggacgcacctggatttaattgaagccaagttccgtgtggaaaggattgcaacgctgcgtgcctatgtgctggcactctgccgctccccctccggctccagggccacaggcttcccagacatcaccttcaaacacttacatgagatttcctgcaagagcctggaaggtcaggaagggctgcgacagctgattttccacgtcacgtgcagcatgaaggacgtgggcagcaccatcggctgccagcgactggcagggcggctgatccccaggagctacctgagcctgcaggaggccgtgctggcagagcagcagcgccgcagccgggacgacgacgtgcagtacctgacggacaggcagctggagcagctggtggagcagacgcccgacaacgacatcaaggactacgaggacctgcagtcagccatcagcttcctcatagaaaccggcaccctgctccatttcccggacaccagccacggcctgaggaacctctacttcctcgaccctatttggctctccgaatgtctgcagaggatctttaatattaagggctctcggtcagtggccaagaatggggtgatcagagcagaagacctcaggatgctgctggtggggactggcttcacgcagcagacggaagagcagtacttccagttcctggccaagtttgagatcgccctgcccgtcgccaatgacagctacctcctgccccatctccttccatctaaacctggcctggacacccacggtatgcggcaccccacagccaacaccattcagagggtatttaagatgagcttcgttcccgttggcttctggcaaaggtttatagcacggatgctgatcagcctggcggagatggacctgcagctttttgaaaacaagaagaatactaaaagcaggaacaggaaagtcaccatttacagttttacaggaaaccagagaaatcgctgtagcacattcagagtgaaaagaaatcagaccatctattggcaggaagggctcctggtcacttttgatgggggctacctcagtgtggaatcttccgacgtgaactggaaaaagaagaaaagcggaggaatgaaaattgtttgccaatcagaagtgagggacttctcagccatggctttcatcacggaccacgtcaattccttgattgatcagtggtttcccgccctgacagccacagagagcgacgggacgccactcatggagcagtacgtgccctgcccggtctgcgagacagcctgggcccagcacacggaccccagtgagaaatcagaggatgtgcagtacttcgacatggaagactgtgtcctgacggccatcgagcgggacttcatctcctgccccagacacccggacctccccgtgccgctgcaggagctggtccctgaactgttcatgaccgacttcccggccaggctcttcctggagaacagcaagctggagcacagcgaggacgagggcagcgtcctgggccagggcggcagtggcaccgtcatctaccgggcccggtaccagggccagcctgtggccgtcaagcgcttccacatcaaaaaattcaagaactttgctaacgtaccggcagacaccatgctgaggcacctgcgggccaccgatgccatgaagaacttctccgagttccggcaggaggccagcatgctgcacgcgctgcagcacccctgcatcgtggcgctcatcggcatcagcatccacccgctctgcttcgccctggagctcgcgccgctcagcagcctcaacaccgtgctgtccgagaacgccagagattcttcctttatacccctgggacacatgctcacccaaaaaatagcctaccagatcgcctcgggcctggcctacctgcacaagaaaaacatcatcttctgtgacctgaagtcggacaacattctggtgtggtcccttgacgtcaaggagcacatcaacatcaagctatctgactacgggatttcgaggcagtcattccatgagggcgccctaggcgtggagggcactcctggctaccaggccccagagatcaggcctcgcattgtatatgatgagaaggtagatatgttctcctatggaatggtgctctacgagttgctgtcaggacagcgccctgcactgggccaccaccagctccagattgccaagaagctgtccaagggcatccgcccggttctggggcagccggaggaagtgcagttccggcgactgcaggcgctcatgatggagtgctgggacactaagccagagaagcgaccgctggccctgtcggtggtgagccagatgaaggacccgacttttgccaccttcatgtatgaactgtgctgtgggaagcagacagccttcttctcatcccagggccaggagtacaccgtggtgttttgggatggaaaagaggagtccaggaactacacggtggtgaacacagagaagggcctcatggaggtgcagaggatgtgctgccctgggatgaaggtgagctgccagctccaggtccagagatccctgtggacagccaccgaggaccagaaaatctacatctacaccctcaagggcatgtgccccttaaacacaccccaacaggccttggatactccagctgtcgtcacctgcttcttggccgtgcctgttattaaaaagaattcctacctggtcttagcgggcctcgccgatgggcttgtggctgtgtttcccgtggtgcggggcaccccaaaggacagctgctcctacctgtgctcacacacagccaacaggtccaagttcagcatcgcggatgaagacgcacggcagaacccctacccagtgaaggccatggaggtggtcaacagcggctctgaggtctggtacagcaatgggccgggcctccttgtcatcgactgtgcctccctggagatctgcaggcggctggagccctacatggccccctccatggttacgtcagtcgtgtgcagctctgagggcagaggggaggaggtcgtctggtgcctggatgacaaggccaactccttggtgatgtaccactccaccacctaccagctgtgtgcccggtacttctgcggggtccccagccccctcagggacatgtttcccgtgcggcccttggacacggaacccccggcagccagccacacggccaacccaaaggtgcctgagggggactccatcgcggacgtgagcatcatgtacagtgaggagctgggcacgcagatcctgatccaccaggaatcactcactgactactgctccatgtcctcctactcctcatccccaccccgccaggctgccaggtccccctcaagcctccccagctccccagcaagttcttccagtgtgcctttctccaccgactgcgaggactcagacatgctacatacgcccggtgctgcctccgacaggtctgagcatgacctgacccccatggacggggagaccttcagccagcacctgcaggccgtgaagatcctcgccgtcagagacctcatttgggtccccaggcgcggtggagatgttatcgtcattggcctggagaaggattctggcgcccagcggggccgagtcattgccgtcttaaaagcccgagagctgactccgcatgggattatgccagtctcctctgtgaaggtatgctgggcagggtggcctgtccgggacatggtctacatggttgcagtgatgtga

SEQ ID NO: 15936 - DNA, 569 bp, Homo sapiens
  source 1..569: mol_type = unassigned DNA
gcgtctgggcccggccccggcgcggggggcagacggcggtgggacggccaggccccggccccgccagtgtgtccgcccggccccgcgtcccggagcgcccgcacccggccccgccgccgcctcaggtggtctctggctggcgcagatacaactgctctgtctaccatggtctctgcaagctacaggggaccttcctggcaggcagggacgcgggaaggaagcctaggaaggccggggtcagcgaggagacgctggtggagaatctgagaacccccgtggccatctcaacctaccccttcacagtatgaggccgcgaagtttttctcccacgaacacttcccctgcaacagagcaagaaagctttctgctcagccatggctacgagtccacgccttaatgcaccccacagccagcggcagtggcagtgacaacagcgggacctgcctttgaagatcggctgctgcaagggttgatggctggcatgtcgcaaagaccccccagcatgtactggtgtgtggggccggaggagtcagctgtgtgtccagaacgtgccatggagacgcttaacg

SEQ ID NO: 15937 - DNA, 3112 bp, Homo sapiens
  source 1..3112: mol_type = unassigned DNA
cgtcaaggagcacatcaacatcaagctatctgactacgggatttcgaggcagtcattccatgagggcgccctaggcgtggagggcactcctggctaccaggccccagagatcaggcctcgcattgtatatgatgagaaggtagatatgttctcctatggaatggtgctctacgagttgctgtcaggacagcgccctgcactgggccaccaccagctccagattgccaagaagctgtccaagggcatccgcccggttctggggcagccggaggaagtgcagttccggcgactgcaggcgctcatgatggagtgctgggacactaagccagagaagcgaccgctggccctgtcggtggtgagccagatgaaggacccgacttttgccaccttcatgtatgaactgtgctgtgggaagcagacagccttcttctcatcccagggccaggagtacaccgtggtgttttgggatggaaaagaggagtccaggaactacacggtggtgaacacagagaagggcctcatggaggtgcagaggatgtgctgccctgggatgaaggtgagctgccagctccaggtccagagatccctgtggacagccaccgaggaccagaaaatctacatctacaccctcaagggcatgtgccccttaaacacaccccaacaggccttggatactccagctgtcgtcacctgcttcttggccgtgcctgttattaaaaagaattcctacctggtcttagcgggcctcgccgatgggcttgtggctgtgtttcccgtggtgcggggcaccccaaaggacagctgctcctacctgtgctcacacacagccaacaggtccaagttcagcatcgcggatgaagacgcacggcagaacccctacccagtgaaggccatggaggtggtcaacagcggctctgaggtctggtacagcaatgggccgggcctccttgtcatcgactgtgcctccctggagatctgcaggcggctggagccctacatggccccctccatggttacgtcagtcgtgtgcagctctgagggcagaggggaggaggtcgtctggtgcctggatgacaaggccaactccttggtgatgtaccactccaccacctaccagctgtgtgcccggtacttctgcggggtccccagccccctcagggacatgtttcccgtgcggcccttggacacggaacccccggcagccagccacacggccaacccaaaggtgcctgagggggactccatcgcggacgtgagcatcatgtacagtgaggagctgggcacgcagatcctgatccaccaggaatcactcactgactactgctccatgtcctcctactcctcatccccaccccgccaggctgccaggtccccctcaagcctccccagctccccagcaagttcttccagtgtgcctttctccaccgactgcgaggactcagacatgctacatacgcccggtgctgcctccgacaggtctgagcatgacctgacccccatggacggggagaccttcagccagcacctgcaggccgtgaagatcctcgccgtcagagacctcatttgggtccccaggcgcgtggagatgttatcgtcattggcctggagaaggattctggcgcccagcggggccgagtcattgccgtcttaaaagcccgagagctgactccgcatggggtgctggtggatgctgccgtggtggcaaaggacactgttgtgtgcacctttgaaaatgaaaacacagagtggtgcctggccgtctggaggggctggggcgccagggagttcgacattttctaccagtcctacgaggagctgggccggctggaggcttgcactcgcaagagaaggtaattcctgtggaatgactgtcacacatcagagctggctggcccggggctgcagcctgacccctctgccatcggcctctagttctccaaggacctagaagacagatggagttctcccctgaactccttgctgctaagaagtgctgagaagttactcgcctggcggtggctccagggttctctggttctctggagcagagttctctgaataccccatcccccaactgctgattttacagccccagggaagacagtggtatcaggctgggagcggcctcctctggcctcccccatcagtttgcaggagcaggggtgcaggatcctgttctgagctgggtcaaacaaagcagggccgggccttcctgccatccccaggtctcagatggaattacactagaggccctccgctgggaagcacttgaggtagggcaggaggggggctgtgacccctgccctttccccgccagagacctcaggctctcagcacattccacaggctcctgagtccccgaggcctgggccagcttgggcaagccaagatcagatgtctctgtgttcgggaaggtctccgtgtgggaaagcccttgggggatcccgggtgaggagtgttgccccatccagagaatgaatgagttcctttaagtgccaccgccagcaagcccagaggcacacagtccgagtgcacccgcttagcctttacattcctctccaccgacaaaaggaaggggaaactcaatcagcaggacttcagaaagggccttgtgtttatagctttgtcaagtaaatttggacgcagctggagcacaggccctgtttgtttgcacataataatcttgtttatcactttaaaaaattcagtaatatctcagcagtcaggcttctggttgtgaaatcacattgtatgggatttataccaaattatgtatttgctaaacattcactgcacacgtgtacagcggagtacgaaaaggaacgttgtccacaggggatttatggatacaacagcaaacattttataaactatgcacatgcattacacacatgcacacacatatgcacacacatgtgcaaacatagccacttttttgtcaagagttaccctttggggctccttaaaccagaatgggagtttgaaagagagatcatactccagctgaagtttgttgacccttttctaaaattaaaaagatcaaatttagtatttgctggatatgcagggagatgagactcttttaatctcaaaataaacagattctttcaag

SEQ ID NO: 15938 - DNA, 9158 bp, Homo sapiens
  source 1..9158: mol_type = unassigned DNA
ttccctgagcagcggacgttcatgctgggagggcggcgggttggaagcaggtgccaccatggctagtggcagctgtcaggggtgcgaagaggacgaggaaactctgaagaagttgatagtcaggctgaacaatgtccaggaaggaaaacagatagaaacgctggtccaaatcctggaggatctgctggtgttcacgtactccgagcgcgcctccaagttatttcaaggcaaaaatatccatgtgcctctgttgatcgtcttggactcctatatgagagtcgcgagtgtgcagcaggtgggttggtcacttctgtgcaaattaatagaagtctgtccaggtacaatgcaaagcttaatgggaccccaggatgttggaaatgattgggaagtccttggtgttcaccaattgattcttaaaatgctaacagttcataatgccagtgtaaacttgtcagtgattggactgaagaccttagatctcctcctaacttcaggtaaaatcaccttgctgatattggatgaagaaagtgatattttcatgttaatttttgatgccatgcactcatttccagccaatgatgaagtccagaaacttggatgcaaagctttacatgtgctgtttgagagagtctcagaggagcaactgactgaatttgttgagaacaaagattatatgatattgttaagtgcgttaacaaattttaaagatgaagaggaaattgtgcttcatgtgctgcattgtttacattccctagcgattccttgcaataatgtggaagtcctcatgagtggcaatgtcaggtgttataatattgtggtggaagctatgaaagcattccctatgagtgaaagaattcaagaagtgagttgctgtttgctccataggcttacattaggtaattttttcaatatcctggtattaaacgaagtccatgagtttgtggtgaaagctgtgcagcagtacccagagaatgcagcattgcagatctcagcgctcagctgtttggccctcctcactgagactattttcttaaatcaagatttagaggaaaagaatgagaatcaagagaatgatgatgagggggaagaagataaattgttttggctggaagcctgttacaaagcattaacgtggcatagaaagaacaagcacgtgcaggaggccgcatgctgggcactaaataatctccttatgtaccaaaacagtttacatgagaagattggagatgaagatggccatttcccagctcatagggaagtgatgctctccatgctgatgcattcttcatcaaaggaagttttccaggcatctgcgaatgcattgtcaactctcttagaacaaaatgttaatttcagaaaaatactgttatcaaaaggaatacacctgaatgttttggagttaatgcagaagcatatacattctcctgaagtggctgaaagtggctgtaaaatgctaaatcatctttttgaaggaagcaacacttccctggatataatggcagcagtggtccccaaaatactaacagttatgaaacgtcatgagacatcattaccagtgcagctggaggcgcttcgagctattttacattttatagtgcctggcatgccagaagaatccagggaggatacagaatttcatcataagctaaatatggttaaaaaacagtgtttcaagaatgatattcacaaactggtcctagcagctttgaacaggttcattggaaatcctgggattcagaaatgtggattaaaagtaatttcttctattgtacattttcctgatgcattagagatgttatccctggaaggtgctatggattcagtgcttcacacactgcagatgtatccagatgaccaagaaattcagtgtctgggtttaagtcttataggatacttgattacaaagaagaatgtgttcataggaactggacatctgctggcaaaaattctggtttccagcttataccgatttaaggatgttgctgaaatacagactaaaggatttcagacaatcttagcaatcctcaaattgtcagcatctttttctaagctgctggtgcatcattcatttgacttagtaatattccatcaaatgtcttccaatatcatggaacaaaaggatcaacagtttctaaacctctgttgcaagtgttttgcaaaagtagctatggatgattacttaaaaaatgtgatgctagagagagcgtgtgatcagaataacagcatcatggttgaatgcttgcttctattgggagcagatgccaatcaagcaaaggagggatcttctttaatttgtcaggtatgtgagaaagagagcagtcccaaattggtggaactcttactgaatagtggatctcgtgaacaagatgtacgaaaagcgttgacgataagcattgggaaaggtgacagccagatcatcagcttgctcttaaggaggctggccctggatgtggccaacaatagcatttgccttggaggattttgtataggaaaagttgaaccttcttggcttggtcctttatttccagataagacttctaatttaaggaaacaaacaaatatagcatctacactagcaagaatggtgatcagatatcagatgaaaagtgctgtggaagaaggaacagcctcaggcagcgatggaaatttttctgaagatgtgctgtctaaatttgatgaatggacctttattcctgactcttctatggacagtgtgtttgctcaaagtgatgacctggatagtgaaggaagtgaaggctcatttcttgtgaaaaagaaatctaattcaattagtgtaggagaattttaccgagatgccgtattacagcgttgctcaccaaatttgcaaagacattccaattccttggggcccatttttgatcatgaagatttactgaagcgaaaaagaaaaatattatcttcagatgattcactcaggtcatcaaaacttcaatcccatatgaggcattcagacagcatttcttctctggcttctgagagagaatatattacatcactagacctttcagcaaatgaactaagagatattgatgccctaagccagaaatgctgtataagtgttcatttggagcatcttgaaaagctggagcttcaccagaatgcactcacgagctttccacaacagctatgtgaaactctgaagagtttgacacatttggacttgcacagtaataaatttacatcatttccttcttatttgttgaaaatgagttgtattgctaatcttgatgtctctcgaaatgacattggaccctcagtggttttagatcctacagtgaaatgtccaactctgaaacagtttaacctgtcatataaccagctgtcttttgtacctgagaacctcactgatgtggtagagaaactggagcagctcattttagaaggaaataaaatatcagggatatgctcccccttgagactgaaggaactgaagattttaaaccttagtaagaaccacatttcatccctatcagagaactttcttgaggcttgtcctaaagtggagagtttcagtgccagaatgaattttcttgctgctatgcctttcttgcctccttctatgacaatcctaaaattatctcagaacaaattttcctgtattccagaagcaattttaaatcttccacacttgcggtctttagatatgagcagcaatgatattcagtacctaccaggtcccgcacactggaaatctttgaacttaagggaactcttatttagccataatcagatcagcatcttggacttgagtgaaaaagcatatttatggtctagagtagagaaactgcatctttctcacaataaactgaaagagattcctcctgagattggctgtcttgaaaatctgacatctctggatgtcagttacaacttggaactaagatcctttcccaatgaaatggggaaattaagcaaaatatgggatcttcctttggatgaactgcatcttaactttgattttaaacatataggatgtaaagccaaagacatcataaggtttcttcaacagcgattaaaaaaggctgtgccttataaccgaatgaaacttatgattgtgggaaatactgggagtggtaaaaccaccttattgcagcaattaatgaaaaccaagaaatcagatcttggaatgcaaagtgccacagttggcatagatgtgaaagactggcctatccaaataagagacaaaagaaagagagatctcgtcctaaatgtgtgggattttgcaggtcgtgaggaattctatagtactcatccccattttatgacgcagcgagcattgtaccttgctgtctatgacctcagcaagggacaggctgaagttgatgccatgaagccttggctcttcaatataaaggctcgcgcttcttcttcccctgtgattctcgttggcacacatttggatgtttctgatgagaagcaacgcaaagcctgcatgagtaaaatcaccaaggaactcctgaataagcgagggttccctgccatacgagattaccactttgtgaatgccaccgaggaatctgatgctttggcaaaacttcggaaaaccatcataaacgagagccttaatttcaagatccgagatcagcttgttgttggacagctgattccagactgctatgtagaacttgaaaaaatcattttatcggagcgtaaaaatgtgccaattgaatttcccgtaattgaccggaaacgattattacaactagtgagagaaaatcagctgcagttagatgaaaatgagcttcctcacgcagttcactttctaaatgaatcaggagtccttcttcattttcaagacccagcactgcagttaagtgacttgtactttgtggaacccaagtggctttgtaaaatcatggcacagattttgacagtgaaagtggaaggttgtccaaaacaccctaagggcattatttcgcgtagagatgtggaaaaatttctttcaaaaaaaaggaaatttccaaagaactacatgtcacagtattttaagctcctagaaaaattccagattgctttgccaataggagaagaatatttgctggttccaagcagtttgtctgaccacaggcctgtgatagagcttccccattgtgagaactctgaaattatcatccgactatatgaaatgccttattttccaatgggattttggtcaagattaatcaatcgattacttgagatttcaccttacatgctttcagggagagaacgagcacttcgcccaaacagaatgtattggcgacaaggcatttacttaaattggtctcctgaagcttattgtctggtaggatctgaagtcttagacaatcatccagagagtttcttaaaaattacagttccttcttgtagaaaaggctgtattcttttgggccaagttgtggaccacattgattctctcatggaagaatggtttcctgggttgctggagattgatatttgtggtgaaggagaaactctgttgaagaaatgggcattatatagttttaatgatggtgaagaacatcaaaaaatcttacttgatgacttgatgaagaaagcagaggaaggagatctcttagtaaatccagatcaaccaaggctcaccattccaatatctcagattgcccctgacttgattttggctgacctgcctagaaatattatgttgaataatgatgagttggaatttgaacaagctccagagtttctcctaggtgatggcagttttggatcagtttaccgagcagcctatgaaggagaagaagtggctgtgaagatttttaataaacatacatcactcaggctgttaagacaagagcttgtggtgctttgccacctccaccaccccagtttgatatctttgctggcagctgggattcgtccccggatgttggtgatggagttagcctccaagggttccttggatcgcctgcttcagcaggacaaagccagcctcactagaaccctacagcacaggattgcactccacgtagctgatggtttgagatacctccactcagccatgattatataccgagacctgaaaccccacaatgtgctgcttttcacactgtatcccaatgctgccatcattgcaaagattgctgactacggcattgctcagtactgctgtagaatggggataaaaacatcagagggcacaccagggtttcgtgcacctgaagttgccagaggaaatgtcatttataaccaacaggctgatgtttattcatttggtttactactctatgacattttgacaactggaggtagaatagtagagggtttgaagtttccaaatgagtttgatgaattagaaatacaaggaaaattacctgatccagttaaagaatatggttgtgccccatggcctatggttgagaaattaattaaacagtgtttgaaagaaaatcctcaagaaaggcctacttctgcccaggtctttgacattttgaattcagctgaattagtctgtctgacgagacgcattttattacctaaaaacgtaattgttgaatgcatggttgctacacatcacaacagcaggaatgcaagcatttggctgggctgtgggcacaccgacagaggacagctctcatttcttgacttaaatactgaaggatacacttctgaggaagttgctgatagtagaatattgtgcttagccttggtgcatcttcctgttgaaaaggaaagctggattgtgtctgggacacagtctggtactctcctggtcatcaataccgaagatgggaaaaagagacataccctagaaaagatgactgattctgtcacttgtttgtattgcaattccttttccaagcaaagcaaacaaaaaaattttcttttggttggaaccgctgatggcaagttagcaatttttgaagataagactgttaagcttaaaggagctgctcctttgaagatactaaatataggaaatgtcagtactccattgatgtgtttgagtgaatccacaaattcaacggaaagaaatgtaatgtggggaggatgtggcacaaagattttctccttttctaatgatttcaccattcagaaactcattgagacaagaacaagccaactgttttcttatgcagctttcagtgattccaacatcataacagtggtggtagacactgctctctatattgctaagcaaaatagccctgttgtggaagtgtgggataagaaaactgaaaaactctgtggactaatagactgcgtgcactttttaagggaggtaatggtaaaagaaaacaaggaatcaaaacacaaaatgtcttattctgggagagtgaaaaccctctgccttcagaagaacactgctctttggataggaactggaggaggccatattttactcctggatctttcaactcgtcgacttatacgtgtaatttacaacttttgtaattcggtcagagtcatgatgacagcacagctaggaagccttaaaaatgtcatgctggtattgggctacaaccggaaaaatactgaaggtacacaaaagcagaaagagatacaatcttgcttgaccgtttgggacatcaatcttccacatgaagtgcaaaatttagaaaaacacattgaagtgagaaaagaattagctgaaaaaatgagacgaacatctgttgagtaagagagaaataggaattgtctttggataggaaaattattctctcctcttgtaaatatttattttaaaaatgttcacatggaaagggtactcacattttttgaaatagctcgtgtgtatgaaggaatgttattatttttaatttaaatatatgtaaaaatacttaccagtaaatgtgtattttaaagaactatttaaaacacaatgttatatttcttataaataccagttactttcgttcattaattaatgaaaataaatctgtgaagtacctaatttaagtactcatactaaaatttataaggccgataattttttgttttcttgtctgtaatggaggtaaactttattttaaattctgtgcttaagacaggactattgcttgtcgatttttctagaaatctgcacggtataatgaaaatattaagacagtttcccatgtaatgtattccttcttagattgcatcgaaatgcactatcatatatgcttgtaaatattcaaatgaatttgcactaataaagtcctttgttggtatgtgaattctctttgttgctgttgcaaacagtgcatcttacacaacttcactcaattcaaaagaaaactccattaaaagtactaatgaaaaaacatgacatactgtcaaagtcctcatatctaggaaagacacagaaactctctttgtcacagaaactctctgtgtctttcctagacataatagagttgtttttcaactctatgtttgaatgtggataccctgaattttgtataattagtgtaaatacagtgttcagtccttcaagtgatatttttatttttttattcataccactagctacttgttttctaatctgcttcattctaatgcttatattcatcttttccctaaatttgtgatgctgcagatcctacatcattcagatagaaacctttttttttttcagaattatagaattccacagctcctaccaagaccatgaggataaatatctaacacttttcagttgctgaaggagaaaggagctttagttatgatggataaaaatatctgccaccctaggcttccaaattatacttaaattgtttacatagcttaccacaataggagtatcagggccaaatacctatgtaataatttgaggtcatttctgctttaggaaaagtactttcggtaaattctttggccctgaccagtattcattatttcagataattccctgtgataggacaactagtacatttaatattctcagaacttatggcattttactatgtgaaaactttaaatttatttatattaagggtaatcaaattcttaaagatgaaagattttctgtattttaaaggaagctatgctttaacttgttatgtaattaacaaaaaaatcatatataatagagctctttgttccagtgttatctctttcattgttactttgtatttgcaattttttttaccaaagacaaattaaaaaaatgaataccatatttaaatggaataataaaggttttttaaaaactt

SEQ ID NO: 15939 - DNA, 2950 bp, Homo sapiens
  source 1..2950: mol_type = unassigned DNA
attcacgatcatccgggatgatgcttttgctggactttttcatcttgaatacctgttcattgaagggaacaaaatagaaaccatttcaagaaatgcctttcgtggcctccgtgacctgactcacctttctttggccaataaccacataaaagcactaccaagggatgtcttcagtgatttagactctctgattgaactagatttgaggggtaataaatttgaatgtgactgcaaagccaagtggctatacctgtggttgaagatgacaaattccaccgtttctgatgtgctgtgtattggtccaccagagtatcaggaaaagaagctaaatgacgtgaccagctttgactatgaatgcacaactacagattttgttgttcatcagactttaccctaccagtcggtttcagtggatacgttcaactccaagaacgatgtgtacgtggccatcgcgcagcccagcatggagaactgcatggtgctggagtgggaccacattgaaatgaatttccggagctatgacaacattacaggtcagtccatcgtgggctgtaaggccattctcatcgatgatcaggtctttgtggtggtagcccagctcttcggtggctctcacatttacaaatacgacgagagttggaccaaatttgtcaaattccaagacatagaggtctctcgcatttccaagcccaatgacatcgagctgtttcagatcgacgacgagacgttctttgtcatcgcagacagctcaaaggctggtctgtccacagtttataaatggaacagcaaaggattctattcttaccagccgctcccaggtccccatcatcctccagtggaataaaagctctaagaagtttgtcccccatggtgacatccccaacatggaggacgtactggctgtgaagagcttccgaatgcaaaataccctctacctttcccttacccgcttcatcggggactcccgggtcatgaggtggaacagtaagcagtttgtggagatccaagctcttccatcccggggggccatgaccctgcagcccttttcttttaaagataatcactacctggccctggggagtgactatacattctctcagatataccagtgggataaagagaagcagctattcaaaaagtttaaggagatttacgtgcaggcgcctcgttcattcacagctgtctccaccgacaggagagatttcttttttgcatccagtttcaaagggaaaacaaagatttttgaacatataattgttgacttaagtttgtgaaggtgtggtgggtgaaactaagagaaatgtagcattagctctcacaaaagaggaccaagaaaaatcaacaaacaaatcaaagccaggctcagagctctgaaattaaaaagcactgaaatagttagatgttttcaaacttttagaactcacattttaatcagggattgcatttattggctaactgcatgacatgcccattctaccatttaaaaaaaaatcttaaagcctgtaatttctgagaaaagagtacagcatttactcttatcatctagaaatgtaatatgcttcccccccgctttttgatgaggaagaagacaattggataagatgggacagcacttataatgaaataaaaaaaaactttgagcccctctcattccactttagcaatctttttggtaagaactcttaaagccaaaagtctgctgaaaagatttgctgattattagtttaaaaatcttgtaacactcagcagtgctattttgagtcatcccagtttcctgaaagtaatgcccagtcttcctgaatcctccttaatagcagaaccttggtgattttgttggctcatatgaatgcttgtcatggatatgttaacaatttagtgtttgacattgcttcctctgccacaaagacaatactctggtgacacatgtctagacccagcacaggctgtaggcccaggagtgactcaaaggagtttttccctctttcttacggttcaaaggtgaccctggtggtggccagagcagtaatgcttgtttgatgctcttcatggctcatctgcttctcagaacccacccgttgagtttgtgggtaaccagcaggcaggccaaagactggtgcttttcatttcatcctttagagggatgaaacagttatttccgtctgatgagcattcggtagaatttttgaagtgagattttatgaagtcaaaggggactttacacagatctcgacctgctttgaaacctagaggtggccctttgatttgtgcgtgtccttgccctctggacaacttaatatttcaagtaatcgaataccaacttccctgccagcccacctgccttccgccccgcttgtgtaacagtcctgttttgttgagttgctgctattgcactgccagtgcagcccacaccaaatcacaacccaagatactcagataggaagactccttcctctcccagtactttaccaaaggaacccccgccaggacccacatggggccacgtgttggcagtggaatcagcctgtgcaggctggggatctcaggctgatcagtaggggccagctttggagccagccaagctgaatcccacactccaggtctgtgctcaagagaccagatggtgtatttccaaatgggcctctctggtatgggcaataggcaagctcctggggtctggttatgtggaagattcttagtggatgttccgcctggttagctggttctcttcagagaatataaagtgaatgcctttaggggtagctctgaaagagaaacccaacaacttcattcctagccatgaaagtagcacgatcatattgtactgtattgttattgtaaaatgactatttgccatgtcatgagtaggtagatgttttgccacaaatatgaatgtgtttgttgtttcctgactttaagcaatgaagattgagacaataaatagcactcagag

SEQ ID NO: 15940 - DNA, 6428 bp, Homo sapiens
  source 1..6428: mol_type = unassigned DNA
gagtgggggtggcggccagcatgctgctcggctgcggctcggcctcccacacccgcggctccctagtcctcgccagcagcggcggcggcagagcagcgagcggcgcccgcgtctgcagcggcgccgggtccgagcgcgcggcgcggcggtgggggtcggggcccgggcggggagcggggaccgggcatggcgctgcggagaggcggctgcggagcgctcgggctgctgctgctgctgctgggcgccgcgtgcctgataccgcggagcgcgcaggtgaggcggctggcgcgctgccccgccacttgcagctgtaccaaggagtctatcatctgcgtgggctcttcctgggtgcccaggatcgtgccgggcgacatcagctccctgagcctggtaaatgggacgttttcagaaatcaaggaccgaatgttttcccatctgccttctctgcagctgctattgctgaattctaactcattcacgatcatccgggatgatgcttttgctggactttttcatcttgaatacctgttcattgaagggaacaaaatagaaaccatttcaagaaatgcctttcgtggcctccgtgacctgactcacctttctttggccaataaccacataaaagcactaccaagggatgtcttcagtgatttagactctctgattgaactagatttgaggggtaataaatttgaatgtgactgcaaagccaagtggctatacctgtggttgaagatgacaaattccaccgtttctgatgtgctgtgtattggtccaccagagtatcaggaaaagaagctaaatgacgtgaccagctttgactatgaatgcacaactacagattttgttgttcatcagactttaccctaccagtcggtttcagtggatacgttcaactccaagaacgatgtgtacgtggccatcgcgcagcccagcatggagaactgcatggtgctggagtgggaccacattgaaatgaatttccggagctatgacaacattacaggtcagtccatcgtgggctgtaaggccattctcatcgatgatcaggtctttgtggtggtagcccagctcttcggtggctctcacatttacaaatacgacgagagttggaccaaatttgtcaaattccaagacatagaggtctctcgcatttccaagcccaatgacatcgagctgtttcagatcgacgacgagacgttctttgtcatcgcagacagctcaaaggctggtctgtccacagtttataaatggaacagcaaaggattctattcttaccagtcactgcacgagtggttcagggacacggatgcggagtttgttgatatcgatggaaaatcgcatctcatcctgtccagccgctcccaggtccccatcatcctccagtggaataaaagctctaagaagtttgtcccccatggtgacatccccaacatggaggacgtactggctgtgaagagcttccgaatgcaaaataccctctacctttcccttacccgcttcatcggggactcccgggtcatgaggtggaacagtaagcagtttgtggagatccaagctcttccatcccggggggccatgaccctgcagcccttttcttttaaagataatcactacctggccctggggagtgactatacattctctcagatataccagtgggataaagagaagcagctattcaaaaagtttaaggagatttacgtgcaggcgcctcgttcattcacagctgtctccaccgacaggagagatttcttttttgcatccagtttcaaagggaaaacaaagatttttgaacatataattgttgacttaagtttgtgaaggtgtggtgggtgaaactaagagaaatgtagcattagctctcacaaaagaggaccaagaaaaatcaacaaacaaatcaaagccaggctcagagctctgaaattaaaaagcactgaaatagttagatgttttcaaacttttagaactcacattttaatcagggattgcatttattggctaactgcatgacatgcccattctaccatttaaaaaaaaatcttaaagcctgtaatttctgagaaaagagtacagcatttactcttatcatctagaaatgtaatatgcttcccccccgctttttgatgaggaagaagacaattggataagatgggacagcacttataatgaaataaaaaaaaactttgagcccctctcattccactttagcaatctttttggtaagaactcttaaagccaaaagtctgctgaaaagatttgctgattattagtttaaaaatcttgtaacactcagcagtgctattttgagtcatcccagtttcctgaaagtaatgcccagtcttcctgaatcctccttaatagcagaaccttggtgattttgttggctcatatgaatgcttgtcatggatatgttaacaatttagtgtttgacattgcttcctctgccacaaagacaatactctggtgacacatgtctagacccagcacaggctgtaggcccaggagtgactcaaaggagtttttccctctttcttacggttcaaaggtgaccctggtggtggccagagcagtaatgcttgtttgatgctcttcatggctcatctgcttctcagaacccacccgttgagtttgtgggtaaccagcaggcaggccaaagactggtgcttttcatttcatcctttagagggatgaaacagttatttccgtctgatgagcattcggtagaatttttgaagtgagattttatgaagtcaaaggggactttacacagatctcgacctgctttgaaacctagaggtggccctttgatttgtgcgtgtccttgccctctggacaacttaatatttcaagtaatcgaataccaacttccctgccagcccacctgccttccgccccgcttgtgtaacagtcctgttttgttgagttgctgctattgcactgccagtgcagcccacaccaaatcacaacccaagatactcagataggaagactccttcctctcccagtactttaccaaaggaacccccgccaggacccacatggggccacgtgttggcagtggaatcagcctgtgcaggctggggatctcaggctgatcagtaggggccagctttggagccagccaagctgaatcccacactccaggtctgtgctcaagagaccagatggtgtatttccaaatgggcctctctggtatgggcaataggcaagctcctggggtctggttatgtggaagattcttagtggatgttccgcctggttagctggttctcttcagagaatataaagtgaatgcctttaggggtagctctgaaagagaaacccaacaacttcattcctagccatgaaagtagcacgatcatattgtactgtattgttattgtaaaatgactatttgccatgtcatgagtaggtagatgttttgccacaaatatgaatgtgtttgttgtttcctgactttaagcaatgaagattgagacaataaatagcactcagagaatgaagcattgatgttacatcagcactcttgggtacattctgggactgtaggctgaggcttctagcctcagaaaccacggattttaatgaacgaactcacccacgcatagtagtgttgttacttgaaacttctgcaaaataccaagcaaacaggagaaaagtggtttgttttcatttttaagtgcaaattacttttcttctgcacttttttttccctcttggtttctttgaacaggctacaaatgcccaggtccccccattggaggctgaaagggaaagagctttgccattcctccagtcctaaagatggcaagctattctttctgttgcatggaaccactcagataaacctgggcagaaaaatgggtacttggcaaactgtaggagatatttagacagtcccagcaactatgccagatcaaagtgatgttcccaattccagccacctgtagagatggcaaggtggcatcttttcacagtgttgctactgcagagaggtatcacattcccagctgcccctctgagggtaaatgagcgactgaccccctgcactcactattctgctcacattgccagattctgggaaaccaggaaacacaggatgctgggcttaggatggggagagctgttgagtccagatggggaattaggaggtgaaagaacgatctaaacaggtgatgggtggggtgtgagaagggggtgacccactcaactgcaatcaggttttccttttttataatgttattttatacaagactaaagcctgtagtctacagagcgcctgtgctgtggaaggagatatttgttctggccaacttactaaaggagcatagatgttcttggcacggggtggtgatatctttgcttcattaatcttactgctccatcccaagaatccctgaagttttaaacaacttctgcaagaagcattcttccagtaataatgtaaaacaaaaaaccaaccaagcaacagcaaaaatgcaaagcagagaaatatgtggaccgtccccagtggagatcagcttgaaggagggggtggatctttcttctactttccctcccatcacccactgggtggtcgtctgctcagcttatttcttctttatgaactttgtggcgaggctcctggactgatccctctgtgcggccatgtggctttaaggcctttccttaaagggggcttgtccccatactccatggggtcgggaatgggtctattatcaagactctaaaaataactcttagacatgaagagcactgtgttattggacagtggatgataaggccaccttacatttagcaaagctttatatttttccaatgcacattagtactcacctcatttgttcataaatagctctgaagtttattgcagggcaggtattattctaatttcagagagaaggaaatagacatgaaaactatatgaattgcctgccatggttatccaatagggactggcaaagcaataactttccctctgatcagcagacattgtattttctttctaagacaccctgctatactctcccagagaaagactttcatttctagcatgattttgaatttggcagcaccttgagataaagtaaaaagtgcaataaaatatgcatagccagaagaaaaatcatactgaatagacaccattcaatcaactggtccatttaacaattaacaaacatgcaattgcatgccccactctttttacattcaaggccccactcttgaaagtggtccagaaattttggatagttttctgttgtactaaggaggatatctagctggtctggttgtttctccccctgcatagctatggggaggatgttgaggttgagacacatctggttcttgtcacattgtccaccagataaacaagaagagatctgtgaaggaaaaattcaaaacctgaatgcacgagtggtgatgaattgctctcggccgtcatcagccttcaggaagcacactggaaatggcagagttgcattttttcttccccatggagtgagagtctgtgtatttttaggaaagaaatcagcatgggatgccagaggtttggcggtcaggagtgctcatgatggaaatttctctggcctggggtataatgaaggtgagatgaagatctgcaggaggggagtctatttgcatgccacctaaagaaaacctcttaagctggcttcctgattcttctgcagaggtatcagcctctccttcgcagctgcggaaggaagttctttaattaggcagcggccaaagattctgttcaacagcttcctggagtggaatacaataatctagttgtatgcaatgatgcaattagaaagtggtccggatttgggtggcaatggaaggggaatggcaaagtggggcagatggctctggaggaaacttgggaaagtaaaaacaaactgaaagaaaaggaaaaaaggatgatgatttcttttgcctcagccaggcaagcagagggtagaatgaccaggaagattaacaacatctcaattattaatgaagagagccaactgtaatgctcattcaaataagaagcatattgtaaagctactgagatcgaaaccaagttattattatccttactgtattccattgcttgtatcaaaatctactttttttctagtaggaaactatgcattccctatcagtccctttgattatcaggaatgtataagaattgtgataaaataggccaatatgctatttggtaccatttgtatgtattttaagtgcataacctaggtaaaataagaatagtttctatgtgtaaagaagcaagttttacagtatgcagactacagtggatgtattttaggctgtatacatatttagctctttttggtaaatagggtatacaaactatatgcctcttaattcaatatattcggtaagcctatgaataaaaagtggttcatgcctaa

SEQ ID NO: 15941 - DNA, 3272 bp, Homo sapiens
  source 1..3272: mol_type = unassigned DNA
gcgcgcgcccccgccgcccgcgccgcagtccgcagccacccggcgcggtcagccccggctgcggctccagctccgcgctccgctcttctctcccgagccggatcgcgggagcgagcaggggaggggaccgcagccggcgcccgagggcaggaggagtccgcaggcgggcccctggctgcggtagcagctgccggtggcagggaggtgccagcccgcgcggggtggcccagccgcgggagcggtggggcgggggccgcggccgccggccccagggagagatcgcgggcagcatggcggggctgcgggccagggggggcccggggccggggctgctggcgctctccgcgctcggcttctgcctcatgctgcaagtcagcgctaagaggccccccaagacgcccccctgcccgcccagctgctcttgcaccagggacaccgccttctgcgtggactcaaaggcggtgcccaggaacctgccctcggaggtcatctccctgaccctggtgaatgccgccttctcagagatccaggatggagcgttctcccacctcccgctgctgcagttcttgttactcaactccaacaagtttacactgattggagacaacgccttcacaggactgtcgcacctgcagtatctcttcattgagaacaatgacatctgggcactatccaagttcaccttccgaggactcaagtccttgactcacctctcgctggccaacaataacctgcagacactgcccagagacatcttccggcccctggacatcctgaatgacttggacctgcggggcaactcactcaactgtgactgcaaggtgaagtggttggtggagtggctggcacacaccaacaccacggtggcacccatctactgcgccagcccgccccgcttccaggagcacaaggtgcaggacctgccgctgcgggagttcgattgcatcaccacagattttgtgttgtaccagaccctggccttcccagcagtgtcggctgagcccttcctctactccagtgacctctatttggctctggcccagccaggagtcagtgcctgcaccatcctgaagtgggactatgttgagcggcagcttcgagactatgatagaatcccagccccctctgcagtgcactgcaagccgatggtggtggacagccagctgtacgtggtcgtggcccagctgtttggcggctcttacatttaccactgggatcccaacaccacgcgcttcaccaggctgcaagacattgacccgcagcgcgtgcgcaagcctaacgacctagaagccttccgcatcgacggtgactggtactttgccgtggctgacagctccaaggcaggcgccaccagcctctaccgctggcaccagaatggcttctactcccaccaggcactgcacccctggcaccgtgacaccgacctggagtttgtggacggcgagggcaagccacggctgattgtgtccagcagctcccaggcacccgtcatctatcagtggagtcgcacccagaagcagtttgtggcccagggtgaggtgacccaggtgcctgatgcccaagctgtgaaacactttcgtgccggccgcgacagctacctgtgcctcagccgctacattggcgactccaagatcctgcgctgggagggtacccgcttctcggaggtgcaggccctgccctcccggggctcgctggccctgcagcccttccttgtgggtggccgccgctacctggcactgggcagtgatttctccttcacccagatctaccagtgggatgagggacgacagaagtttgtacggttccaggagctggctgtgcaggctcctcgggccttctgctacatgcctgctggggacgcccagctactcctggcccccagcttcaagggacagacgctggtgtatagacacattgtggtggatctcagtgcctagggggtgccgaggcctctggtctcctcagggtggccactggaggatgggtgggggcctctgtgagcaccacgtatgcctgtgtgaagacaagcgaccaacctgcattcatgcccttgtatccgcacacgcccagtgtgtacaggcgcaccccgtggactggcccaggaggacgtgcatcatcactgcaatcagcatgaacaccaggcacccctgggacacctaacgcccagttcccgtgaccccaactgcaggccccccctactctgcagcctttcccatgctctgccccctgtctcatgcacgagtggtgcggggtgctgggagcgaggggggccgcatcctcctgtccttgtgcttctccttctgcccctctggtctttcctgttggtgctccaggcattgtttacctgctcttgctccccgctgtagcccacagccatatctgtcatgcttccccggggccactcacccctgccccaccccgtctgcatgctcacatggacgcggacggacacactcattacacactcacacgccccgactgcacccggtgtccatctataaacatgtcagggcacgtgtgcatacaagcagattcagcactgcctaccaggctctcctgttaccttgcctctctgcttggagggggccccctctgctcacccccagcgtgccccccccggaactgataaggatgagaatggtggtgccagcttctgagggcctgcttggcctcctgggggcaaagcccctctgcccgaagcaataacaacagcagcagaagcaatcccggggagctgccaggggtgtctgtctctgttctccttggcgtttccttcatggccgtgaatcccagctcacccatggacagaagacctcccctcatctgaaagcctttctgccttccttcctgtagctgtcgctttctcaggcttggactgtcccctggttcaccctgtctttgggatgtggcccttgagctgggcgggctccttgggtggattagagagctggccgagctgcaagcacctgagttacctgcgagggtgcccagagtggagcttggcctgagggcgtgttgcagccctggccccaccagtccacagaggcccccaggagcactgcctttcagtggaccgggtggggcctggtgggaggggccccactagctgagcttctgctgccctctgctgtctgctgagatgccaggctagtggagagggcacaccatgtgcccaaatggtgtgatgctccttgtagcaggataccagggtactggggggcaatgctatgattaacttgcttcaaataaaaagttcccgccccataaccggc

SEQ ID NO: 15942 - DNA, 2814 bp, Homo sapiens
  source 1..2814: mol_type = unassigned DNA
gccgggtgtccagcgaacccctttcccaaaccttcggggagaagggaggtgggaggaggcaaagaaactacaggcagggagctggaagggggggtggggggggcaggagacaagaaatcaagacaccaggcagcaggacacacacacactcacatacactcacacacatagagaccaacagatagacagctacctaaagcctgaaagactgacagcaacacagaaaaaaagaaacaggcagaaagagagacaaagacagaaatagaaacagactaacacacagagtcaaaaatacagagacagaaagacagggagaaagagaaacagaaaattagacaccaaagacatacgaacagggaggaaggccgactgaaagaaagacggagaagaggagagagaagccagggccgagcgtgccagcaggcggatggagggcggcctggtggaggaggagacgtagtggcctgggctgagctgggtgggccgggagaagcgggtgcctcagagtgggggtgggggcatgggaggggcaggcattctgctgctgctgctggctggggcgggggtggtggtggcctggagacccccaaagggaaagtgtcccctgcgctgctcctgctctaaagacagcgccctgtgtgagggctccccggacctgcccgtcagcttctctccgaccctgctgtcactctcactcgtcaggacgggagtcacccagctgaaggccggcagcttcctgagaattccgtctctgcacctgctcctcttcacctccaactccttctccgtgattgaggacgatgcatttgcgggcctgtcccacctgcagtacctcttcatcgaggacaatgagattggctccatctctaagaatgccctcagaggacttcgctcgcttacacacctaagcctggccaataaccatctggagaccctccccagattcctgttccgaggcctggacacccttactcatgtggacctccgcgggaacccgttccagtgtgactgccgcgtcctctggctcctgcagtggatgcccaccgtgaatgccagcgtggggaccggcgcctgtgcgggccccgcctccctgagccacatgcagctccaccacctcgaccccaagactttcaagtgcagagccatagagctgtcctggttccagacggtgggggagtcggcactgagcgtagagcccttctcctaccaaggggagcctcacattgtgctggcacagcccttcgccggccgctgcctgattctctcctgggactacagcctgcagcgcttccggcccgaggaagagctgcccgcggcctccgtggtgtcctgcaagccactggtgctgggcccgagcctcttcgtgctggctgcccgcctgtgggggggctcacagctgtgggcccggcccagtcccggcctgcgcctggccccaacgcagaccctggccccgcggcggctgctgcggcccaatgacgccgagctcctgtggctggaagggcaaccctgcttcgtggtggccgatgcctccaaggcgggcagcaccacgctgctgtgccgcgacgggcccggcttttacccgcaccagagcctgcacgcctggcaccgggacacggacgctgaggccctggagctggacggccggccccacctgctgctggcctcggcttcccagcggcccgtgctcttccactggaccggtggccgcttcgagagacgcacagacatccccgaggccgaggatgtctatgccacacgccacttccaggctggtggggacgtgttcctgtgcctcacacgctacattggggactccatggtcatgcgctgggacggctccatgtttcgtctgctgcagcaacttccctcgcgcggtgcccacgtcttccagccactgctcatcgccagggaccagctggccatcctaggcagcgacttcgccttcagccaggtcctccgccttgagcctgacaaggggctcctggagccactgcaggagctggggcctccggccctggtggccccccgtgcctttgcccacatcactatggccggcagacgcttcctctttgctgcttgctttaagggccccacacagatctaccagcatcacgagatcgacctcagtgcctgagaccaccaacgggactctgggcatggctggggcccctggacggccccttggctggctcctggccctacttggggtgatggcccgcctgtgagctgctgaccgtgggccacgttcatcagccacacgtctaggccttaagcccacttcttaaaggatctgcacccatggggggacatagagggtcccagcctactggacctcccgagctgcccttcaggtctaaagcaacatctggacatctcggctggggcagattccccatcaaaggcaacctggggggtgcaggctggtgcactgcatggagtcgaggtggaggtcacgtgcagagctccatgaggtcccggagcccccctctcaacccgctcctaccccgctggtccctctgaaagcaccgaggggttgatggcattcctttcccattctaaactccacgcagccaatcgctttcctggaggagcgccaacctcgaagacaactcagcactgggcgggttcccctctgctgcttgtgcgcatgcgtgcggccgcccagcaagctgtgccttttgcgcctcttgcgcgtgcgccggggcacagggagggacagcgggaggtgtcgcggggagcctggtgcccttctagatgggcgacggaggcaaggacaagacgagtccgagctcaataaatgcgctgtgcaccctc

SEQ ID NO: 15943 - DNA, 2891 bp, Homo sapiens
  source 1..2891: mol_type = unassigned DNA
gccgggtgtccagcgaacccctttcccaaaccttcggggagaagggaggtgggaggaggcaaagaaactacaggcagggagctggaagggggggtggggggggcaggagacaagaaatcaagacaccaggcagcaggacacacacacactcacatacactcacacacatagagaccaacagatagacagctacctaaagcctgaaagactgacagcaacacagaaaaaaagaaacaggcagaaagagagacaaagacagaaatagaaacagactaacacacagagtcaaaaatacagagacagaaagacagggagaaagagaaacagaaaattagacaccaaagacatacgaacagggaggaaggccgactgaaagaaagacggagaagaggagagagaagccagggccgagcgtgccagcaggcggatggagggcggcctggtggaggaggagacgtagtggcctgggctgagctgggtgggccgggagaagcgggtgcctcagagtgggggtgggggcatgggaggggcaggcattctgctgctgctgctggctggggcgggggtggtggtggcctggagacccccaaagggaaagtgtcccctgcgctgctcctgctctaaagacagcgccctgtgtgagggctccccggacctgcccgtcagcttctctccgaccctgctgtcactctcactcgtcaggacgggagtcacccagctgaaggccggcagcttcctgagaattccgtctctgcacctgctcctcttcacctccaactccttctccgtgattgaggacgatgcatttgcgggcctgtcccacctgcagtacctcttcatcgaggacaatgagattggctccatctctaagaatgccctcagaggacttcgctcgcttacacacctaagcctggccaataaccatctggagaccctccccagattcctgttccgaggcctggacacccttactcatgtggacctccgcgggaacccgttccagtgtgactgccgcgtcctctggctcctgcagtggatgcccaccgtgaatgccagcgtggggaccggcgcctgtgcgggccccgcctccctgagccacatgcagctccaccacctcgaccccaagactttcaagtgcagagccatagagctgtcctggttccagacggtgggggagtcggcactgagcgtagagcccttctcctaccaaggggagcctcacattgtgctggcacagcccttcgccggccgctgcctgattctctcctgggactacagcctgcagcgcttccggcccgaggaagagctgcccggtgagccccctccccgtccttctgcctgtccagcagcctgcctggctggcctgacctgcctccccacctccccacagcggcctccgtggtgtcctgcaagccactggtgctgggcccgagcctcttcgtgctggctgcccgcctgtgggggggctcacagctgtgggcccggcccagtcccggcctgcgcctggccccaacgcagaccctggccccgcggcggctgctgcggcccaatgacgccgagctcctgtggctggaagggcaaccctgcttcgtggtggccgatgcctccaaggcgggcagcaccacgctgctgtgccgcgacgggcccggcttttacccgcaccagagcctgcacgcctggcaccgggacacggacgctgaggccctggagctggacggccggccccacctgctgctggcctcggcttcccagcggcccgtgctcttccactggaccggtggccgcttcgagagacgcacagacatccccgaggccgaggatgtctatgccacacgccacttccaggctggtggggacgtgttcctgtgcctcacacgctacattggggactccatggtcatgcgctgggacggctccatgtttcgtctgctgcagcaacttccctcgcgcggtgcccacgtcttccagccactgctcatcgccagggaccagctggccatcctaggcagcgacttcgccttcagccaggtcctccgccttgagcctgacaaggggctcctggagccactgcaggagctggggcctccggccctggtggccccccgtgcctttgcccacatcactatggccggcagacgcttcctctttgctgcttgctttaagggccccacacagatctaccagcatcacgagatcgacctcagtgcctgagaccaccaacgggactctgggcatggctggggcccctggacggccccttggctggctcctggccctacttggggtgatggcccgcctgtgagctgctgaccgtgggccacgttcatcagccacacgtctaggccttaagcccacttcttaaaggatctgcacccatggggggacatagagggtcccagcctactggacctcccgagctgcccttcaggtctaaagcaacatctggacatctcggctggggcagattccccatcaaaggcaacctggggggtgcaggctggtgcactgcatggagtcgaggtggaggtcacgtgcagagctccatgaggtcccggagcccccctctcaacccgctcctaccccgctggtccctctgaaagcaccgaggggttgatggcattcctttcccattctaaactccacgcagccaatcgctttcctggaggagcgccaacctcgaagacaactcagcactgggcgggttcccctctgctgcttgtgcgcatgcgtgcggccgcccagcaagctgtgccttttgcgcctcttgcgcgtgcgccggggcacagggagggacagcgggaggtgtcgcggggagcctggtgcccttctagatgggcgacggaggcaaggacaagacgagtccgagctcaataaatgcgctgtgcaccctc

SEQ ID NO: 15944 - DNA, 2891 bp, Homo sapiens
  source 1..2891: mol_type = unassigned DNA
agtcccttcccccaaggccgaccttctcatggcctctgaccccctcctccttcccatcctactctgccgggtgtgccgggtgtccagcgaacccctttcccaaaccttcggggagaagggaggtgggaggaggcaaagaaactacaggcagggagctggaagggggggtggggggggcaggagacaagaaatcaagacaccaggcagcaggacacacacacactcacatacactcacacacatagagaccaacagatagacagctacctaaagcctgaaagactgacagcaacacagaaaaaaagaaacaggcagaaagagagacaaagacagaaatagaaacagactaacacacagagtcaaaaatacagagacagaaagacagggagaaagagaaacagaaaattagacaccaaagacatacgaacagggaggaaggccgactgaaagaaagacggagaagaggagagagaagccagggccgagcgtgccagcaggcggatggagggcggcctggtggaggaggagacgtagtggcctgggctgagctgggtgggccgggagaagcgggtgcctcagagtgggggtgggggcatgggaggggcaggcattctgctgctgctgctggctggggcgggggtggtggtggcctggagacccccaaagggaaagtgtcccctgcgctgctcctgctctaaagacagcgccctgtgtgagggctccccggacctgcccgtcagcttctctccgaccctgctgtcactctcactcgtcaggacgggagtcacccagctgaaggccggcagcttcctgagaattccgtctctgcacctgctcctcttcacctccaactccttctccgtgattgaggacgatgcatttgcgggcctgtcccacctgcagtacctcttcatcgaggacaatgagattggctccatctctaagaatgccctcagaggacttcgctcgcttacacacctaagcctggccaataaccatctggagaccctccccagattcctgttccgaggcctggacacccttactcatgtggacctccgcgggaacccgttccagtgtgactgccgcgtcctctggctcctgcagtggatgcccaccgtgaatgccagcgtggggaccggcgcctgtgcgggccccgcctccctgagccacatgcagctccaccacctcgaccccaagactttcaagtgcagagccatagagctgtcctggttccagacggtgggggagtcggcactgagcgtagagcccttctcctaccaaggggagcctcacattgtgctggcacagcccttcgccggccgctgcctgattctctcctgggactacagcctgcagcgcttccggcccgaggaagagctgcccgcggcctccgtggtgtcctgcaagccactggtgctgggcccgagcctcttcgtgctggctgcccgcctgtgggggggctcacagctgtgggcccggcccagtcccggcctgcgcctggccccaacgcagaccctggccccgcggcggctgctgcggcccaatgacgccgagctcctgtggctggaagggcaaccctgcttcgtggtggccgatgcctccaaggcgggcagcaccacgctgctgtgccgcgacgggcccggcttttacccgcaccagagcctgcacgcctggcaccgggacacggacgctgaggccctggagctggacggccggccccacctgctgctggcctcggcttcccagcggcccgtgctcttccactggaccggtggccgcttcgagagacgcacagacatccccgaggccgaggatgtctatgccacacgccacttccaggctggtggggacgtgttcctgtgcctcacacgctacattggggactccatggtggtcatgcgctgggacggctccatgtttcgtctgctgcagcaacttccctcgcgcggtgcccacgtcttccagccactgctcatcgccagggaccagctggccatcctaggcagcgacttcgccttcagccaggtcctccgccttgagcctgacaaggggctcctggagccactgcaggagctggggcctccggccctggtggccccccgtgcctttgcccacatcactatggccggcagacgcttcctctttgctgcttgctttaagggccccacacagatctaccagcatcacgagatcgacctcagtgcctgagaccaccaacgggactctgggcatggctggggcccctggacggccccttggctggctcctggccctacttggggtgatggcccgcctgtgagctgctgaccgtgggccacgttcatcagccacacgtctaggccttaagcccacttcttaaaggatctgcacccatggggggacatagagggtcccagcctactggacctcccgagctgcccttcaggtctaaagcaacatctggacatctcggctggggcagattccccatcaaaggcaacctggggggtgcaggctggtgcactgcatggagtcgaggtggaggtcacgtgcagagctccatgaggtcccggagcccccctctcaacccgctcctaccccgctggtccctctgaaagcaccgaggggttgatggcattcctttcccattctaaactccacgcagccaatcgctttcctggaggagcgccaacctcgaagacaactcagcactgggcgggttcccctctgctgcttgtgcgcatgcgtgcggccgcccagcaagctgtgccttttgcgcctcttgcgcgtgcgccggggcacagggagggacagcgggaggtgtcgcggggagcctggtgcccttctagatgggcgacggaggcaaggacaagacgagtccgagctcaataaatgcgctgtgcaccctc

SEQ ID NO: 15945 - DNA, 3245 bp, Homo sapiens
  source 1..3245: mol_type = unassigned DNA
ccgcagtccttagcttcccggggacaggaaaccttcaagaccgagctgccacggccgcctccccgcccgccccccattctacgcgcctgcccacaccctcctcccctccttccagcgcctttcggtggagcactgcggcactcagcccgagctgccgttttcccctcgcggggaacgctgtgacccccccgcaggagcggcggggcggggtgggggggcccgggagaagatggcgacgccgggaagcgaaccccaacctttcgtcccggccctttcggtagctactctgcacccacttcatcatccccaccaccaccaccaccaccatcagcaccacggaggaaccggcgcccccggcggggcgggtggtggcggcggtggcagcgggggcttcaacctgcccttgaaccggggtctggagcgcgcgcttgaggaggcggccaactccggggggctgaacctgagcgccaggaaattgaaggaatttccccgtaccgcagcccccgggcacgacctctcggacacggtgcaggcagacttatctaaaaacagactggttgaagttccaatggaattgtgccattttgtatcactggaaattcttaatctgtatcacaactgtatcagagtcattcctgaggccatcgttaatctgcagatgctgacttacctgaacttgagtcgaaatcagctgtccgccctgcctgcctgcctgtgtggtctgcctctcaaagtcttaatcgcaagtaacaacaaacttggatcattaccagaagagataggtcagctcaaacagttaatggagctggatgtcagctgcaacgagatcacagcgttgccccagcagataggtcagttgaaatctctacgagaactgaatgtcagaagaaattaccttaaagttttaccacaagaactagtagatctttccttggtaaagtttgacttttcctgcaacaaagtgctcgtgattccaatttgttttagagagatgaagcagctgcaagtgttactacttgagaataaccctctgcagtctcctccagcacagatttgcacaaagggcaaagttcacatatttaagtatctgagcatacaagcatgccagattaagacagctgactccctttatctccacaccatggagaggccacatttacaccagcacgtggaagatggcaagaaggattctgattcgggagttggaagtgataatggagataagcgattatctgccaccgagccttctgacgaagacactgttagcctcaatgtgccaatgtcaaacatcatggaagaagaacagatcatcaaggaggactcgtgccatcgccttagccccgttaaaggggaatttcatcaggaatttcaaccggagccttcccttttgggtgacagcaccaactcaggagaagaaagagaccagtttactgatagagcagatggtctccattcggaatttatgaactataaggcaagggcagaagactgtgaagagctgttacggatagaagaggatgtgcactggcaaactgagggcataataagttcatccaaagatcaggacatggatatagcaatgatcgagcagctgagagaagcagtagatttgctgcaagatcccaatggattaagcacagatattacagagagaagtgttttaaacctatatcctatgggatcagcagaagccttagaattacaagattctgcactgaatggtcaaatacagctggagacatctccggtgtgtgaggtgcaaagtgatctaacattacagagtaacgggagccagtattctccaaatgagattagagagaactcccctgcagtctctcctaccacaaacagcacagctccatttggcctgaagcctcgatcagtgtttctaagacctcagagaaatttggaatctatagacccgcagtttacaatccggaggaaaatggagcagatgagagaagagaaagagctggtggaacaacttcgtgagagcattgagatgagattgaaggtcagtctacacgaagacctgggggcagccctcatggatggtgtcgtcctctgccatctggtcaaccacatccgcccacggtcggttgcaagcatccatgtcccatcaccagcggttcccaaacttagcatggccaaatgcagaagaaatgtggaaaactttttggaagcatgccgaaaattaggagtaccagaggaaaagctatgtctcccccaccacatccttgaagaaaaaggcctggtcaaagtgggcattaccattcaagcattactagacatcaccgtaacgaaggctctgttcacatgaaactaccccttctccattgggggctcagactctgctctcatccaggatcctgaactctgctccaggcacctgttcaaccctctctcccacccactgcctgtcacttcactgactccagttacattgaaacaattttcagtctaagggaggattttctacctttcagagctgacctccgactttaagacttgacaggtatttatcttgaaaccagagagggagctggaggaaaaaaaaactgagcagcacatcaatgccttttccaccctccttcatcctttccacactcaccgactgccattaccaaaacgccaagcacaaccgttttgcagcaagacgcattcgttttattaaaaccaaactcgttatgtatttagtggggggaggggggcacaatcaggtttttcaccaccaaatttttcgagaggtttcttgagaccattgccttttaaaaaactattttcgacatacaaaatatttatataaatattatttattagtgagttgttattcatcctttggatgcaaattgtaaattaggaaactattttattactgcttttttgtggttaaacactttattttaatataaatgttgagttattttctatcctctttggtgtgcggtagtttaggtctcagtaatgtttctggtatatatgattccaaaaaaaagcgaaaaacaggtgcttttaggacacaacttttctggggaggcaatattgacactttggtttgtggaacgttggtcttatttatatttctgcattccatccagtttcctacattccagcagccctctgtcccccaatataatgaactgactaaaatcaagagagcaccccaaagttatttgtaaatagctgtgatggaaaaaaaaaagacatattaaacttgaagctaaaatgtgaacaattattttttg

SEQ ID NO: 15946 - DNA, 4131 bp, Homo sapiens
  source 1..4131: mol_type = unassigned DNA
cttcaagaccgagctgccacggccgcctccccgcccgccccccattctacgcgcctgcccacaccctcctcccctccttccagcgcctttcggtggagcactgcggcactcagcccgagctgccgttttcccctcgcggggaacgctgtgacccccccgcaggagcggcggggcggggtgggggggcccgggagaagatggcgacgccgggaagcgaaccccaacctttcgtcccggccctttcggtagctactctgcacccacttcatcatccccaccaccaccaccaccaccatcagcaccacggaggaaccggcgcccccggcggggcgggtggtggcggcggtggcagcgggggcttcaacctgcccttgaaccggggtctggagcgcgcgcttgaggaggcggccaactccggggggctgaacctgagcgccaggaaattgaaggaatttccccgtaccgcagcccccgggcacgacctctcggacacggtgcaggcagacttatctaaaaacagactggttgaagttccaatggaattgtgccattttgtatcactggaaattcttaatctgtatcacaactgtatcagagtcattcctgaggccatcgttaatctgcagatgctgacttacctgaacttgagtcgaaatcagctgtccgccctgcctgcctgcctgtgtggtctgcctctcaaagtcttaatcgcaagtaacaacaaacttggatcattaccagaagagataggtcagctcaaacagttaatggagctggatgtcagctgcaacgagatcacagcgttgccccagcagataggtcagttgaaatctctacgagaactgaatgtcagaagaaattaccttaaagttttaccacaagaactagtagatctttccttggtaaagtttgacttttcctgcaacaaagtgctcgtgattccaatttgttttagagagatgaagcagctgcaagtgttactacttgagaataaccctctgcagtctcctccagcacagatttgcacaaagggcaaagttcacatatttaagtatctgagcatacaagcatgccagattaagacagctgactccctttatctccacaccatggagaggccacatttacaccagcacgtggaagatggcaagaaggattctgattcgggagttggaagtgataatggagataagcgattatctgccaccgagccttctgacgaagacactgttagcctcaatgtgccaatgtcaaacatcatggaagaagaacagatcatcaaggaggactcgtgccatcgccttagccccgttaaaggggaatttcatcaggaatttcaaccggagccttcccttttgggtgacagcaccaactcaggagaagaaagagaccagtttactgatagagcagatggtctccattcggaatttatgaactataaggcaagggcagaagactgtgaagagctgttacggatagaagaggatgtgcactggcaaactgagggcataataagttcatccaaagatcaggacatggatatagcaatgatcgagcagctgagagaagcagtagatttgctgcaagatcccaatggattaagcacagatattacagagagaagtgttttaaacctatatcctatgggatcagcagaagccttagaattacaagattctgcactgaatggtcaaatacagctggagacatctccggtgtgtgaggtgcaaagtgatctaacattacagagtaacgggagccagtattctccaaatgagattagagagaactcccctgcagtctctcctaccacaaacagcacagctccatttggcctgaagcctcgatcagtgtttctaagacctcagagaaatttggaatctatagacccgcagtttacaatccggaggaaaatggagcagatgagagaagagaaagagctggtggaacaacttcgtgagagcattgagatgagattgaaggtcagtctacacgaagacctgggggcagccctcatggatggtgtcgtcctctgccatctggtcaaccacatccgcccacggtcggttgcaagcatccatgtcccatcaccagcggttcccaaacttagcatggccaaatgcagaagaaatgtggaaaactttttggaagcatgccgaaaattaggagtaccagaggctgacctctgctctccgtgtgacatcctgcagttggattttcgtcacattcgaaagactgttgacactctgctggcactcggggagaaagccccaccaccaacttctgccctccgctccagggaccttataggcttctgtcttgtccatattctctttatagtgctggtctatatcacttaccactggaatgctctgtccgcataatgtctgcacgtgcatccaaacgctgtgctctgtcgccctcaacctttgcagggtccttcctacctttgagcctttgccttgcaaacttccatccctgtcatgtcttcagttatctctcgagttttgaagctgaacagtagcaaatcagattttccagaagcacaaactttgtagaatacagtttagtataattcctctcacttactgaaatacaacgacgacgactgcaaagtgtatgcacaccgcatgcttcctcatccacatagtgccagcagcagtgccacgcagttcctcctctccctcccggtgagctgctgccctgggcagaggggaggagaattccaggacaagagtgtcaaggacagggatttagcatatggaagtctttcctttgggtcagtattgaactagaattctaattcgggactgggcaattgagctgtataggggccaccttgcagggaggacagaaaactaacattttggcccaacttgatctatacaaaactttaataataccactactgaccaagttggacgtgtacacgtactcacactgccttgatggccattcgattggattcctcccaaatttcctaaaaagggagccgcgaagggcgctgggcagtgtggccgccaacttccaccccggcaagcccctctgtcctatgcagaagggcgctcaagggaaggaagtgtcgttgctgttagagcctcacgtggaggagtcacttaaacaccagttttttactgcttaattccttgttaggtcttctcttgaggctcttagaaaagcgttttccagagagatttctatttttgaacaatggaacggatcactgcttttttgccacatcacatagtaactgccggtccagaatgtgacggattcgactctattcattttcaaataaagccatgagccgtggaacattcttggtcctggtgcttgggttatgatggcaggagtcaagaagaagattactttcattctagaagaatgtagtttctctaattatttgaaatgttcatttagcctttgattttcactgatattaactagcaaactgctttaagtcagctcaaaggattatatagtaactatatctgcatttggagcaatgtgatcagtttgcatttaaaaggaaaaaaaagaattttatcttagccagaatgtccctggattcaggggtgtctttgtataatatgagagggccttgttccaaggtcaaggcagcctccttattttacatgctgtttgccaaatcttgtttcttagcttggggagatgatggacttagcttcctcaagataaatttctagtttattaagatgcaaacagctctcatagatggctactacgaagaaaatcttatttttctgaacattttcatgaatccaggggacttgaaaatatggaagacccacatagttagaagaatatatttataaagattccttgctgctaagtcagatcagatttgctaacaggaagcattctttacatgacagtatcttgagttatgtgagttttttttcctcctgactttgtgttgattggtgaaatgcagggtatgtggaagttatctaattaacctcagttgtatatgaataacccacagatgtactgaattacttttggtgctatcttgtactcttcaatctgtaacacaataaaatccctttgtacgatgtctaatgagcaccctgagccataaattgcttaataaacacattttgggtgatt

SEQ ID NO: 15947 - DNA, 3314 bp, Homo sapiens
  source 1..3314: mol_type = unassigned DNA
acaccctcctcccctccttccagcgcctttcggtggagcactgcggcactcagcccgagctgccgttttcccctcgcggggaacgctgtgacccccccgcaggagcggcggggcggggtgggggggcccgggagaagatggcgacgccgggaagcgaaccccaacctttcgtcccggccctttcggtagctactctgcacccacttcatcatccccaccaccaccaccaccaccatcagcaccacggaggaaccggcgcccccggcggggcgggtggtggcggcggtggcagcgggggcttcaacctgcccttgaaccggggtctggagcgcgcgcttgaggaggcggccaactccggggggctgaacctgagcgccaggaaattgaaggaatttccccgtaccgcagcccccgggcacgacctctcggacacggtgcaggcagacttatctaaaaacagactggttgaagttccaatggaattgtgccattttgtatcactggaaattcttaatctgtatcacaactgtatcagagtcattcctgaggccatcgttaatctgcagatgctgacttacctgaacttgagtcgaaatcagctgtccgccctgcctgcctgcctgtgtggtctgcctctcaaagtcttaatcgcaagtaacaacaaacttggatcattaccagaagagataggtcagctcaaacagttaatggagctggatgtcagctgcaacgagatcacagcgttgccccagcagataggtcagttgaaatctctacgagaactgaatgtcagaagaaattaccttaaagttttaccacaagaactagtagatctttccttggtaaagtttgacttttcctgcaacaaagtgctcgtgattccaatttgttttagagagatgaagcagctgcaagtgttactacttgagaataaccctctgcagtctcctccagcacagatttgcacaaagggcaaagttcacatatttaagtatctgagcatacaagcatgccagattaagacagctgactccctttatctccacaccatggagaggccacatttacaccagcacgtggaagatggcaagaaggattctgattcgggagttggaagtgataatggagataagcgattatctgccaccgagccttctgacgaagacactgttagcctcaatgtgccaatgtcaaacatcatggaagaagaacagatcatcaaggaggactcgtgccatcgccttagccccgttaaaggggaatttcatcaggaatttcaaccggagccttcccttttgggtgacagcaccaactcaggagaagaaagagaccagtttactgatagagcagatggtctccattcggaatttatgaactataaggcaagggcagaagactgtgaagagctgttacggatagaagaggatgtgcactggcaaactgagggcataataagttcatccaaagatcaggacatggatatagcaatgatcgagcagctgagagaagcagtagatttgctgcaagatcccaatggattaagcacagatattacagagagaagtgttttaaacctatatcctatgggatcagcagaagccttagaattacaagattctgcactgaatggtcaaatacagctggagacatctccggtgtgtgaggtgcaaagtgatctaacattacagagtaacgggagccagtattctccaaatgagattagagagaactcccctgcagtctctcctaccacaaacagcacagctccatttggcctgaagcctcgatcagacccagccctcattcttcctcctatctccttcaacacacttacacaggcacagacatgggacagctctagctacagtgttccatctgaaggagacagtgacaatgtgtttctaagacctcagagaaatttggaatctatagacccgcagtttacaatccggaggaaaatggagcagatgagagaagagaaagagctggtggaacaacttcgtgagagcattgagatgagattgaaggtcagtctacacgaagacctgggggcagccctcatggatggtgtcgtcctctgccatctggtcaaccacatccgcccacggtcggttgcaagcatccatgtcccatcaccagcggttcccaaacttagcatggccaaatgcagaagaaatgtggaaaactttttggaagcatgccgaaaattaggagtaccagaggctgacctctgctctccgtgtgacatcctgcagttggattttcgtcacattcgaaagactgttgacactctgctggcactcggggagaaagccccaccaccaacttctgccctccgctccagggaccttataggcttctgtcttgtccatattctctttatagtgctggtctatatcacttaccactggaatgctctgtccgcataatgtctgcacgtgcatccaaacgctgtgctctgtcgccctcaacctttgcagggtccttcctacctttgagcctttgccttgcaaacttccatccctgtcatgtcttcagttatctctcgagttttgaagctgaacagtagcaaatcagattttccagaagcacaaactttgtagaatacagtttagtataattcctctcacttactgaaatacaacgacgacgactgcaaagtgtatgcacaccgcatgcttcctcatccacatagtgccagcagcagtgccacgcagttcctcctctccctcccggtgagctgctgccctgggcagaggggaggagaattccaggacaagagtgtcaaggacagggatttagcatatggaagtctttcctttgggtcagtattgaactagaattctaattcgggactgggcaattgagctgtataggggccaccttgcagggaggacagaaaactaacattttggcccaacttgatctatacaaaactttaataataccactactgaccaagttggacgtgtacacgtactcacactgccttgatggccattcgattggattcctcccaaatttcctaaaaagggagccgcgaagggcgctgggcagtgtggccgccaacttccaccccggcaagcccctctgtcctatgcagaagggcgctcaagggaaggaagtgtcgttgctgttagagcctcacgtggaggagtcacttaaacaccagttttttactgcttaattccttgttaggtcttctcttgaggctcttagaaaagcgttttccagagagatttctatttttgaacaatggaacggatcactgcttttttgccacatcacatagtaactgccggtccagaatgtga

SEQ ID NO: 15948 - DNA, 5273 bp, Homo sapiens
  source 1..5273: mol_type = unassigned DNA
gctctctggccgcggcgtggggacagcgaggcgcactggggcctcccagcgcggggccggccgcgccgtccagcccgaggtctacggctttgcgctccgagcccagaggaagatgcctgccggcaccgagctcgggctgcggggctgaacgcctgtcttccaggcgcagcggcagcactgccctcggccggtgtcggtagcggcactcggcgtgccccgggcggacgaagagcgcaggctgggtacaccttgcccgaatcggcggagttcgcagctagcgcgggcgggccggccggcccggatgggcgcggggtttgcggcccccgccgggtgctccggagcggcccgggcaccgggggcacgctgagtgccggagccgcggccgcagagagaacttggggcgggggccatgccccggtgcggagtctagagccgagcggagcgccccgcgggcccgcccgcgtctgcggccgttcgggtcctcacagtccccgcgcccggagttcgcagcgcgctccagacaagatggcgcggccggtccggggagggctcggggccccgcgccgctcgccttgccttctccttctctggctgcttttgcttcggctggagccggtgaccgccgcggccggcccgcgggcgccctgcgcggccgcctgcacttgcgctggggactcgctggactgcggtgggcgcgggctggctgcgttgcccggggacctgccctcctggacgcggagcctaaacctgagttacaacaaactctctgagattgaccctgctggttttgaggacttgccgaacctacaggaagtgtacctcaataataatgagttgacagcggtaccatccctgggcgctgcttcatcacatgtcgtctctctctttctgcagcacaacaagattcgcagcgtggaggggagccagctgaaggcctacctttccttagaagtgttagatctgagtttgaacaacatcacggaagtgcggaacacctgctttccacacggaccgcctataaaggagctcaacctggcaggcaatcggattggcaccctggagttgggagcatttgatggtctgtcacggtcgctgctaactcttcgcctgagcaaaaacaggatcacccagcttcctgtaagagcattcaagctacccaggctgacacaactggacctcaatcggaacaggattcggctgatagagggcctcaccttccaggggctcaacagcttggaggtgctgaagcttcagcgaaacaacatcagcaaactgacagatggggccttctggggactgtccaagatgcatgtgctgcacctggagtacaacagcctggtagaagtgaacagcggctcgctctacggcctcacggccctgcatcagctccacctcagcaacaattccatcgctcgcattcaccgcaagggctggagcttctgccagaagctgcatgagttggtcctgtccttcaacaacctgacacggctggacgaggagagcctggccgagctgagcagcctgagtgtcctgcgtctcagccacaattccatcagccacattgcggagggtgccttcaagggactcaggagcctgcgagtcttggatctggaccataacgagatttcgggcacaatagaggacacgagcggcgccttctcagggctcgacagcctcagcaagctgactctgtttggaaacaagatcaagtctgtggctaagagagcattctcggggctggaaggcctggagcacctgaaccttggagggaatgcgatcagatctgtccagtttgatgcctttgtgaagatgaagaatcttaaagagctccatatcagcagcgacagcttcctgtgtgactgccagctgaagtggctgcccccgtggctaattggcaggatgctgcaggcctttgtgacagccacctgtgcccacccagaatcactgaagggtcagagcattttctctgtgccaccagagagtttcgtgtgcgatgacttcctgaagccacagatcatcacccagccagaaaccaccatggctatggtgggcaaggacatccggtttacatgctcagcagccagcagcagcagctcccccatgacctttgcctggaagaaagacaatgaagtcctgaccaatgcagacatggagaactttgtccacgtccacgcgcaggacggggaagtgatggagtacaccaccatcctgcacctccgtcaggtcactttcgggcacgagggccgctaccaatgtgtcatcaccaaccactttggctccacctattcacataaggccaggctcaccgtgaatgtgttgccatcattcaccaaaacgccccacgacataaccatccggaccaccaccatggcccgcctcgaatgtgctgccacaggtcacccaaaccctcagattgcctggcagaaggatggaggcacggatttccccgctgcccgtgagcgacgcatgcatgtcatgccggatgacgacgtgtttttcatcactgatgtgaaaatagatgacgcaggggtttacagctgtactgctcagaactcagccggttctatttcagctaatgccaccctgactgtcctagagaccccatccttggtggtccccttggaagaccgtgtggtatctgtgggagaaacagtggccctccaatgcaaagccacggggaaccctccgccccgcatcacctggttcaagggggaccgcccgctgagcctcactgagcggcaccacttgacccctgacaaccagctcctggtggttcagaacgtggtggcagaggatgcgggccgatatacctgtgagatgtccaacaccctgggcacggagcgagctcacagccagctgagcgtcctgcccgcagcaggctgcaggaaggatgggaccacggtaggcatcttcaccattgctgtcgtgagcagcatcgtcctgacgtcactggtctgggtgtgcatcatctaccagaccaggaagaagagtgaagagtacagtgtcaccaacacagatgaaaccgtcgtgccaccagatgttccaagctacctctcttctcaggggaccctttctgaccgacaagaaaccgtggtcaggaccgagggtggccctcaggccaatgggcacattgagagcaatggtgtgtgtccaagagatgcaagccactttccagagcccgacactcacagcgttgcctgcaggcagccaaagctctgtgctgggtctgcgtatcacaaagagccgtggaaagcgatggagaaagctgaagggacacctgggccacataagatggaacacggtggccgggtcgtatgcagtgactgcaacaccgaagtggactgttactccaggggacaagccttccacccccagcctgtgtccagagacagcgcacagccaagtgcgccaaatggcccggagccgggtgggagtgaccaagagcattctccacatcaccagtgcagcaggactgccgctgggtcctgccccgagtgccaagggtcgctctaccccagtaaccacgatagaatgctgacggctgtgaagaaaaagccaatggcatctctagatgggaaaggggattcttcctggactttagcaaggttgtatcacccggactccacagagctacagcctgcatcttcattaacttcaggcagtccagagcgcgcggaagcccagtacttgcttgtttccaatggccacctccccaaagcatgtgacgccagtcccgagtccacgccactgacaggacagctccccgggaaacagagggtgccactgctgttggcaccaaaaagctaggttttgtctacctcagttcttgtcataccaatctctacgggaaagagaggtaggagaggctgcgaggaagcttgggttcaagcgtcactcatctgtacatagttgtaactcccatgtggagtatcagtcgctcacaggacttggatctgaagcacagtaaacgcaagaggggatttgtgtacaaaaggcaaaaaaagtatttgatatcattgtacataagagttttcagagatttcatatatatcttttacagaggctattttaatctttagtgcatggttaacagaaaaaaattatacaattttgacaatattatttttcgtatcaggttgctgtttaattttggagggggtggggaaatagttctggtgccttaacgcatggctggaatttatagaggctacaaccacatttgttcacaggagtttttggtgcggggtgggaaggatggaaggccttggatttatattgcacttcatagacccctaggctgctgtgcggtgggactccacatgcgccggaaggagcttcaggtgagcactgctcatgtgtggatgcccctgcaacaggcttccctgtctgtagagccaggggtgcaagtgccatccacacttgcagtgaatggcttttccttttaggtttaagtcctgtctgtctgtaaggcgtagaatctgtccgtctgtaaggcgtagaatgagggttgttaatccatcacaagcaaaaggtcagaacagttaaacactgcctttcctcctcctcttattttatgataaaagcaaatgtggccttctcagtatcattcgattgctatttgagacttttaaattaaggtaaaggctgctggtgttggtacctgtggatttttctatactgatgttttcgttttgccaatataatgagtattacattggccttgggggacagaaaggaggaagttctgacttttcagggctaccttatttctactaaggacccagagcaggcctgtccatgccattccttcgcacagatgaaactgagctgggactggaaaggacagcccttgacctgggttctgggtataatttgcacttttgagactggtagctaaccatcttatgagtgccaatgtgtcatttagtaaaacttaaatagaaacaaggtccttcaaatgttcctttggccaaaagctgaagggagttactgagaaaatagttaacaattactgtcaggtgtcatcactgttcaaaaggtaagcacatttagaattttgttcttgacagttaactgactaatcttacttccacaaaatatgtgaatttgctgcttctgagaggcaatgtgaaagagggagtattacttttatgtacaaagttatttatttatagaaattttggtacagtgtacattgaaaaccatgtaaaatattgaagtgtctaacaaatggcattgaagtgtctttaataaaggttcatttataaatgtca

SEQ ID NO: 15949 - DNA, 4456 bp, Homo sapiens
  source 1..4456: mol_type = unassigned DNA
aacctgagttacaacaaactctctgagattgaccctgctggttttgaggacttgccgaacctacaggaagtgtacctcaataataatgagttgacagcggtaccatccctgggcgctgcttcatcacatgtcgtctctctctttctgcagcacaacaagattcgcagcgtggaggggagccagctgaaggcctacctttccttagaagtgttagatctgagtttgaacaacatcacggaagtgcggaacacctgctttccacacggaccgcctataaaggagctcaacctggcaggcaatcggattggcaccctggagttgggagcatttgatggtctgtcacggtcgctgctaactcttcgcctgagcaaaaacaggatcacccagcttcctgtaagagcattcaagctacccaggctgacacaactggacctcaatcggaacaggattcggctgatagagggcctcaccttccaggggctcaacagcttggaggtgctgaagcttcagcgaaacaacatcagcaaactgacagatggggccttctggggactgtccaagatgcatgtgctgcacctggagtacaacagcctggtagaagtgaacagcggctcgctctacggcctcacggccctgcatcagctccacctcagcaacaattccatcgctcgcattcaccgcaagggctggagcttctgccagaagctgcatgagttggtcctgtccttcaacaacctgacacggctggacgaggagagcctggccgagctgagcagcctgagtgtcctgcgtctcagccacaattccatcagccacattgcggagggtgccttcaagggactcaggagcctgcgagtcttggatctggaccataacgagatttcgggcacaatagaggacacgagcggcgccttctcagggctcgacagcctcagcaagctgaaccttggagggaatgcgatcagatctgtccagtttgatgcctttgtgaagatgaagaatcttaaagagctccatatcagcagcgacagcttcctgtgtgactgccagctgaagtggctgcccccgtggctaattggcaggatgctgcaggcctttgtgacagccacctgtgcccacccagaatcactgaagggtcagagcattttctctgtgccaccagagagtttcgtgtgcgatgacttcctgaagccacagatcatcacccagccagaaaccaccatggctatggtgggcaaggacatccggtttacatgctcagcagccagcagcagcagctcccccatgacctttgcctggaagaaagacaatgaagtcctgaccaatgcagacatggagaactttgtccacgtccacgcgcaggacggggaagtgatggagtacaccaccatcctgcacctccgtcaggtcactttcgggcacgagggccgctaccaatgtgtcatcaccaaccactttggctccacctattcacataaggccaggctcaccgtgaatgtgttgccatcattcaccaaaacgccccacgacataaccatccggaccaccaccatggcccgcctcgaatgtgctgccacaggtcacccaaaccctcagattgcctggcagaaggatggaggcacggatttccccgctgcccgtgagcgacgcatgcatgtcatgccggatgacgacgtgtttttcatcactgatgtgaaaatagatgacgcaggggtttacagctgtactgctcagaactcagccggttctatttcagctaatgccaccctgactgtcctagagaccccatccttggtggtccccttggaagaccgtgtggtatctgtgggagaaacagtggccctccaatgcaaagccacggggaaccctccgccccgcatcacctggttcaagggggaccgcccgctgagcctcactgagcggcaccacttgacccctgacaaccagctcctggtggttcagaacgtggtggcagaggatgcgggccgatatacctgtgagatgtccaacaccctgggcacggagcgagctcacagccagctgagcgtcctgcccgcagcaggctgcaggaaggatgggaccacggtaggcatcttcaccattgctgtcgtgagcagcatcgtcctgacgtcactggtctgggtgtgcatcatctaccagaccaggaagaagagtgaagagtacagtgtcaccaacacagatgaaaccgtcgtgccaccagatgttccaagctacctctcttctcaggggaccctttctgaccgacaagaaaccgtggtcaggaccgagggtggccctcaggccaatgggcacattgagagcaatggtgtgtgtccaagagatgcaagccactttccagagcccgacactcacagcgttgcctgcaggcagccaaagctctgtgctgggtctgcgtatcacaaagagccgtggaaagcgatggagaaagctgaagggacacctgggccacataagatggaacacggtggccgggtcgtatgcagtgactgcaacaccgaagtggactgttactccaggggacaagccttccacccccagcctgtgtccagagacagcgcacagccaagtgcgccaaatggcccggagccgggtgggagtgaccaagagcattctccacatcaccagtgcagcaggactgccgctgggtcctgccccgagtgccaagggtcgctctaccccagtaaccacgatagaatgctgacggctgtgaagaaaaagccaatggcatctctagatgggaaaggggattcttcctggactttagcaaggttgtatcacccggactccacagagctacagcctgcatcttcattaacttcaggcagtccagagcgcgcggaagcccagtacttgcttgtttccaatggccacctccccaaagcatgtgacgccagtcccgagtccacgccactgacaggacagctccccgggaaacagagggtgccactgctgttggcaccaaaaagctaggttttgtctacctcagttcttgtcataccaatctctacgggaaagagaggtaggagaggctgcgaggaagcttgggttcaagcgtcactcatctgtacatagttgtaactcccatgtggagtatcagtcgctcacaggacttggatctgaagcacagtaaacgcaagaggggatttgtgtacaaaaggcaaaaaaagtatttgatatcattgtacataagagttttcagagatttcatatatatcttttacagaggctattttaatctttagtgcatggttaacagaaaaaaattatacaattttgacaatattatttttcgtatcaggttgctgtttaattttggagggggtggggaaatagttctggtgccttaacgcatggctggaatttatagaggctacaaccacatttgttcacaggagtttttggtgcggggtgggaaggatggaaggccttggatttatattgcacttcatagacccctaggctgctgtgcggtgggactccacatgcgccggaaggagcttcaggtgagcactgctcatgtgtggatgcccctgcaacaggcttccctgtctgtagagccaggggtgcaagtgccatccacacttgcagtgaatggcttttccttttaggtttaagtcctgtctgtctgtaaggcgtagaatctgtccgtctgtaaggcgtagaatgagggttgttaatccatcacaagcaaaaggtcagaacagttaaacactgcctttcctcctcctcttattttatgataaaagcaaatgtggccttctcagtatcattcgattgctatttgagacttttaaattaaggtaaaggctgctggtgttggtacctgtggatttttctatactgatgttttcgttttgccaatataatgagtattacattggccttgggggacagaaaggaggaagttctgacttttcagggctaccttatttctactaaggacccagagcaggcctgtccatgccattccttcgcacagatgaaactgagctgggactggaaaggacagcccttgacctgggttctgggtataatttgcacttttgagactggtagctaaccatcttatgagtgccaatgtgtcatttagtaaaacttaaatagaaacaaggtccttcaaatgttcctttggccaaaagctgaagggagttactgagaaaatagttaacaattactgtcaggtgtcatcactgttcaaaaggtaagcacatttagaattttgttcttgacagttaactgactaatcttacttccacaaaatatgtgaatttgctgcttctgagaggcaatgtgaaagagggagtattacttttatgtacaaagttatttatttatagaaattttggtacagtgtacattgaaaaccatgtaaaatattgaagtgtctaacaaatggcattgaagtgtctttaataaaggttcatttataaatgtc

SEQ ID NO: 15950 - DNA, 5283 bp, Homo sapiens
  source 1..5283: mol_type = unassigned DNA
gattgttcggctgcgaggtcggcgggactcttgctgcgcggaggagccgtgcggaacccgaggctgcgcgcgcgcgcgcgctctctggccgcggcgtggggacagcgaggcgcactggggcctcccagcgcggggccggccgcgccgtccagcccgaggtctacggctttgcgctccgagcccagaggaagatgcctgccggcaccgagctcgggctgcggggctgaacgcctgtcttccaggcgcagcggcagcactgccctcggccggtgtcggtagcggcactcggcgtgccccgggcggacgaagagcgcaggctgggtacaccttgcccgaatcggcggagttcgcagctagcgcgggcgggccggccggcccggatgggcgcggggtttgcggcccccgccgggtgctccggagcggcccgggcaccgggggcacgctgagtgccggagccgcggccgcagagagaacttggggcgggggccatgccccggtgcggagtctagagccgagcggagcgccccgcgggcccgcccgcgtctgcggccgttcgggtcctcacagtccccgcgcccggagttcgcagcgcgctccagacaagatggcgcggccggtccggggagggctcggggccccgcgccgctcgccttgccttctccttctctggctgcttttgcttcggctggagccggtgaccgccgcggccggcccgcgggcgccctgcgcggccgcctgcacttgcgctggggactcgctggactgcggtgggcgcgggctggctgcgttgcccggggacctgccctcctggacgcggagcctaaacctgagttacaacaaactctctgagattgaccctgctggttttgaggacttgccgaacctacaggaagtgtacctcaataataatgagttgacagcggtaccatccctgggcgctgcttcatcacatgtcgtctctctctttctgcagcacaacaagattcgcagcgtggaggggagccagctgaaggcctacctttccttagaagtgttagatctgagtttgaacaacatcacggaagtgcggaacacctgctttccacacggaccgcctataaaggagctcaacctggcaggcaatcggattggcaccctggagttgggagcatttgatggtctgtcacggtcgctgctaactcttcgcctgagcaaaaacaggatcacccagcttcctgtaagagcattcaagctacccaggctgacacaactggacctcaatcggaacaggattcggctgatagagggcctcaccttccaggggctcaacagcttggaggtgctgaagcttcagcgaaacaacatcagcaaactgacagatggggccttctggggactgtccaagatgcatgtgctgcacctggagtacaacagcctggtagaagtgaacagcggctcgctctacggcctcacggccctgcatcagctccacctcagcaacaattccatcgctcgcattcaccgcaagggctggagcttctgccagaagctgcatgagttggtcctgtccttcaacaacctgacacggctggacgaggagagcctggccgagctgagcagcctgagtgtcctgcgtctcagccacaattccatcagccacattgcggagggtgccttcaagggactcaggagcctgcgagtcttggatctggaccataacgagatttcgggcacaatagaggacacgagcggcgccttctcagggctcgacagcctcagcaagctccttttattagagccatcccagtctgctggctgcagctccccgtcccagccccatatgtctgctgggggaaggactctgtttggaaacaagatcaagtctgtggctaagagagcattctcggggctggaaggcctggagcacctgaaccttggagggaatgcgatcagatctgtccagtttgatgcctttgtgaagatgaagaatcttaaagagctccatatcagcagcgacagcttcctgtgtgactgccagctgaagtggctgcccccgtggctaattggcaggatgctgcaggcctttgtgacagccacctgtgcccacccagaatcactgaagggtcagagcattttctctgtgccaccagagagtttcgtgtgcgatgacttcctgaagccacagatcatcacccagccagaaaccaccatggctatggtgggcaaggacatccggtttacatgctcagcagccagcagcagcagctcccccatgacctttgcctggaagaaagacaatgaagtcctgaccaatgcagacatggagaactttgtccacgtccacgcgcaggacggggaagtgatggagtacaccaccatcctgcacctccgtcaggtcactttcgggcacgagggccgctaccaatgtgtcatcaccaaccactttggctccacctattcacataaggccaggctcaccgtgaatgtgttgccatcattcaccaaaacgccccacgacataaccatccggaccaccaccatggcccgcctcgaatgtgctgccacaggtcacccaaaccctcagattgcctggcagaaggatggaggcacggatttccccgctgcccagaccccatccttggtggtccccttggaagaccgtgtggtatctgtgggagaaacagtggccctccaatgcaaagccacggggaaccctccgccccgcatcacctggttcaagggggaccgcccgctgagcctcactgagcggcaccacttgacccctgacaaccagctcctggtggttcagaacgtggtggcagaggatgcgggccgatatacctgtgagatgtccaacaccctgggcacggagcgagctcacagccagctgagcgtcctgcccgcagcaggctgcaggaaggatgggaccacggtaggcatcttcaccattgctgtcgtgagcagcatcgtcctgacgtcactggtctgggtgtgcatcatctaccagaccaggaagaagagtgaagagtacagtgtcaccaacacagatgaaaccgtcgtgccaccagatgttccaagctacctctcttctcaggggaccctttctgaccgacaagaaaccgtggtcaggaccgagggtggccctcaggccaatgggcacattgagagcaatggtgtgtgtccaagagatgcaagccactttccagagcccgacactcacagcgttgcctgcaggcagccaaagctctgtgctgggtctgcgtatcacaaagagccgtggaaagcgatggagaaagctgaagggacacctgggccacataagatggaacacggtggccgggtcgtatgcagtgactgcaacaccgaagtggactgttactccaggggacaagccttccacccccagcctgtgtccagagacagcgcacagccaagtgcgccaaatggcccggagccgggtgggagtgaccaagagcattctccacatcaccagtgcagcaggactgccgctgggtcctgccccgagtgccaagggtcgctctaccccagtaaccacgatagaatgctgacggctgtgaagaaaaagccaatggcatctctagatgggaaaggggattcttcctggactttagcaaggttgtatcacccggactccacagagctacagcctgcatcttcattaacttcaggcagtccagagcgcgcggaagcccagtacttgcttgtttccaatggccacctccccaaagcatgtgacgccagtcccgagtccacgccactgacaggacagctccccgggaaacagagggtgccactgctgttggcaccaaaaagctaggttttgtctacctcagttcttgtcataccaatctctacgggaaagagaggtaggagaggctgcgaggaagcttgggttcaagcgtcactcatctgtacatagttgtaactcccatgtggagtatcagtcgctcacaggacttggatctgaagcacagtaaacgcaagaggggatttgtgtacaaaaggcaaaaaaagtatttgatatcattgtacataagagttttcagagatttcatatatatcttttacagaggctattttaatctttagtgcatggttaacagaaaaaaattatacaattttgacaatattatttttcgtatcaggttgctgtttaattttggagggggtggggaaatagttctggtgccttaacgcatggctggaatttatagaggctacaaccacatttgttcacaggagtttttggtgcggggtgggaaggatggaaggccttggatttatattgcacttcatagacccctaggctgctgtgcggtgggactccacatgcgccggaaggagcttcaggtgagcactgctcatgtgtggatgcccctgcaacaggcttccctgtctgtagagccaggggtgcaagtgccatccacacttgcagtgaatggcttttccttttaggtttaagtcctgtctgtctgtaaggcgtagaatctgtccgtctgtaaggcgtagaatgagggttgttaatccatcacaagcaaaaggtcagaacagttaaacactgcctttcctcctcctcttattttatgataaaagcaaatgtggccttctcagtatcattcgattgctatttgagacttttaaattaaggtaaaggctgctggtgttggtacctgtggatttttctatactgatgttttcgttttgccaatataatgagtattacattggccttgggggacagaaaggaggaagttctgacttttcagggctaccttatttctactaaggacccagagcaggcctgtccatgccattccttcgcacagatgaaactgagctgggactggaaaggacagcccttgacctgggttctgggtataatttgcacttttgagactggtagctaaccatcttatgagtgccaatgtgtcatttagtaaaacttaaatagaaacaaggtccttcaaatgttcctttggccaaaagctgaagggagttactgagaaaatagttaacaattactgtcaggtgtcatcactgttcaaaaggtaagcacatttagaattttgttcttgacagttaactgactaatcttacttccacaaaatatgtgaatttgctgcttctgagaggcaatgtgaaagagggagtattacttttatgtacaaagttatttatttatagaaattttggtacagtgtacattgaaaaccatgtaaaatattgaagtgtctaacaaatggcattgaagtgtctttaataaaggttcatttataaatgtca

SEQ ID NO: 15951 - DNA, 4497 bp, Homo sapiens
  source 1..4497: mol_type = unassigned DNA
gtccgtcaggccgtgtgtcccaggccgtcgaccccgctgtcgcgctgcgtctgctccttgcatgcctttagatggtacagccttcagccggggcttcgggagacagtgcagccaccgagcatctctgctgagcttctccgccgatcctccttttctagcaggcagctcttctaggccacgtccaggtcgagggggaaaatggcgccggcgcccctaggcgtcccggaggagcagttgctggggtgtcgatctagagtgctttctcggttactcttcattgcccagaccgctctcctcctgttgcccgccgccggagcaggtctctgccccgcgccctgctcctgccgcattcctctcctggactgcagtcgcaggaaattgcccgcaccgagctggagggcgctgtcgggcttgctgccccccgacaccgctatcctggatttcagtcataatcggttgtctaactggaacatcagcttggaatcacaaacattacaggaagtgaaaatgaattacaatgaactaacagaaatcccgtattttggagaacctacatctaatattactctactttcattagtccataatataatcccagaaataaatgcacaggcactccagttttaccctgctctggagagtttagacctcagctcaaatataatatcagaaatcaagacatcttcatttcctcgcatgcagcttaaatacctgaatttaagtaataacagaataaccaccttggaggctggttgcttcgataatttatcaagttccttattagtggtaaagttaaaccgtaaccgaatgagcatgattccacctaagatcttcaagctgcctcacctccaattcttggaacttaaaagaaacagaattaaaattgtggaaggtcttacattccaagggcttgactccttaagatctttgaaaatgcagcggaatggaattagcaaacttaaggatggagcattttttggcttgaataacatggaagaactagaactggaacacaacaaccttacacgagtaaacaaggggtggttgtatggcttgcgaatgttacagcagctctatgtgagccagaatgctattgaaagaatcagccctgatgcatgggagttctgccaaagactatccgaacttgatttgtcctataaccagctgacccgcctggatgaatctgcctttgtgggtctgagcttattggagagattgaatttaggagacaacagagtcactcatattgctgatggtgtatttagatttctttccaatcttcagacattagacttaagaaacaatgaaatttcatgggccatagaagatgctagtgaagcctttgctggactcacaagtctcactaaactaatcttacaaggaaaccagattaagtcaattacaaagaaagcattcattggtcttgaatcccttgagcatctagatttgaacaataatgctataatgtctatccaagaaaatgctttttctcagactcatttaaaagaactgattctgaacacaagcagtttgctctgtgactgccatttgaagtggctacttcaatggttggttgataataactttcaacattctgtgaatgtaagctgtgcacaccctgaatggctagcagggcaaagcatcctgaatgtggatctgaaagattttgtctgtgatgattttctcaagccacagataaggacacatcctgaaaccataattgctctaagaggcatgaatgtgactctgacgtgcactgcagtgagcagcagtgattcacccatgtccactgtgtggcgcaaagacagtgaaatcctgtatgacgtggatactgagaattttgttcgttattggcagcaagctggagaagctctggaatatactagtatcttacatcttttcaatgtgaatttcacagatgaaggaaaatatcagtgtattgttactaatcactttggttctaattattctcagaaagccaaactgactgtaaatgagatgccatcttttctgaaaacgccaatggatctgactattcgcactggtgccatggccagattagaatgtgctgcagagggacaccctgcacctcagatttcctggcagaaagatggtggtactgactttcctgcggctcgagaaagacgcatgcacgtcatgcccgaggatgacgtcttctttattgccaatgtgaaaatagaagatatgggaatctatagctgcatggcacaaaatacagcaggaggtctctcagcaaatgcttccctaacagtgttagagacaccctcatttattagacccctggaggataagacagtaacacgaggtgaaactgcggtgttacagtgcatagctggagggagtcctgcccctcgtctcaactggactaaagatgatgggcctttgctggtgacagaacgacatttctttgctgcagccaatcagcttctcatcattgtagatgccgggctagaagatgctgggaaatatacctgcattatgtctaacacccttgggacagaacgtggccacatttacctaaatgtcatttcatcccccaattgtgactcttcccagagtagcattgggcatgaagatgatggctggaccacagttggcattgtcatcattgttgtggtctgctgtgttgttggcacttctttgatctgggtcattgttatttaccacatgagaaggaaaaatgaagactatagtatcacaaacacagaggagctcaatctgcctgcagacattcccagctacttgtcttcccaaggaacgctgtctgagccacaggaaggctacagcaactctgaggcaggcagtcatcagcaacttatgcctcctgccaatggatatatacacaaaggcactgacggtggcactggtacccgggtgatttgctcagattgttatgacaatgccaacatctactccaggacccgagaatactgtccatacacctatattgctgaggaggacgttcttgatcagacactgtccagcctcatggtccaaatgcctaaagagacatatttagtacatcctccccaggatactactgccctagagagcctgataccgtcagccaacagagagccatctgcctttcccaccaaccatgagaggataagtgagaagaaacttccctccacacagatgagcggtgaaacattgcagcggcccgtgtggaacataaacagagaactaggcctgcctcatcctcctttttcccagcagccagtccatgagtcaccacaacttcatcaaaatgagggcctggcagggagagagccagactgttctgcttcttccatgtcctgccacaggttacaggatcatgcttttgattttagtaggactcggaacattcaagatggtagtgagggcacatgaaactcacttcaggatgaaatctgggcagagacttattaattaattttgcatttactacctcagagctcagaagaaactccgaagtcagcatttgctttactctttctttatgattgcatctgaccgcaccaaggtgggccatgcgttgtttggtcttatacctgatgaagaaatggcaacagctgacagaaatgggtacagctcatcaaaaatgtgcagcaccggcagagggaagatacggggcaaatgtgcttcctgatgcttccatggggatgtgccctggtgtgcatctgcttgtcaggaagagtcacattgctgcttaacatgctggattgccctagtcttcagaatggtcctgagaaaacatcactacttcgatgttctactttgctttccaaggagcaaaaataactttggagccttctgggaagtgtgcctgggattcttcagtggtttcaggcagatagttgagactggggctttgatattcaaggtctttggcaagaatcccaggcttgaccaactggtaccaggtcaaagatttttgtattcttgtgaatttttttttttgtccctattgcccagggatgtcattgtaaatatatgtgcatttataaataatttttgtattcattgaccatatgtgttggctgcaatgtaaatatttttgatatgccaaaattatatgtaatatccagttataatattgacaagtagcttctcagatcacagattttaaataactcaatttagtgagatctaaaaattttatttaaagtataaaaactgtggctcacacctgtaatcccagcattttgagaggctaaggtgggaggattgcttgaggccaggaatttgagaccaggctgggcaacatggtgagaccctgtgtctgcaaaaaaataaattaaaaaaataggtggacattgtggcatgctgctgtagtcctagctacttgggaggctgaggtgggagggtcacttgagcccgggaaatcaaggctgcagtgagctgtgtgaagccactgcatcccagcctgggtgacagagtgaggccctggctcaaaagtaaaataaataaataaaaagttttaaaaactta

SEQ ID NO: 15952 - DNA, 1471 bp, Homo sapiens
  source 1..1471: mol_type = unassigned DNA
gatccctcccatctcacagtacctcacaggtctcttcccccgagcagtgcattgctggagcgaggagaagctcacgaatcagctgcaggtctctgttttgaaaaagcagagatacagaggcagaggaaaagggtggactcctatgtgacctgttcttagagcaagacaatcaccatctgaattccagaagccctgttcatggttggggatattttctcgactgcatggaatcagaaagaagcaaaaggatgggaaatgcctgcattcccctgaaaagaattgcttatttcctatgtctcttatctgcgcttttgctgactgaggggaagaaaccagcgaagccaaaatgccctgccgtgtgtacttgtaccaaagataatgctttatgtgagaatgccagatccattccacgcaccgttcctcctgatgttatctcattatcctttgtgagatctggttttactgaaatctcagaagggagttttttattcacgccatcgctgcagctcttgttattcacatcgaactcctttgatgtgatcagtgatgatgcttttattggtcttccacatctagagtatttattcatagaaaacaacaacatcaagtcaatttcaagacatactttccggggactaaagtcattaattcacttgagccttgcaaacaacaatctccagacactcccaaaagatattttcaaaggcctggattctttaacaaatgtggacctgaggggtaattcatttaattgtgactgtaaactgaaatggctagtggaatggcttggccacaccaatgcaactgttgaagacatctactgcgaaggccccccagaatacaagaagcgcaaaatcaatagtctctcctcgaaggattttgattgcatcattacagaatttgcaaagtctcaagacctgccttatcaatcattgtccatagacactttttcttatttgaatgatgagtatgtagtcatcgctcagccttttactggaaaatgcattttccttgaatgggaccatgtggaaaagaccttccggaattatgacaacattacagttttaagggaaatacacagatttacaaacatgtcatagttgacttaagcgcatgagacaccaaattctgtggctgccatcagaaattttctacagtacatgacccggatgaactcaatgcatgatgactcttcttatcacacttgcaaatgaatgcctttcaaacattgagactgctagaaccaagcactaccagtatctccatccttaactgtccagtccagtgatgtgggaagttaccttttataagacaaaatttaattgtgtaactgttctttgcagtgaagatgtgtaaataagcgtttaatggtatctgttactccaaaaagaaatattaatatgtacttttccatttatttattcatgtgtacagaaacaactgccaaataaaatgtttacattttctttca

SEQ ID NO: 15953 - DNA, 2290 bp, Homo sapiens
  source 1..2290: mol_type = unassigned DNA
gtggtgatgcaagtcggctctctcctccagcagttggatccctcccatctcacagtacctcacaggtctcttcccccgagcagtgcattgctggagcgaggagaagctcacgaatcagctgcaggtctctgttttgaaaaagcagagatacagaggcagaggaaaagggtggactcctatgtgacctgttcttagagcaagacaatcaccatctgaattccagaagccctgttcatggttggggatattttctcgactgcatggaatcagaaagaagcaaaaggatgggaaatgcctgcattcccctgaaaagaattgcttatttcctatgtctcttatctgcgcttttgctgactgaggggaagaaaccagcgaagccaaaatgccctgccgtgtgtacttgtaccaaagataatgctttatgtgagaatgccagatccattccacgcaccgttcctcctgatgttatctcattatcctttgtgagatctggttttactgaaatctcagaagggagttttttattcacgccatcgctgcagctcttgttattcacatcgaactcctttgatgtgatcagtgatgatgcttttattggtcttccacatctagagtatttattcatagaaaacaacaacatcaagtcaatttcaagacatactttccggggactaaagtcattaattcacttgagccttgcaaacaacaatctccagacactcccaaaagatattttcaaaggcctggattctttaacaaatgtggacctgaggggtaattcatttaattgtgactgtaaactgaaatggctagtggaatggcttggccacaccaatgcaactgttgaagacatctactgcgaaggccccccagaatacaagaagcgcaaaatcaatagtctctcctcgaaggattttgattgcatcattacagaatttgcaaagtctcaagacctgccttatcaatcattgtccatagacactttttcttatttgaatgatgagtatgtagtcatcgctcagccttttactggaaaatgcattttccttgaatgggaccatgtggaaaagaccttccggaattatgacaacattacaggcacatccactgtagtatgcaagcctatagtcattgaaactcagctctatgttattgtggcccagctgtttggtggctctcacatctataagcgagacagttttgcaaataaattcataaaaatccaggatattgaaattctcaaaatccgaaaacccaatgacattgaaacattcaagattgaaaacaactggtactttgttgttgctgacagttcaaaagctggttttactaccatttacaaatggaacggaaacggattctactcccatcaatccttacacgcgtggtacagggacactgatgtggaatatctagaaatagtcagaacacctcagacactcagaacgcctcatttaattctgtctagtagttcccagcgtcctgtaatttatcagtggaacaaagcaacacaattattcactaaccaaactgacattcctaacatggaggatgtgtacgcagtgaagcacttctcagtgaaaggggacgtgtacatttgcttgacaagattcattggtgattccaaagtcatgaaatggggaggctcctcgttccaggatattcagaggatgccatcgcgaggatccatggtgttccagcctcttcaaataaataattaccaatatgcaattcttggaagtgattactcctttactcaagtgtataactgggatgcagagaaagccaaatttgtgaaatttcaggaattaaatgttcaggcaccaagatcattcacacatgtgtccattaataagcgtaattttctttttgcttccagttttaagggaaatacacagatttacaaacatgtcatagttgacttaagcgcatgagacaccaaattctgtggctgccatcagaaattttctacagtacatgacccggatgaactcaatgcatgatgactcttcttatcacacttgcaaatgaatgcctttcaaacattgagactgctagaaccaagcactaccagtatctccatccttaactgtccagtccagtgatgtgggaagttaccttttataagacaaaatttaattgtgtaactgttctttgcagtgaagatgtgtaaataagcgtttaatggtatctgttactccaaaaagaaatattaatatgtacttttccatttatttattcatgtgtacagaaacaactgccaaataaaatgtttacattttctttcata

SEQ ID NO: 15954 - DNA, 2222 bp, Homo sapiens
  source 1..2222: mol_type = unassigned DNA
gaaagcagaaagctgtttattttctgtgacatcacttcactttgccttcgaaggctggtctgtgctcagtgttttcgtggtgatgcaagtcggctctctcctccagcagttggatccctcccatctcacagtacctcacaggtctcttcccccgagcagtgcattgctggagcgaggagaagctcacgaatcagctgcaggtctctgttttgaaaaagcagagatacagaggcagaggaaaagggtggactcctatgtgacctgttcttagagcaagacaatcaccatctgaattccagaagccctgttcatggttggggatattttctcgactgcatggaatcagaaagaagcaaaaggatgggaaatgcctgcattcccctgaaaagaattgcttatttcctatgtctcttatctgcgcttttgctgactgaggggaagaaaccagcgaagccaaaatgccctgccgtgtgtacttgtaccaaagataatgctttatgtgagaatgccagatccattccacgcaccgttcctcctgatgttatctcattatcctttgtgagatctggttttactgaaatctcagaagggagttttttattcacgccatcgctgcagctcttgagccttgcaaacaacaatctccagacactcccaaaagatattttcaaaggcctggattctttaacaaatgtggacctgaggggtaattcatttaattgtgactgtaaactgaaatggctagtggaatggcttggccacaccaatgcaactgttgaagacatctactgcgaaggccccccagaatacaagaagcgcaaaatcaatagtctctcctcgaaggattttgattgcatcattacagaatttgcaaagtctcaagacctgccttatcaatcattgtccatagacactttttcttatttgaatgatgagtatgtagtcatcgctcagccttttactggaaaatgcattttccttgaatgggaccatgtggaaaagaccttccggaattatgacaacattacaggcacatccactgtagtatgcaagcctatagtcattgaaactcagctctatgttattgtggcccagctgtttggtggctctcacatctataagcgagacagttttgcaaataaattcataaaaatccaggatattgaaattctcaaaatccgaaaacccaatgacattgaaacattcaagattgaaaacaactggtactttgttgttgctgacagttcaaaagctggttttactaccatttacaaatggaacggaaacggattctactcccatcaatccttacacgcgtggtacagggacactgatgtggaatatctagaaatagtcagaacacctcagacactcagaacgcctcatttaattctgtctagtagttcccagcgtcctgtaatttatcagtggaacaaagcaacacaattattcactaaccaaactgacattcctaacatggaggatgtgtacgcagtgaagcacttctcagtgaaaggggacgtgtacatttgcttgacaagattcattggtgattccaaagtcatgaaatggggaggctcctcgttccaggatattcagaggatgccatcgcgaggatccatggtgttccagcctcttcaaataaataattaccaatatgcaattcttggaagtgattactcctttactcaagtgtataactgggatgcagagaaagccaaatttgtgaaatttcaggaattaaatgttcaggcaccaagatcattcacacatgtgtccattaataagcgtaattttctttttgcttccagttttaagggaaatacacagatttacaaacatgtcatagttgacttaagcgcatgagacaccaaattctgtggctgccatcagaaattttctacagtacatgacccggatgaactcaatgcatgatgactcttcttatcacacttgcaaatgaatgcctttcaaacattgagactgctagaaccaagcactaccagtatctccatccttaactgtccagtccagtgatgtgggaagttaccttttataagacaaaatttaattgtgtaactgttctttgcagtgaagatgtgtaaataagcgtttaatggtatctgttactccaaaaagaaatattaatatgtacttttccatttatttattcatgtgtacagaaacaactgccaaataaaatgtttacattttctttcata

SEQ ID NO: 15955 - DNA, 4572 bp, Homo sapiens
  source 1..4572: mol_type = unassigned DNA
ggccgcgggtcttcgggctgcgtgggcctgggaggcgccgggaagagcagtcgcgacggggctagggacgacacactgcattcactggaagggacaacgcagcgccagtacatagcctgaaacgctccccagaaggtcccacgctcgccgcgcggtcgacaaccgcatcctgcgctcgcccgcggtgtctcggcaagcggtaggcttgtcgggaagagctggagggcgcaagtgcggcgctggccggacgtgccgcaccgtcagcgcagggctcgccgggaaatgtggtttctccagccggcccggggcggtggccgcaagttgggcttacagcgcggccgatccggcgtggacccgggatggctggaccgggcagcacgggggggcagatcggggctgcggccctggcaggcggcgcgcggtccaaggtagccccgagcgtggacttcgaccatagctgctcggacagtgtcgagtacctgacgctcaacttcgggcccttcgaaacagtgcatcgctggcggcgcctcccgccctgcgacgagttcgtgggtgcccggcgcagcaagcacacagtggtggcctataaagatgccatttatgtatttggtggagacaatgggaagaccatgctcaatgacctcctgcggttcgatgtgaaagactgctcctggtgcagggcctttaccactgggaccccaccggccccccgttaccaccactcggccgtcgtctatgggagcagcatgtttgtctttgggggttacactggggacatttattccaattctaacttgaagaataaaaacgacctctttgaatacaagtttgcaactggccagtggacggagtggaaaattgaaggacggttgccagtcgctaggtcagcccatggggccacggtgtacagtgacaagctgtggatctttgctggctatgacggcaacgccaggttgaatgacatgtggacaattggcctccaggaccgagagctcacctgctgggaggaggtggcccagagtggcgagatccccccatcttgctgcaacttccccgtggctgtgtgccgggacaagatgtttgtattctctgggcaaagcggagccaaaataaccaacaacctcttccagtttgaattcaaggacaagacgtggacacgcatcccaactgaacacctgctccggggctccccaccacccccgcagcggcgctacgggcataccatggtggcctttgaccgccacctctatgtgtttgggggtgcggccgacaacacgctgcccaacgagctgcactgctatgacgtggacttccagacctgggaggtcgtccagcccagctccgacagcgaggttggtggggctgaagtgcccgagcgagcctgtgcttccgaggaggtgcccaccctgacctatgaggagcgggttggcttcaagaagtcccgagatgtgtttggcctggactttggcaccacctcagccaagcagcccacccagcctgcctcggagctgcccagtgggaggctcttccacgcggctgctgtcatctcggacgccatgtacatcttcgggggcacggtggacaacaacatccgcagcggggagatgtacaggttccagttctcctgttaccctaaatgcacgctgcacgaggactacgggcggctgtgggagagccgccagttctgcgacgtggagttcgtgctgggtgagaaggaggagtgcgtgcagggccacgtagccattgtcacagcgcggagccgctggcttcgcaggaagatcacgcaggcgcgggagaggctggcccagaagctggagcaggaggccgccccagttcccagggaggcccccggcgtggctgctggtggggcccggccgcccctgctgcacgtggccatccgggaggccgaggcccggcccttcgaggtgctcatgcagttcctctacaccgacaagatcaaatacccacggaaaggccatgtggaggatgtgctgctcatcatggatgtgtacaaactggcactgagcttccagttgtgccgcctggagcagctgtgccgccagtacatcgaggcctccgtggacctgcagaacgtgctggttgtgtgcgagagtgccgcccggctgcagctgagccaactcaaggagcactgcctgaacttcgtggtaaaggagtcccacttcaaccaggtgatcatgatgaaggagttcgagcgcctctcctctccactgatagtggagattgtgcggcggaagcagcagccgccccctcgcactcccttggaccagccagtggacattggcacatctctgatccaggacatgaaggcatacctggagggagcgggcgcggaattctgtgacatcactctgttgcttgacgggcacccacggccagcccacaaggctatcctggccgcccgctccagctactttgaagccatgttccggtccttcatgcccgaagatgggcaggtgaacatctccatcggggagatggtgcccagcaggcaggccttcgagtccatgctgcgctacatctactacggcgaggtcaacatgccgcccgaggactcgctctacttgtttgcggccccctactactacggcttctacaacaaccggctgcaggcgtactgcaagcagaacctggagatgaacgtgacggtgcagaacgtgctgcagatcctggaggcagctgacaaaacgcaggcactggacatgaagcggcactgcctgcacatcattgtgcaccagttcaccaaggtctccaagttgcccaccctgcggtcgctgagccagcagctgctgctggacatcatagactccctggcctcccacatctcagacaagcagtgcgcagagctgggcgccgacatctgaggccctgtggcgcctgcccattgtgaagaatcgccgtgcctgcctgccctgcctactgagaagactaccggctatgcgcatgcctatggcagtgggtgcacctgccaggccaagggtcagggtgcccagagcctccaaagagagctgaggggatgtggggccccaaactcattaattcactgaagacacaggtcccacagggagcggatgatgaagcagaccccctcctgtcatcaccctctcctggtgtagtgtggatgcgaggccacggctcagtgatgggctcaccacccagaagtggggagagactttgggcctcccacccagtggggcttggcctggcttctgtggcctgggcgtgttgtggactcaggcactggggcctgtcaccaaggctcctccaacatgcgggaggaggcttagcagacttgcgctgcaccagcgaatctgcctgggctgctcctgtcccacccaccctcactgagatccatgtaaggggctcctcttcccacctggaacttgtgagtggggacccatgatgtatgggtctcacctgacttgaggtgaattttggagtgaagggccctgaggtcagctcccaggtcggtcgtgctgggccaggcctggttttcacaggggctgaaggatcccagtccacctgtgtgcatgtcagggctcggccgggaagaagccagcaaagtcccccgtgtcccttgctgagtattctgtcacagacaagcctccattaaagccacagcagtgctacccaccacacacaccttgctggcccggccaccactgctggcttcagccccttgagcagcccatggcttagcagacccccagatgtaggtcagtggccttacctgtctctatccatgctgtcaactcctgcctccacctggggtcacccagtcacattgggaagggctgtgaaggcctccaggctggccccttccaggggaatcctggaggcctggggtgggctcctgccccttctgccctgccttgcccctgcactatgctcttggctcctgtggaaggagggctgccctcttgccctagtgagggccccatgtggatccactctagtgctgggagccagcgctcccttactgggaacaggattccaggacccctttcttgttgtggctgccatgaagccacagctccttggggaagtgacctgctctcctttgggtgtatgcaggtgtgtggggggccctgagtggcaagttgcttagctaacaggagatccataggcagcctgcaggctaggaagtggcctagtgcaagatgagctgggaacaagggaggagagagcaggagctggggcagaggctgagccgggaggcccttgaggtgaggacacagcaggcccaggaccatggctggggaggatatgtcagcacctggaagtggagtgcaggctgcagcgcccagccatgtgggccaggtgcattcactcagagtggggccacacacccatctacccagtttccacaagatgtggctcctgccacacccacagggcagcctcctccaaatccctcctggaggggcctacccagaagcctccttgaaccagtctgcaaccctgctctatgctgacccttgtcactgaaccctgatctagacttatatgaataaatgaaattacatgccaagggccctaaaaagcaaattttac

SEQ ID NO: 15956 - DNA, 2625 bp, Homo sapiens
  source 1..2625: mol_type = unassigned DNA
aagttgggcttacagcgcggccgatccggcgtggacccgggatggctggaccgggcagcacgggggggcagatcggggctgcggccctggcaggcggcgcgcggtccaaggtagccccgagcgtggacttcgaccatagctgctcggacagtgtcgagtacctgacgctcaacttcgggcccttcgaaacagtgcatcgctggcggcgcctcccgccctgcgacgagttcgtgggtgcccggcgcagcaagcacacagtggtggcctataaagatgccatttatgtatttggtggagacaatggggcctttaccactgggaccccaccggccccccgttaccaccactcggccgtcgtctatgggagcagcatgtttgtctttgggggttacactggggacatttattccaattctaacttgaagaataaaaacgacctctttgaatacaagtttgcaactggccagtggacggagtggaaaattgaaggacggttgccagtcgctaggtcagcccatggggccacggtgtacagtgacaagctgtggatctttgctggctatgacggcaacgccaggttgaatgacatgtggacaattggcctccaggaccgagagctcacctgctgggaggaggtggcccagagtggcgagatccccccatcttgctgcaacttccccgtggctgtgtgccgggacaagatgtttgtattctctgggcaaagcggagccaaaataaccaacaacctcttccagtttgaattcaaggacaagacgtggacacgcatcccaactgaacacctgctccggggctccccaccacccccgcagcggcgctacgggcataccatggtggcctttgaccgccacctctatgtgtttgggggtgcggccgacaacacgctgcccaacgagctgcactgctatgacgtggacttccagacctgggaggtcgtccagcccagctccgacagcgaggttggtggggctgaagtgcccgagcgagcctgtgcttccgaggaggtgcccaccctgacctatgaggagcgggttggcttcaagaagtcccgagatgtgtttggcctggactttggcaccacctcagccaagcagcccacccagcctgcctcggagctgcccagtgggaggctcttccacgcggctgctgtcatctcggacgccatgtacatcttcgggggcacggtggacaacaacatccgcagcggggagatgtacaggttccagttctcctgttaccctaaatgcacgctgcacgaggactacgggcggctgtgggagagccgccagttctgcgacgtggagttcgtgctgggtgagaaggaggagtgcgtgcagggccacgtagccattgtcacagcgcggagccgctggcttcgcaggaagatcacgcaggcgcgggagaggctggcccagaagctggagcaggaggccgccccagttcccagggaggcccccggcgtggctgctggtggggcccggccgcccctgctgcacgtggccatccgggaggccgaggcccggcccttcgaggtgctcatgcagttcctctacaccgacaagatcaaatacccacggaaaggccatgtggaggatgtgctgctcatcatggatgtgtacaaactggcactgagcttccagttgtgccgcctggagcagctgtgccgccagtacatcgaggcctccgtggacctgcagaacgtgctggttgtgtgcgagagtgccgcccggctgcagctgagccaactcaaggagcactgcctgaacttcgtggtaaaggagtcccacttcaaccaggtgatcatgatgaaggagttcgagcgcctctcctctccactgatagtggagattgtgcggcggaagcagcagccgccccctcgcactcccttggaccagccagtggacattggcacatctctgatccaggacatgaaggcatacctggagggagcgggcgcggaattctgtgacatcactctgttgcttgacgggcacccacggccagcccacaaggctatcctggccgcccgctccagctactttgaagccatgttccggtccttcatgcccgaagatgggcaggtgaacatctccatcggggagatggtgcccagcaggcaggccttcgagtccatgctgcgctacatctactacggcgaggtcaacatgccgcccgaggactcgctctacttgtttgcggccccctactactacggcttctacaacaaccggctgcaggcgtactgcaagcagaacctggagatgaacgtgacggtgcagaacgtgctgcagatcctggaggcagctgacaaaacgcaggcactggacatgaagcggcactgcctgcacatcattgtgcaccagttcaccaaggtctccaagttgcccaccctgcggtcgctgagccagcagctgctgctggacatcatagactccctggcctcccacatctcagacaagcagtgcgcagagctgggcgccgacatctgaggccctgtggcgcctgcccattgtgaagaatcgccgtgcctgcctgccctgcctactgagaagactaccggctatgcgcatgcctatggcagtgggtgcacctgccaggccaagggtc

SEQ ID NO: 15957 - DNA, 4223 bp, Homo sapiens
  source 1..4223: mol_type = unassigned DNA
caggtcctagagcagctccagcaggatggcggctccagcgtctctaaggcctgcagggggtccagccccatggggggcgccctaggcctccgacagctccccatctgtgctcctgcctgccggccatcctcaggccactcgccatgggcggctgcttctccaaacccaaaccagtggagctcaagatcgaggtggtgctgcctgagaaggagcgaggcaaggaggagctgtcggccagtgggaagggcagcccccgggcctaccagggcaatggcacggcccgccacttccacacggaggagcgcctgtccacccctcacccctaccccagccctcaggattgcgtggaggctgctgtctgccacgtcaaggacctcgagaatggccagatgcgggaagtggagctgggctgggggaaggtgttgctggtgaaggacaatggggagttccacgccctgggccataagtgtccgcactacggcgcacccctggtgaaaggcgttctgtcccgtggtcgggtgcgctgcccctggcacggcgcctgcttcaacatcagcactggggacctggaggacttccctggcctggacagtctacacaagttccaggtgaagattgagaaggagaaggtgtacgtccgggccagcaagcaggccctacagctgcagcgaaggaccaaggtgatggccaagtgtatctctccaagtgctgggtacagcagtagcaccaatgtgctcattgtgggtgcaggtgcagctggcctggtgtgtgcagagacactgcggcaggagggcttctccgaccggatcgtcctgtgcacgctagaccggcaccttccctacgaccgtcccaagctcagcaagtccctggacacacagcctgagcagctggccctgaggcccaaggagtttttccgagcctatggcatcgaggtgctcaccgaggctcaggtggtcacagtggacgtgagaactaagaaggtcgtgttcaaggatggcttcaagctggagtacagcaagctgctgctggcaccagggagcagccccaagactctgagctgcaaaggcaaagaagtggagaacgtgttcactatccggacgccagaggatgccaatcgcgtggtgaggctggcccgaggccgcaacgtggtcgtcgtgggagccggcttcctggggatggaggtggccgcttacctgacggagaaggcccactctgtgtctgtggtggagctggaggagacgcccttcaggaggttcctgggggagcgcgtgggtcgagccctcatgaagatgtttgagaacaaccgggtgaagttctacatgcagacggaggtgtctgagctgcggggccaggagggaaagctgaaggaggttgtgctgaagagcagcaaggtcgtgcgggctgacgtctgcgtggtgggcattggtgcagtgcccgccacaggcttcctgaggcaaagcggcatcggtttggattcccgaggcttcatccctgtcaacaagatgatgcagaccaatgtcccaggcgtgtttgcagctggcgatgctgtcaccttcccccttgcctggaggaacaaccgcaaagtgaacattccacattggcagatggctcatgctcaggggcgcgtggcagcccagaacatgttggcgcaggaggcggagatgagcactgtgccctacctctggaccgccatgtttggcaagagcctgcgctacgcgggctacggagaaggcttcgacgacgtcatcatccagggggatctggaggagctgaagtttgtggctttttacactaaaggcgacgaggtgatcgccgtggccagcatgaactacgatcccattgtgtccaaggtcgctgaggtgctggcctcaggccgtgccatccggaagcgggaggtggagcgcagcaagcacacagtggtggcctataaagatgccatttatgtatttggtggagacaatgggaagaccatgctcaatgacctcctgcggttcgatgtgaaagactgctcctggtgcagggcctttaccactgggaccccaccggccccccgttaccaccactcggccgtcgtctatgggagcagcatgtttgtctttgggggttacactggggacatttattccaattctaacttgaagaataaaaacgacctctttgaatacaagtttgcaactggccagtggacggagtggaaaattgaaggacggttgccagtcgctaggtcagcccatggggccacggtgtacagtgacaagctgtggatctttgctggctatgacggcaacgccaggttgaatgacatgtggacaattggcctccaggaccgagagctcacctgctgggaggaggtggcccagagtggcgagatccccccatcttgctgcaacttccccgtggctgtgtgccgggacaagatgtttgtattctctgggcaaagcggagccaaaataaccaacaacctcttccagtttgaattcaaggacaagacgtggacacgcatcccaactgaacacctgctccggggctccccaccacccccgcagcggcgctacgggcataccatggtggcctttgaccgccacctctatgtgtttgggggtgcggccgacaacacgctgcccaacgagctgcactgctatgacgtggacttccagacctgggaggtcgtccagcccagctccgacagcgaggttggtggggctgaagtgcccgagcgagcctgtgcttccgaggaggtgcccaccctgacctatgaggagcgggttggcttcaagaagtcccgagatgtgtttggcctggactttggcaccacctcagccaagcagcccacccagcctgcctcggagctgcccagtgggaggctcttccacgcggctgctgtcatctcggacgccatgtacatcttcgggggcacggtggacaacaacatccgcagcggggagatgtacaggttccagttctcctgttaccctaaatgcacgctgcacgaggactacgggcggctgtgggagagccgccagttctgcgacgtggagttcgtgctgggtgagaaggaggagtgcgtgcagggccacgtagccattgtcacagcgcggagccgctggcttcgcaggaagatcacgcaggcgcgggagaggctggcccagaagctggagcaggaggccgccccagttcccagggaggcccccggcgtggctgctggtggggcccggccgcccctgctgcacgtggccatccgggaggccgaggcccggcccttcgaggtgctcatgcagttcctctacaccgacaagatcaaatacccacggaaaggccatgtggaggatgtgctgctcatcatggatgtgtacaaactggcactgagcttccagttgtgccgcctggagcagctgtgccgccagtacatcgaggcctccgtggacctgcagaacgtgctggttgtgtgcgagagtgccgcccggctgcagctgagccaactcaaggagcactgcctgaacttcgtggtaaaggagtcccacttcaaccaggtgatcatgatgaaggagttcgagcgcctctcctctccactgatagtggagattgtgcggcggaagcagcagccgccccctcgcactcccttggaccagccagtggacattggcacatctctgatccaggacatgaaggcatacctggagggagcgggcgcggaattctgtgacatcactctgttgcttgacgggcacccacggccagcccacaaggctatcctggccgcccgctccagctactttgaagccatgttccggtccttcatgcccgaagatgggcaggtgaacatctccatcggggagatggtgcccagcaggcaggccttcgagtccatgctgcgctacatctactacggcgaggtcaacatgccgcccgaggactcgctgtacttgtttgcggccccctactactacggcttctacaacaaccggctgcaggcgtactgcaagcagaacctggagatgaacgtgacggtgcagaacgtgctgcagatcctggaggcagctgacaaaacgcaggcactggacatgaagcggcactgcctgcacatcattgtgcaccagttcaccaaggtctccaagttgcccaccctgcggtcgctgagccagcagctgctgctggacatcatagactccctggcctcccacatctcagacaagcagtgcgcagagctgggcgccgacatctga

SEQ ID NO: 15958 - DNA, 12752 bp, Homo sapiens
  source 1..12752: mol_type = unassigned DNA
tccgcggccaacctccccagggaaaccagcgattcgcggttcagatagcgaccttcgcccgcaggttcctgctctgccttcagacttcggcttcagtggcacctgctcagcgaggcctcgtctaaccaagccatccgaattaactacccactcactcgccatcacatcaccccgatttaattcgcagcggggcactgactttacactcgtgtgtcttctgtgtttatttatggtctgtttctggaatgtccgctcctgggactgggaccatgattttctggcgcagtgcgggtgtctcggcgtccgggatcgggcgggtcgcagtagggctccacatttgttgagtgactgaacaccgttcccggccggggagagcgccgcagccgggtccacttcaggtaggggctgggctttcccggccccgcctaggccccgcccccagcgcgaacccgctcccacctcgcctgtccacggagcagcagggggtttgactgtgcttttccctcttgcttccctcgctctttctgcagctgccacgaaaacccggaacggcggagcggcgccgcccctcgcggcacctccctggcagcccttggaggccgcgctgggcatgctcagtcagctgggccgcctcagctctcggagtaggaagctcgggcgctccggctgtaaggagccgcggcggggggaaaatggagcccttcaccaatgatcggcttcagctccccaggaatatgattgaaaacagcatgtttgaggaagaaccagatgtggtggatttagccaaagagccttgtttacatcctctagagcctgatgaggtggaatatgagccccggggttcccgactgctggtgcggggtcttggtgagcatgagatggaggaggatgaagaggattatgagtcatcagcaaagctgctgggcatgtccttcatgaatagaagctcaggccttcggaacagtgcaactggttacaggcagagcccagatggggcttgttcagtaccctctgcaaggaccatggtggtctgtgcttttgtcatcgtggttgctgtttctgtaatcatggtgatttacttactgcccagatgtacctttaccaaagaaggctgccataaaaaaaaccagtcaattggactaattcagccatttgcaacaaatgggaaattgtttccatgggcacagatcaggcttcccactgccgttgtgccactacgctatgaactcagcctacacccgaacctaacctcgatgacattcaggggttctgtgacaatttcagttcaggctcttcaggtcacatggaatatcattcttcatagcacaggtcataatatttcaagagtgacctttatgtcagcagtttcaagccaagaaaaacaagctgagatcctggaatatgcatatcatggacagatcgccattgttgcccccgaagcccttctagcagggcacaattatacgttgaagatagagtactcggcaaatatatctagttcttattatgggttttatggcttctcctacacagatgaaagtaatgagaaaaagtactttgcagcaactcagtttgaacccctggcagcaagatctgcttttccttgttttgatgaaccagcatttaaagccacttttatcatcaagatcataagggatgagcaatacaccgctttatcaaatatgcctaagaagtcatcagtcgttctagatgatggacttgttcaggatgagttttctgagagtgtgaagatgagcacttacttggttgctttcattgtgggagagatgaagaacctgagtcaggacgtaaatggaaccctggtttctatatatgctgtaccagaaaagattggtcaagttcattatgccttggaaacaactgtgaagcttcttgagttttttcaaaactactttgaaattcagtacccacttaagaaattggatttggtggctattcctgactttgaagcaggagcaatggaaaattggggtttgctcaccttccgagaggagacacttctgtatgacagtaacacttcttcaatggcggatagaaagctggtgactaaaatcattgctcatgagctggcccaccagtggtttggcaatctggtaacaatgaagtggtggaatgacctatggctaaatgaaggttttgccactttcatggagtatttctctttggaaaaaatattcaaagagctttctagttatgaagatttcttagatgctcgatttaaaaccatgaagaaagattccttaaattcatctcatccaatatcatcatctgttcagtcttcagaacaaattgaagaaatgtttgattctctttcctattttaagggatcttctctcttgttgatgttgaaaacttaccttagtgaagatgtgtttcaacatgctgttgtcctttacctgcataatcacagctatgcatctattcaaagtgatgatctgtgggatagttttaatgaggtcacaaaccaaacactagatgtaaagagaatgatgaaaacctggaccctgcagaaaggatttcctttagtgactgttcaaaagaaaggaaaggaactttttatacaacaagagagattctttttaaatatgaagcctgaaattcagccttcagatacaagctacctgtggcatattccactatcctatgtcactgaaggaagaaattattcaaaatatcaatcggtatcattactggataagaaatcaggtgtcatcaatcttacagaagaagtgctgtgggtcaaagtgaatataaacatgaatggttattatattgtacactatgcagatgatgattgggaagcactaatccatcagttgaaaataaatccttatgttctgagtgacaaagaccgagccaaccttatcaacaacatctttgaacttgcaggcctaggcaaggtacctctcaagagggcctttgatttgattaattatcttggaaatgagaaccatactgcacccatcaccgaagccctgtttcagacagacctcatctataacctccttgaaaaactgggatacatggatctggcctcaagactggtgactagggtatttaaattacttcaaaaccaaattcaacaacaaacttggactgatgagggcactccatctatgcgagagcttcggtcagccctgctagagtttgcttgcacccacaacctggggaactgctctactactgccatgaaactgtttgatgactggatggcatccaatggaactcaaagcctacctactgatgtcatgacaactgtgttcaaagttggagcaaaaactgacaaaggctggtcattccttttgggcaaatacatttctataggctctgaagcagagaagaacaaaatactagaagcacttgccagctcagaggatgtgcggaagctttactggttaatgaaaagtagcctgaatggagataacttccgaacacagaagctgtcttttatcattagaacagtgggtcgacattttcctggacacttactggcatgggattttgtcaaagagaactggaataagcttgtacagaagttccctctggggtcctataccatacaaaatattgttgctggatcaacttacctgttttcaacaaagacacatttatctgaggttcaggcattctttgaaaatcagtcagaggcaaccttccggcttcgttgtgtccaggaggctttggaagtcattcagttgaatatccagtggatggagaagaacctcaaaagtctcacatggtggctgtagcatgcacaaccgcacctcattttgttgcccattcagagagcttgtaagcttgggctctgccgcttttgcaaaagccaaggtaaagccaggatcgctgccaagttgtttgcactctttggagttctagttagctcagggcctgactgtatttttcatccatcttttctgaagtgtctttgggcagtatgtagttatttattacaaaattatattcacctaaatgccaaccatctacaaaaacaatgagtaatttttctactttgaagatacacagatggggacaaaaaccctgttttggaattctgttctattcctcagtatccagaaagttactgacacagtaaaacaaggaaagttctaccctaagagccgccatcacttcaggccgctggtttgtcagccatctgttgcttcttattgatagatggcattggaatgtggtacaaagttagctctgaagaatatggtaacgaagacaataaagcatgcactgtaagaactgacctcaggtgtgcagatctactttgatttggggttttgattaattctttatttttctgaaaaaaagtttaaataatgtctgtaactattgtgtttttttcctgccgaatagccaggtgctacagatttttaaaatttttgttgtattgaaaagctaaacaaggccaaaaggttaaattttttgaatatttaagactttctttttcatcttttatagcgttaccataggaaactgttccaaactgagttagctttaattataattattttattcataaatggtgatagtccccagatctgtacacctttatcactccctgccgtagatatactttaggttagtatttctacattcgtggcaagcattttggtaacaccagtggttttcattgtgacttttatcactatcactaagaatgcaatttaagttgccttttggcatcatagatcatagaaactttctctctgaatcatacccatgtgtgaattttcattttatatgatagtgtagcatattagaagcatattttaaaacagagcctttgagaaattgaaaaacaattatttgaagttcaccatagtaccttaaaggaacaaagagaatgtgggataggagtaacttgaattcgtgtttagtatggtgggctttgaatttttttcactatcaaaaatagtgcttttgtttagttaaaaattgtagtttttctttttttgtgtgtccaaactaacataaaaggagtggtcaaagaaggaaagaagaaaaatgagggaggatgtccgaaactgtatggcattttactccttctgaaagagaaatactgtacttgaatttttgagctatgcagacttatacctagattgttgtgtttctttgattcttaggagaaaagctttcttcctaataattcttgagaactttatattttgtttgaaaacagtttctatgtacataaaaagggtatttacccatttgtgagcacttaaaacactccacagagtcagacagtgggaaaggtcaccctttttttattcggcaggtatcaagttagaatgtatggaattgtgaataaaattatattttattttatgaaaatatttttatataataaaatttaaaaggctggtaagctaaaaaaatagtcttctttaatcctagtgtgttttccccaatttagtcttttctaaaatttatctgttttagagtagaaaatattatatcctgagaatcacagaatcatctaaatatgtcttattcaactgaagtgattgtaagtctttattcttgtgctttggttaaatgaatgataatttagttgatagtgaaagttaatgtgtttttatatttttagagtgagggaaaaatactaaacttttgagagttttgttgtcgttgctggttttttaccatgtggtactaaattccactttgatacaaaatttaaattttgtaacttctcaaaatcacttaagattcttcagttttacctgtgcttcttgacatcgctcctataatgtatgttagttaactctgcatatggcaaatcttgtcttgaattatatcatttctctccctctctctctctctctgtgtgtgtgtgtgtgtgtgtgtgtgtgtgtgtgtgtgtgtgtgtgtgtagtgtggggggtattgttatgagtaaaactttatcaaaacttggcctgaaaaagagataactcatgatccattgctatctttattactcaaaggctgttcattcccataataccagatccataatagttgtagtttttttgatgttgttgcccttaccttaattatttgtagttttagtaggccttgcctcagtttttcccacagaattccataattttaatgttgaactaacccatctatataggacttctaaaaactacgtcaggaatgtaaggttaaatgagaggtagaacttgtagtgtaataggtataatggtagctttcaaagttttatcttctcaaaacattgtcttagccagtgtatttctgagaactcagactgaagcacagaagtcacagtatgcttcttttatttaagcacacagattcatgacacaagtacttgttgaacaagtgttctcattgcagagagatctacttgaatataaaagggtcatcatactagattattaaaaaagaattggaaatcttgagttgtggaagaaatgtttatgctttggagatctaaaaaagttatgaatgtaggaattagataagtccagtttgttctgttaatataaaatggttagatatattaaactgcaagtagtatcagcttcaccataagcttgggccttcctccatcttgttttatttaagtctctttaaatgaaattttgttgtcattgtttcagcattcatgaactttcttactatcacaggttctactttaattttccttgccatatgtgtttccattttgtgggacattagccaccacaggaacacaagagttgtcagaagactcctgggtgtacagagcaaatcaagctgcatcagtattataggataccaaacagaatcctttctattaggaaataagaaatcagttaagtgttggctgggcgcggtggcttatgcctgtaatcccagcattttgggatgccaaggtgggcagaccatttgaggccaggagttctaaaccagtttggccgacatggcaaaaccccatctctactaaaaatataaaaattagctgggcatggtggtgcacacctgtaatcccagctacctgggaggcacgagaatcacttgaacccaggaggcggaggttgcagtgagccaaggttgtgccactgcactccagcctgggtgacaaagcgagactgtctcaaaaaacaaaaaacaaaaaaaaaagagttaagtgttgattttgttggattactgacagtttgttgagatggattttaaaaagagtctatttaaaccaaagtacctggaaccataatctgccatcagattgctaaacattcacataatccccatgtttcatggggcttcagggaaggcaaatacatctgagatgagccacctccaaggacagcatttcctgggctgcaaaactagatgtggattttgttacttaggcctctctaaaaactgaggccatggatatgacatagcttttcttctcacctatgcctttgttacttttgtatttattggaattaaatctctttttaaagagcttccttcccccttcatcccatttgtatttttaaaaactaagttatatatatatttgcttgtttttgcattcttttattttgtgctccattccctgctttgccagttaagtactacctgaaaagtagcggttcaaaagtatggtaaatctcctcccttaaccttattgcctgtgtgggtgacagctaatggaaaagttgatcgatttttttcagtggtttttttgggagtatatactttaaaaatgtacatacatgtttttgatagtttttatattatttcattttgtatatttttttcctgatgaagagtgatatatcatcctatgaaaatttcatctacccttcccattttacctgtatgggcagtagctacagactagttatttggtttccttctttggaagaaggtggtgatgttgagaggagagcaagctatattcttttaaaagtgtgtacagatgtttttgctattttgtgttatttcattttgtatttcattcatccattttgtggacgtgtagataaaacgcggtggtccaaaagcatgacagatgtcccctttgcgtttctccttattgttcgcatggacaataactgacagagtagtcctagttgctgttgttttgatctagtcttggggctggggttgtatattattctttcaagtgtgtataaatattgtgccacctttttatacttcattttatacttgtttccttgtatggatgcatatatacttaatgaaaattgaggttcagagtatgacaaatctcttttcccttttccttactgcctatttaggcaatagctaatagagtagtttgttttgttttggggtgtgggggagagtggagtatgtacttaatgtatataaataaacttgctactacattgtattactaatttggttcacactgtgtccttctcatggatgtgaaagtaccaatgaaatgtggagatctcgatgtataacagtctcccattctcctcatcccttattgactgctgggcagtagctaacagagtagttgtcaagtggcgtatttgaggtgagggggagggacggggaaggtaggaaaatgcacttaatgtatatacatgtttttactactacattgtattaattcatcgggtgcccagactgaaaggtacctaatgaaccatggagttccggatgtataacagtctcctcttttccctttcccttattgcccatgtgggcaatacttaagagtagtttgggtttattgaagattttttgctaggagagagaaaattttttgctaggagaggtttcaaggtaagagtatatactttaaacatgtatataaatgtttttgctacttttctgtcactacctttcttaccttgtcctttacatggatatatgaagaaaattgaggttcagcctgtagcagctctcctcttctgcccttcccttagattgtctgtgtgggcaggtgtctaagagagtagttgattagcttcagggattctttggtgggtgttggggtatatacttttgtatatgtatgtacatatttttatttctttattatagtgtttcattgggtacccggtccttcacttggatgtgtaggttcctaatgagccatggagttatggatgtataacaatctgttctccctttacccttttaatgtatatgggcaataattttaaagtagtttggatttttttaagttttgaggggtgggaggggtctaaggcagaatatatcctttttaaaaatgtatatatacttttcattaactatattgtattatttcatgctgtacccagtccattgcttggacttacgggtacctaatgaaacgtggaggtccggatgtatgaaaatctcctcttttcccctttccttattgcctctgtaggcaataattatagagtagtatagatggtttttcttttttatccatctgcctatctccaggaggatggggtgtgcacttttagaaatgtatataaatgttcttgctcctttttcctgttacttcattgtgtgccaaggcctttccatggatacttaggtacgtaatgaaaattgaggttcattctatgaaaaaatctccccttctccccttcccttattgcctgtcttggcaatggccagtagagtagttatttaagggattttgtttttttgtttttttgttttttttttggtaggggaggtggggaatttctgggtttgtcttttttttaatgtatataaaagtttgctagttgttgttattgttgttctttcactctcaacacagttttttgtttggagttgtaggaatcaaatgtaatgagggacccagacccgagagtgtggtaaatattctttgccttcctcagagcctgtatacacaagcaagtagtatgtgagcactacagggcttgggttttggttttttgcttttgagggttttaatgaggagtgggattgttgagaggaaaaggcaagatatataatttttttaatgtatataaatgttttgctcctttttgatgttaacttcattttgaatctggtcctttgtatgaccacttaggtacttaatagtaataaagttgagattgactctatgaaaaatatcccatactccccatccctcattgcctagggggcaatggtagaatagatgtttggtttcttttgggggtgtctgagtgtatatgtgtgtgtatatacacacaagaacacacatatttatatactatacacacacattttaatgtatataaatatttgctacattctgtgtgttatataatgtggtacccagtcctctgctgggacatggatgtacataatgaaacatggaggtccagacgtatgataactctcctgtttcccttccctcattgcctacaggggcaatagtttcatatcttgggttttttattgtttaatttttttttatggggaggggttctttgggtgggtaatagtcagggggaaaggacagtgtctatactttttaaagatgtatataaatgtttcatgttattggttttgtacctagtcctttgcatggatatataggtacctaatgaaaatcgaggatcagtgtatgacaaatctcccatcctcccctttccttattgcctgtgtcggcaataggaagtagaatagttgtgtgttgtttacttacttgtctgttttagagagatttctatttttggtaggggaatattcttaatatgttttcatatctttatttcattttgtagtcttttgcatggctatgtagggacctaatgaaagtcgagtttcataatatgacagctcacttcttttcctacatatttcctcacttagcagtagctagtgtagttattttgtggttattttatttcattctctaggatctattccattaaggatgcaagtgtgtagatgcatatatatcatttgcttctttcttccgccattattttcctttaacacttagtcccttgcaaggggtctgactatacctaacaaaaataaagacctactaaatccctgccatctggctggaaggtgtagcagtgtattaatgtaactaatagcaacaggtgtgcagcagataagacaggagaagacactcagctatggttgagttgtgaaagctaattagatccagcatttcttatgttgattcagattgaatgaggtagtgaaaagggacctgtgcttttgtaaattctagaaaggcaagaggacaatattgaataaagctgtgtttaaacttcattgctcatatatcttttagtaactggtaaaccggcgaagctgataagccaataagagtgctgtctagaacgcatttgcaaaccgttaagagtagcttctttttgaggcctggacttctgattcatctatagaagtctattatgattccatcaattgcatagcttgtgtacctggtagaaattgtgtcttggaatgaccctttcgagttattgacatggctctgatgaatagaacatgagccccaaaactaaatccaaaaggaattttctatctttcatcccccacatgtggcaagacaagttggccctttcttacccagaggtcttttgtgtgactgcatctttctcctccgttctccattgtgtgctttccattttgtctttagtgcctatactgttaggtgttttcttcactggcattcacaaatttaagccattgctgcctcattagccttgtattttgtgtgcatatcatgtatccagacctgtatgttcgctttaagcattcttatatcacactgtctcctcatctaccatatggtaaatgttaaaactccacatttgtctgcatcagggaaaatgcatgggcacacatcctccctccctccctctctgctctcctcccttccttcaggcctcttagcattgtttgttttcccatttctgatactactactccatgctgaagatttgccatattactattttggaaacattgagtgatagaactcctagaaaatttgcaaagaaatgttacatactgtatatcaaactctcagattctagtgttgaaaaagtagcctatactttgctattacttatacctgctgccatagaaaaaaataagtttattcatgacacatttacatttgatcataaataaaagaaaaaagggcacctttttggagttagtcatggtagtcattagtgatatttctgaacagttcttaatttaaaatacttcaaaggaagtaaaggtcatggcttagctgaaggaaatgctccagaaattggactgtgtaaaccatcagtacaataatacgctgtgtatgtatgtgtatataaaatgagaattatggcataattggagcatttgcattaatcaacaaactcacattgagacaaaacttagttttacagctgtcttgattaaagccaagtgttccatgttgctgtgaagaatagcctctttcaaatactttggaaagtagttacttggaaacttgtaaaggtattacatttttatatttaaacacctatagagatcttcaattccttgagtctgagcttgtgggtggaattctaaatttgtatcataatctgtcttttgtgaaacattttgaaaatatgtatatataatattgtatatgcaaattgtgttgtttcacttgtaaagggaaaaggcttatttttctttatatttctgataacttgttttgcatatgaccagcactgactgaaaggcatgtgtagctgcaaacactgttgctttttttgtgaaatgaaaataaaagtatttaaatacaaaca

SEQ ID NO: 15959 - DNA, 3888 bp, Homo sapiens
  source 1..3888: mol_type = unassigned DNA
gctcctaactccactaagtacagaagtggagccgtacagccatgaatgtcaggcatgttgtggggactagttgtattagttttctattgccaccataacaaattaccacaaacttaagcaatatagtacaaatttatcttaaagttattggcaggtcagaagcctgatacggatctcattgggctaaaacgaaggagttggcagggctgtgtgttcctttctgtaggctctgggcaggatccatttcctgcacttttttggcttttggaggtcgtccacattccttggctcctggccctgctccttcatcttcaaagctaccaaagatcggcttcagctccccaggaatatgattgaaaacagcatgtttgaggaagaaccagatgtggtggatttagccaaagagccttgtttacatcctctagagcctgatgaggtggaatatgagccccggggttcccgactgctggtgcggggtcttggtgagcatgagatggaggaggatgaagaggattatgagtcatcagcaaagctgctgggcatgtccttcatgaatagaagctcaggccttcggaacagtgcaactggttacaggcagagcccagatggggcttgttcagtaccctctgcaaggaccatggtggtctgtgcttttgtcatcgtggttgctgtttctgtaatcatggtgatttacttactgcccagatgtacctttaccaaagaaggctgccataaaaaaaaccagtcaattggactaattcagccatttgcaacaaatgggaaattgtttccatgggcacagatcaggcttcccactgccgttgtgccactacgctatgaactcagcctacacccgaacctaacctcgatgacattcaggggttctgtgacaatttcagttcaggctcttcaggtcacatggaatatcattcttcatagcacaggtcataatatttcaagagtgacctttatgtcagcagtttcaagccaagaaaaacaagctgagatcctggaatatgcatatcatggacagatcgccattgttgcccccgaagcccttctagcagggcacaattatacgttgaagatagagtactcggcaaatatatctagttcttattatgggttttatggcttctcctacacagatgaaagtaatgagaaaaagtactttgcagcaactcagtttgaacccctggcagcaagatctgcttttccttgttttgatgaaccagcatttaaagccacttttatcatcaagatcataagggatgagcaatacaccgctttatcaaatatgcctaagaagtcatcagtcgttctagatgatggacttgttcaggatgagttttctgagagtgtgaagatgagcacttacttggttgctttcattgtgggagagatgaagaacctgagtcaggacgtaaatggaaccctggtttctatatatgctgtaccagaaaagattggtcaagttcattatgccttggaaacaactgtgaagcttcttgagttttttcaaaactactttgaaattcagtacccacttaagaaattggatttggtggctattcctgactttgaagcaggagcaatggaaaattggggtttgctcaccttccgagaggagacacttctgtatgacagtaacacttcttcaatggcggatagaaagctggtgactaaaatcattgctcatgagctggcccaccagtggtttggcaatctggtaacaatgaagtggtggaatgacctatggctaaatgaaggttttgccactttcatggagtatttctctttggaaaaaatattcaaagagctttctagttatgaagatttcttagatgctcgatttaaaaccatgaagaaagattccttaaattcatctcatccaatatcatcatctgttcagtcttcagaacaaattgaagaaatgtttgattctctttcctattttaagggatcttctctcttgttgatgttgaaaacttaccttagtgaagatgtgtttcaacatgctgttgtcctttacctgcataatcacagctatgcatctattcaaagtgatgatctgtgggatagttttaatgaggtcacaaaccaaacactagatgtaaagagaatgatgaaaacctggaccctgcagaaaggatttcctttagtgactgttcaaaagaaaggaaaggaactttttatacaacaagagagattctttttaaatatgaagcctgaaattcagccttcagatacaagctacctgtggcatattccactatcctatgtcactgaaggaagaaattattcaaaatatcaatcggtatcattactggataagaaatcaggtgtcatcaatcttacagaagaagtgctgtgggtcaaagtgaatataaacatgaatggttattatattgtacactatgcagatgatgattgggaagcactaatccatcagttgaaaataaatccttatgttctgagtgacaaagaccgagccaaccttatcaacaacatctttgaacttgcaggcctaggcaaggtacctctcaagagggcctttgatttgattaattatcttggaaatgagaaccatactgcacccatcaccgaagccctgtttcagacagacctcatctataacctccttgaaaaactgggatacatggatctggcctcaagactggtgactagggtatttaaattacttcaaaaccaaattcaacaacaaacttggactgatgagggcactccatctatgcgagagcttcggtcagccctgctagagtttgcttgcacccacaacctggggaactgctctactactgccatgaaactgtttgatgactggatggcatccaatggaactcaaagcctacctactgatgtcatgacaactgtgttcaaagttggagcaaaaactgacaaaggctggtcattccttttgggcaaatacatttctataggctctgaagcagagaagaacaaaatactagaagcacttgccagctcagaggatgtgcggaagctttactggttaatgaaaagtagcctgaatggagataacttccgaacacagaagctgtcttttatcattagaacagtgggtcgacattttcctggacacttactggcatgggattttgtcaaagagaactggaataagcttgtacagaagttccctctggggtcctataccatacaaaatattgttgctggatcaacttacctgttttcaacaaagacacatttatctgaggttcaggcattctttgaaaatcagtcagaggcaaccttccggcttcgttgtgtccaggaggctttggaagtcattcagttgaatatccagtggatggagaagaacctcaaaagtctcacatggtggctgtagcatgcacaaccgcacctcattttgttgcccattcagagagcttgtaagcttgggctctgccgcttttgcaaaagccaaggtaaagccaggatcgctgccaagttgtttgcactctttggagttctagttagctcagggcctgactgtatttttcatccatcttttctgaagtgtctttgggcagtatgtagttatttattacaaaattatattcacctaaatgccaaccatctacaaaaacaatgagtaatttttctactttgaagatacacagatggggacaaaaaccctgttttggaattctgttctattcctcagtatccagaaagttactgacacagtaaaacaaggaaagttctaccctaagagccgccatcacttcaggccgctggtttgtcagccatctgttgcttcttattgatagatggcattggaatgtggtacaaagttagctctgaagaatatggtaacgaagacaataaagcatgcactgtaagaactga

SEQ ID NO: 15960 - DNA, 3769 bp, Homo sapiens
  source 1..3769: mol_type = unassigned DNA
gaagcgtgtgctttagtttcgtgggaggcctggcatccccgagagggaggggaaaggtaaccactcctttgtggaggtcgccagggtcattgtcgtggatttgcacagtcggctgggcggtgcaatggcggaaagaaaaggaacagccaaagtggactttttgaagaagattgagaaagaaatccaacagaaatgggatactgagagagtgtttgaggtcaatgcatctaatttagagaaacagaccagcaagggcaagtattttgtaaccttcccatatccatatatgaatggacgccttcatttgggacacacgttttctttatccaaatgtgaggcatgtgctgataagttgaaaagagaaatagagctgtatggttgcccccctgattttccagatgaagaagaggaagaggaagaaaccagtgttaaaacagaagatataataattaaggataaagctaaaggaaaaaagagtaaagctgctgctaaagctggatcttctaaataccagtggggcattatgaaatcccttggcctgtctgatgaagagatagtaaaattttctgaagcagaacattggcttgattatttcccgccactggctattcaggatttaaaaagaatgggtttgaaggtagactggcgtcgttccttcatcaccactgatgttaatccttactatgattcatttgtcagatggcaatttttaacattaagagaaagaaacaaaattaaatttgggaagcggtatacaatttactctccgaaagatggacagccttgcatggatcatgatagacaaactggagagggtgttggacctcaggaatatactttactcaaattgaaggtgcttgagccatacccatctaaattaagtggcctgaaaggtaaaaatattttcttggtggctgctactctcagacctgagaccatgtttgggcagacaaattgttgggttcgtcctgatatgaagtacattggatttgagacggtgaatggtgatatattcatctgtacccaaaaagcagccaggaatatgtcataccagggctttaccaaagacaatggcgtggtgcctgttgttaaggaattaatgggggaggaaattcttggtgcatcactttctgcacctttaacatcatacaaggtgatctatgttctcccaatgctaactattaaggaggataaaggcactggtgtggttacaagtgttccttccgactcccctgatgatattgctgccctcagagacttgaagaaaaagcaagccttacgagcaaaatatggaattagagatgacatggtcttgccatttgagccggtgccagtcattgaaatcccaggttttggaaatctttctgctgtaaccatttgtgatgagttgaaaattcagagccagaatgaccgggaaaaacttgcagaagcaaaggagaagatatatctaaaaggattttatgagggtatcatgttggtggatggatttaaaggacagaaggttcaagatgtaaagaagactattcagaaaaagatgattgacgctggagatgcacttatttacatggaaccagagaaacaagtgatgtccaggtcgtcagatgaatgtgttgtggctctgtgtgaccagtggtacttggattatggagaagagaattggaagaaacagacatctcagtgcttgaagaacctggaaacattctgtgaggagaccaggaggaattttgaagccaccttaggttggctacaagaacatgcttgctcaagaacttatggtctaggcactcacctgccttgggatgagcagtggctgattgaatcactttctgactccactatttacatggcattttacacagttgcacacctattgcaggggggtaacttgcatggacaggcagagtctccgctgggcattagaccgcaacagatgaccaaggaagtttgggattatgttttcttcaaggaggctccatttcctaagactcagattgcaaaggaaaaattagatcagttaaagcaggagtttgaattctggtatcctgttgatcttcgcgtctctggcaaggatcttgttccaaatcatctttcatattacctttataatcatgtggctatgtggccggaacaaagtgacaaatggcctacagctgtgagagcaaatggacatctcctcctgaactctgagaagatgtcaaaatccacaggcaacttcctcactttgacccaagctattgacaaattttcagcagatggaatgcgtttggctctggctgatgctggtgacactgtagaagatgccaactttgtggaagccatggcagatgcaggtattctccgtctgtacacctgggtagagtgggtgaaagaaatggttgccaactgggacagcctaagaagtggtcctgccagcactttcaatgatagagtttttgccagtgaattgaatgcaggaattataaaaacagatcaaaactatgaaaagatgatgtttaaagaagctttgaaaacagggttttttgagtttcaggccgcaaaagataagtaccgtgaattggctgtggaagggatgcacagagaacttgtgttccggtttattgaagttcagacacttctcctcgctccattctgtccacatttgtgtgagcacatctggacactcctgggaaagcctgactcaattatgaatgcttcatggcctgtggcaggtcctgttaatgaagttttaatacactcctcacagtatcttatggaagtaacacatgaccttagactacgactcaagaactatatgatgccagctaaagggaagaagactgacaaacaacccctgcagaagccctcacattgcaccatctatgtggcaaagaactatccaccttggcaacataccaccctgtctgttctacgtaaacactttgaggccaataacggaaaactgcctgacaacaaagtcattgctagtgaactaggcagtatgccagaactgaagaaatacatgaagaaagtcatgccatttgttgccatgattaaggaaaatctggagaagatggggcctcgtattctggatttgcaattagaatttgatgaaaaggctgtgcttatggagaatatagtctatctgactaattcgcttgagctagaacacatagaagtcaagtttgcctccgaagcagaagataaaatcagggaagactgctgtcctgggaaaccacttaatgtttttagaatagaacctggtgtgtccgtttctctggtgaatccccagccatccaatggccacttctcaaccaaaattgaaatcaggcaaggagataactgtgattccataatcaggcgtttaatgaaaatgaatcgaggaattaaagacctttccaaagtgaaactgatgagatttgatgatccactgttggggcctcgacgagttcctgtcctgggaaaggagtacaccgagaagacccccatttctgagcatgctgttttcaatgtggacctcatgagcaagaaaattcatctgactgagaatgggataagggtggatattggcgatacaataatctatctggttcattaaactcatgcacattggagatttatcctggtttcttaggaatactactactctgattgtgtctactgattggctatcagaaccttaggctggacctaaatagattgatttcatttctaaccatccaattctgcatgtattcataattctatcaagtcatctttgattcctggacctaataaattttttttccctttc

SEQ ID NO: 15961 - DNA, 647 bp, Homo sapiens
  source 1..647: mol_type = unassigned DNA
ggctgtagttagtaaggagccggatgattgcctcagcaggtgtgaagcgtgtgctttagtttcgtgggaggcctggcatccccgagagggaggggaaaggtaaccactcctttgtggaggtcgccagggtcattgtcgtggatttgcacagtcggctgggcggtgcaatggcggaaagaaaaggaacagccaaagtggactttttgaagaagattgagaaagaaatccaacagaaatgggatactgagagagtgtttgaggtcaatgcatctaatttagagaaacagaccagcaagggcaagtattttgtaaccttcccatatccatatatgaatggacgccttcatttgggacacacgttttctttatccaaatgtgagtttgctgtagggtaccagcgattgaaaggaaaatgttgtctgtttccctttggcctgcactgtactggaatgcctattaaggcatgtgctgataagttgaaaagagaaatagagctgtatggttgcccccctgattttccagatgaagaagaggaagaggaagaaaccagtgttaaaacagaagatataataattaaggataaagctaaaggaaaaaagagtaaagctgctaagctggatcttctaaataccagtggggcattatga

SEQ ID NO: 15962 - DNA, 4766 bp, Homo sapiens
  source 1..4766: mol_type = unassigned DNA
ggctgtagttagtaaggagccggatgattgcctcagcaggtgtgaagcgtgtgctttagtttcgtgggaggcctggcatccccgagagggaggggaaaggtaaccactcctttgtggaggtcgccagggtcattgtcgtggatttgcacagtcggctgggcggtgcaatggcggaaagaaaaggaacagccaaagtggactttttgaagaagattgagaaagaaatccaacagaaatgggatactgagagagtgtttgaggtcaatgcatctaatttagagaaacagaccagcaagggcaagtattttgtaaccttcccatatccatatatgaatggacgccttcatttgggacacacgttttctttatccaaatgtgagtttgctgtagggtaccagcgattgaaaggaaaatgttgtctgtttccctttggcctgcactgtactggaatgcctattaaggcatgtgctgataagttgaaaagagaaatagagctgtatggttgcccccctgattttccagatgaagaagaggaagaggaagaaaccagtgttaaaacagaagatataataattaaggataaagctaaaggaaaaaagagtaaagctgctgctaaagctggatcttctaaataccagtggggcattatgaaatcccttggcctgtctgatgaagagatagtaaaattttctgaagcagaacattggcttgattatttcccgccactggctattcaggatttaaaaagaatgggtttgaaggtagactggcgtcgttccttcatcaccactgatgttaatccttactatgattcatttgtcagatggcaatttttaacattaagagaaagaaacaaaattaaatttgggaagcggtatacaatttactctccgaaagatggacagccttgcatggatcatgatagacaaactggagagggtgttggacctcaggaatatactttactcaaattgaaggtgcttgagccatacccatctaaattaagtggcctgaaaggtaaaaatattttcttggtggctgctactctcagacctgagaccatgtttgggcagacaaattgttgggttcgtcctgatatgaagtacattggatttgagacggtgaatggtgatatattcatctgtacccaaaaagcagccaggaatatgtcataccagggctttaccaaagacaatggcgtggtgcctgttgttaaggaattaatgggggaggaaattcttggtgcatcactttctgcacctttaacatcatacaaggtgatctatgttctcccaatgctaactattaaggaggataaaggcactggtgtggttacaagtgttccttccgactcccctgatgatattgctgccctcagagacttgaagaaaaagcaagccttacgagcaaaatatggaattagagatgacatggtcttgccatttgagccggtgccagtcattgaaatcccaggttttggaaatctttctgctgtaaccatttgtgatgagttgaaaattcagagccagaatgaccgggaaaaacttgcagaagcaaaggagaagatatatctaaaaggattttatgagggtatcatgttggtggatggatttaaaggacagaaggttcaagatgtaaagaagactattcagaaaaagatgattgacgctggagatgcacttatttacatggaaccagagaaacaagtgatgtccaggtcgtcagatgaatgtgttgtggctctgtgtgaccagtggtacttggattatggagaagagaattggaagaaacagacatctcagtgcttgaagaacctggaaacattctgtgaggagaccaggaggaattttgaagccaccttaggttggctacaagaacatgcttgctcaagaacttatggtctaggcactcacctgccttgggatgagcagtggctgattgaatcactttctgactccactatttacatggcattttacacagttgcacacctattgcaggggggtaacttgcatggacaggcagagtctccgctgggcattagaccgcaacagatgaccaaggaagtttgggattatgttttcttcaaggaggctccatttcctaagactcagattgcaaaggaaaaattagatcagttaaagcaggagtttgaattctggtatcctgttgatcttcgcgtctctggcaaggatcttgttccaaatcatctttcatattacctttataatcatgtggctatgtggccggaacaaagtgacaaatggcctacagctgtgagagcaaatggacatctcctcctgaactctgagaagatgtcaaaatccacaggcaacttcctcactttgacccaagctattgacaaattttcagcagatggaatgcgtttggctctggctgatgctggtgacactgtagaagatgccaactttgtggaagccatggcagatgcaggtattctccgtctgtacacctgggtagagtgggtgaaagaaatggttgccaactgggacagcctaagaagtggtcctgccagcactttcaatgatagagtttttgccagtgaattgaatgcaggaattataaaaacagatcaaaactatgaaaagatgatgtttaaagaagctttgaaaacagggttttttgagtttcaggccgcaaaagataagtaccgtgaattggctgtggaagggatgcacagagaacttgtgttccggtttattgaagttcagacacttctcctcgctccattctgtccacatttgtgtgagcacatctggacactcctgggaaagcctgactcaattatgaatgcttcatggcctgtggcaggtcctgttaatgaagttttaatacactcctcacagtatcttatggaagtaacacatgaccttagactacgactcaagaactatatgatgccagctaaagggaagaagactgacaaacaacccctgcagaagccctcacattgcaccatctatgtggcaaagaactatccaccttggcaacataccaccctgtctgttctacgtaaacactttgaggccaataacggaaaactgcctgacaacaaagtcattgctagtgaactaggcagtatgccagaactgaagaaatacatgaagaaagtcatgccatttgttgccatgattaaggaaaatctggagaagatggggcctcgtattctggatttgcaattagaatttgatgaaaaggctgtgcttatggagaatatagtctatctgactaattcgcttgagctagaacacatagaagtcaagtttgcctccgaagcagaagataaaatcagggaagactgctgtcctgggaaaccacttaatgtttttagaatagaacctggtgtgtccgtttctctggtgaatccccagccatccaatggccacttctcaaccaaaattgaaatcaggcaaggagataactgtgattccataatcaggcgtttaatgaaaatgaatcgaggaattaaagacctttccaaagtgaaactgatgagatttgatgatccactgttggggcctcgacgagttcctgtcctgggaaaggagtacaccgagaagacccccatttctgagcatgctgttttcaatgtggacctcatgagcaagaaaattcatctgactgagaatgggataagggtggatattggcgatacaataatctatctggttcattaaactcatgcacattggagatttatcctggtttcttaggaatactactactctgattgtgtctactgattggctatcagaaccttaggctggacctaaatagattgatttcatttctaaccatccaattctgcatgtattcataattctatcaagtcatctttgattcctggacctaataaattttttttccctttctttgggtgtccaagagaaatggtttttgccaaactctttttaaaaaacaaattgttgctatttcctagaagtttctggtttttaagatgaacataaaagtgtcagtatgcttcttttatgaggtgtactttatactttgatgaaggctaaggtgtacctaacagctttttatagtatattcatttatggagttagctgtatttttttttaaaaaagaaaagtagtaaattagcagcttttttttttaaatgaagagaacttcatgatgatttaaaagaactaatgagaatattttgacttgacttcaattactaagtattttgtataaagaacaaataggtcctgcattttataagactttttaaagctttaattattcaactaagaaccaataatggcttcttcaaggctaatatcaatagtttataagcagtatatttcacctacactaaatatgggcattttaaaagaagattccccccttcccccccagaaatctgcatttactaaatttgtcttaagtccaattgtgtttaaaggtcatgctggtcgggtgtggtggctcacacctataatcccagcactttgggaggccaaggtgggcagtcacctgaggtcaggagtttgagaccagcctgaccaacatggtgaaaccccgtctctactaaaaatacaaaaattagcttggcatggtggcgggtacctgtaatcccagctgcttgggagtgtgaggcaggagaatcgcttgaacctgggagaccgaggttgcagtgagctgaaaccgtgccattgcactccagcttaggcaacaagagtgaaactctgtctcaatcaatccatcaatcaatcaataaaatagaggtcatgctgact

SEQ ID NO: 15963 - DNA, 3737 bp, Homo sapiens
  source 1..3737: mol_type = unassigned DNA
aggtgtgaagcgtgtgctttagtttcgtgggaggcctggcatccccgagagggaggggaaaggtaaccactcctttgtggaggtcgccagggtcattgtcgtggatttgcacagtcggctgggcggtgcaatggcgcaagggcaagtattttgtaaccttcccatatccatatatgaatggacgccttcatttgggacacacgttttctttatccaaatgtgagtttgctgtagggtaccagcgattgaaaggaaaatgttgtctgtttccctttggcctgcactgtactggaatgcctattaaggcatgtgctgataagttgaaaagagaaatagagctgtatggttgcccccctgattttccagatgaagaagaggaagaggaagaaaccagtgttaaaacagaagatataataattaaggataaagctaaaggaaaaaagagtaaagctgctgctaaagctggatcttctaaataccagtggggcattatgaaatcccttggcctgtctgatgaagagatagtaaaattttctgaagcagaacattggcttgattatttcccgccactggctattcaggatttaaaaagaatgggtttgaaggtagactggcgtcgttccttcatcaccactgatgttaatccttactatgattcatttgtcagatggcaatttttaacattaagagaaagaaacaaaattaaatttgggaagcggtatacaatttactctccgaaagatggacagccttgcatggatcatgatagacaaactggagagggtgttggacctcaggaatatactttactcaaattgaaggtgcttgagccatacccatctaaattaagtggcctgaaaggtaaaaatattttcttggtggctgctactctcagacctgagaccatgtttgggcagacaaattgttgggttcgtcctgatatgaagtacattggatttgagacggtgaatggtgatatattcatctgtacccaaaaagcagccaggaatatgtcataccagggctttaccaaagacaatggcgtggtgcctgttgttaaggaattaatgggggaggaaattcttggtgcatcactttctgcacctttaacatcatacaaggtgatctatgttctcccaatgctaactattaaggaggataaaggcactggtgtggttacaagtgttccttccgactcccctgatgatattgctgccctcagagacttgaagaaaaagcaagccttacgagcaaaatatggaattagagatgacatggtcttgccatttgagccggtgccagtcattgaaatcccaggttttggaaatctttctgctgtaaccatttgtgatgagttgaaaattcagagccagaatgaccgggaaaaacttgcagaagcaaaggagaagatatatctaaaaggattttatgagggtatcatgttggtggatggatttaaaggacagaaggttcaagatgtaaagaagactattcagaaaaagatgattgacgctggagatgcacttatttacatggaaccagagaaacaagtgatgtccaggtcgtcagatgaatgtgttgtggctctgtgtgaccagtggtacttggattatggagaagagaattggaagaaacagacatctcagtgcttgaagaacctggaaacattctgtgaggagaccaggaggaattttgaagccaccttaggttggctacaagaacatgcttgctcaagaacttatggtctaggcactcacctgccttgggatgagcagtggctgattgaatcactttctgactccactatttacatggcattttacacagttgcacacctattgcaggggggtaacttgcatggacaggcagagtctccgctgggcattagaccgcaacagatgaccaaggaagtttgggattatgttttcttcaaggaggctccatttcctaagactcagattgcaaaggaaaaattagatcagttaaagcaggagtttgaattctggtatcctgttgatcttcgcgtctctggcaaggatcttgttccaaatcatctttcatattacctttataatcatgtggctatgtggccggaacaaagtgacaaatggcctacagctgtgagagcaaatggacatctcctcctgaactctgagaagatgtcaaaatccacaggcaacttcctcactttgacccaagctattgacaaattttcagcagatggaatgcgtttggctctggctgatgctggtgacactgtagaagatgccaactttgtggaagccatggcagatgcaggtattctccgtctgtacacctgggtagagtgggtgaaagaaatggttgccaactgggacagcctaagaagtggtcctgccagcactttcaatgatagagtttttgccagtgaattgaatgcaggaattataaaaacagatcaaaactatgaaaagatgatgtttaaagaagctttgaaaacagggttttttgagtttcaggccgcaaaagataagtaccgtgaattggctgtggaagggatgcacagagaacttgtgttccggtttattgaagttcagacacttctcctcgctccattctgtccacatttgtgtgagcacatctggacactcctgggaaagcctgactcaattatgaatgcttcatggcctgtggcaggtcctgttaatgaagttttaatacactcctcacagtatcttatggaagtaacacatgaccttagactacgactcaagaactatatgatgccagctaaagggaagaagactgacaaacaacccctgcagaagccctcacattgcaccatctatgtggcaaagaactatccaccttggcaacataccaccctgtctgttctacgtaaacactttgaggccaataacggaaaactgcctgacaacaaagtcattgctagtgaactaggcagtatgccagaactgaagaaatacatgaagaaagtcatgccatttgttgccatgattaaggaaaatctggagaagatggggcctcgtattctggatttgcaattagaatttgatgaaaaggctgtgcttatggagaatatagtctatctgactaattcgcttgagctagaacacatagaagtcaagtttgcctccgaagcagaagataaaatcagggaagactgctgtcctgggaaaccacttaatgtttttagaatagaacctggtgtgtccgtttctctggtgaatccccagccatccaatggccacttctcaaccaaaattgaaatcaggcaaggagataactgtgattccataatcaggcgtttaatgaaaatgaatcgaggaattaaagacctttccaaagtgaaactgatgagatttgatgatccactgttggggcctcgacgagttcctgtcctgggaaaggagtacaccgagaagacccccatttctgagcatgctgttttcaatgtggacctcatgagcaagaaaattcatctgactgagaatgggataagggtggatattggcgatacaataatctatctggttcattaaactcatgcacattggagatttatcctggtttcttaggaatactactactctgattgtgtctactgattggctatcagaaccttaggctggacctaaatagattgatttcatttctaaccatccaattctgcatgtattcataattctatcaagtcatctttgattcctggacctaataaattttttttccctttc

SEQ ID NO: 15964 - DNA, 2652 bp, Homo sapiens
  source 1..2652: mol_type = unassigned DNA
gattgcaaaggaaaaattagatcagttaaagcaggagtttgaattctggtatcctgttgatcttcgcgtctctggcaaggatcttgttccaaatcatctttcatattacctttataatcatgtggctatgtggccggaacaaagtgacaaatggcctacagctgtgagagcaaatggacatctcctcctgaactctgagaagatgtcaaaatccacaggcaacttcctcactttgacccaagctattgacaaattttcagcagatggaatgcgtttggctctggctgatgctggtgacactgtagaagatgccaactttgtggaagccatggcagatgcaggtattctccgtctgtacacctgggtagagtgggtgaaagaaatggttgccaactgggacagcctaagaagtggtcctgccagcactttcaatgatagagtttttgccagtgaattgaatgcaggaattataaaaacagatcaaactatgaaaagatgatgtttaaagaagctttgaaaacagggttttttgagtttcaggccgcaaaagataagtaccgtgaattggctgtggaagggatgcacagagaacttgtgttccggtttattgaagttcagacacttctcctcgctccattctgtccacatttgtgtgagcacatctggacactcctgggaaagcctgactcaattatgaatgcttcatggcctgtggcaggtcctgttaatgaagttttaatacactcctcacagtatcttatggaagtaacacatgaccttagactacgactcaagaactatatgatgccagctaaagggaagaagactgacaaacaacccctgcagaagccctcacattgcaccatctatgtggcaaagaactatccaccttggcaacataccaccctgtctgttctacgtaaacactttgaggccaataacggaaaactgcctgacaacaaagtcattgctagtgaactaggcagtatgccagaactgaagaaatacatgaagaaagtcatgccatttgttgccatgattaaggaaaatctggagaagatggggcctcgtattctggatttgcaattagaatttgatgaaaaggctgtgcttatggagaatatagtctatctgactaattcgcttgagctagaacacatagaagtcaagtttgcctccgaagcagaagataaaatcagggaagactgctgtcctgggaaaccacttaatgtttttagaatagaacctggtgtgtccgtttctctggtgaatccccagccatccaatggccacttctcaaccaaaattgaaatcaggcaaggagataactgtgattccataatcaggcgtttaatgaaaatgaatcgaggaattaaagacctttccaaagtgaaactgatgagatttgatgatccactgttggggcctcgacgagttcctgtcctgggaaaggagtacaccgagaagacccccatttctgagcatgctgttttcaatgtggacctcatgagcaagaaaattcatctgactgagaatgggataagggtggatattggcgatacaataatctatctggttcattaaactcatgcacattggagatttatcctggtttcttaggaatactactactctgattgtgtctactgattggctatcagaaccttaggctggacctaaatagattgatttcatttctaaccatccaattctgcatgtattcataattctatcaagtcatctttgattcctggacctaataaattttttttccctttctttgggtgtccaagagaaatggtttttgccaaactctttttaaaaaacaaattgttgctatttcctagaagtttctggtttttaagatgaacataaaagtgtcagtatgcttcttttatgaggtgtactttatactttgatgaaggctaaggtgtacctaacagctttttatagtatattcatttatggagttagctgtatttttttttaaaaaagaaaagtagtaaattagcagcttttttttttaaatgaagagaacttcatgatgatttaaaagaactaatgagaatattttgacttgacttcaattactaagtattttgtataaagaacaaataggtcctgcattttataagactttttaaagctttaattattcaactaagaaccaataatggcttcttcaaggctaatatcaatagtttataagcagtatatttcacctacactaaatatgggcattttaaaagaagattccccccttcccccccagaaatctgcatttactaaatttgtcttaagtccaattgtgtttaaaggtcatgctggtcgggtgtggtggctcacacctataatcccagcactttgggaggccaaggtgggcagtcacctgaggtcaggagtttgagaccagcctgaccaacatggtgaaaccccgtctctactaaaaatacaaaaattagcttggcatggtggcgggtacctgtaatcccagctgcttgggagtgtgaggcaggagaatcgcttgaacctgggagaccgaggttgcagtgagctgaaaccgtgccattgcactccagcttaggcaacaagagtgaaactctgtctcaatcaatccatcaatcaatcaataaaatagaggtcatgctgact

SEQ ID NO: 15965 - DNA, 2213 bp, Homo sapiens
  source 1..2213: mol_type = unassigned DNA
cgtggatttgcacagtcggctgggcggtgcaatggcggaaagaaaaggaacagccaaagtggactttttgaagaagattgagaaagaaatccaacagaaatgggatactgagagagtgtttgaggtcaatgcatctaatttagagaaacagaccagcaagggcaagtattttgtaaccttcccatatccatatatgaatggacgccttcatttgggacacacgttttctttatccaaatgtgagtttgctgtagggtaccagcgattgaaaggaaaatgttgtctgtttccctttggcctgcactgtactggaatgcctattaaggcatgtgctgataagttgaaaagagaaatagagctgtatggttgcccccctgattttccagatgaagaagaggaagaggaagaaaccagtgttaaaacagaagatataataattaaggttaaagcaggagtttgaattctggtatcctgttgatcttcgcgtctctggcaaggatcttgttccaaatcatctttcatattacctttataatcatgtggctatgtggccggaacaaagtgacaaatggcctacagctgtgagagcaaatggacatctcctcctgaactctgagaagatgtcaaaatccacaggcaacttcctcactttgacccaagctattgacaaattttcagcagatggaatgcgtttggctctggctgatgctggtgacactgtagaagatgccaactttgtggaagccatggcagatgcaggtattctccgtctgtacacctgggtagagtgggtgaaagaaatggttgccaactgggacagcctaagaagtggtcctgccagcactttcaatgatagagtttttgccagtgaattgaatgcaggaattataaaaacagatcaaaactatgaaaagatgatgtttaaagaagctttgaaaacagggttttttgagtttcaggccgcaaaagataagtaccgtgaattggctgtggaagggatgcacagagaacttgtgttccggtttattgaagttcagacacttctcctcgctccattctgtccacatttgtgtgagcacatctggacactcctgggaaagcctgactcaattatgaatgcttcatggcctgtggcaggtcctgttaatgaagttttaatacactcctcacagtatcttatggaagtaacacatgaccttagactacgactcaagaactatatgatgccagctaaagggaagaagactgacaaacaacccctgcagaagccctcacattgcaccatctatgtggcaaagaactatccaccttggcaacataccaccctgtctgttctacgtaaacactttgaggccaataacggaaaactgcctgacaacaaagtcattgctagtgaactaggcagtatgccagaactgaagaaatacatgaagaaagtcatgccatttgttgccatgattaaggaaaatctggagaagatggggcctcgtattctggatttgcaattagaatttgatgaaaaggctgtgcttatggagaatatagtctatctgactaattcgcttgagctagaacacatagaagtcaagtttgcctccgaagcagaagataaaatcagggaagactgctgtcctgggaaaccacttaatgtttttagaatagaacctggtgtgtccgtttctctggtgaatccccagccatccaatggccacttctcaaccaaaattgaaatcaggcaaggagataactgtgattccataatcaggcgtttaatgaaaatgaatcgaggaattaaagacctttccaaagtgaaactgatgagatttgatgatccactgttggggcctcgacgagttcctgtcctgggaaaggagtacaccgagaagacccccatttctgagcatgctgttttcaatgtggacctcatgagcaagaaaattcatctgactgagaatgggataagggtggatattggcgatacaataatctatctggttcattaaactcatgcacattggagatttatcctggtttcttaggaatactactactctgattgtgtctactgattggctatcagaaccttaggctggacctaaatagattgatttcatttctaaccatccaattctgcatgtattcataattctatcaagtcatctttgattcctggacctaataaattttttttccctttctttgggtgtccaaga

SEQ ID NO: 15966 - DNA, 3766 bp, Homo sapiens
  source 1..3766: mol_type = unassigned DNA
agtttcgtgggaggcctggcatccccgagagggaggggaaaggtaaccactcctttgtggaggtcgccagggtcattgtcgtggatttgcacagtcggctgggcggtgcaatggcggaaagaaaaggaacagccaaagtggactttttgaagaagattgagaaagaaatccaacagaaatgggatactgagagagtgtttgaggtcaatgcatctaatttagagaaacagaccagcaagggcaagtattttgtaaccttcccatatccatatatgaatggacgccttcatttgggacacacgttttctttatccaaatgtgagtttgctgtagggtaccagcgattgaaaggaaaatgttgtctgtttccctttggcctgcactgtactggaatgcctattaagagtaaagctgctgctaaagctggatcttctaaataccagtggggcattatgaaatcccttggcctgtctgatgaagagatagtaaaattttctgaagcagaacattggcttgattatttcccgccactggctattcaggatttaaaaagaatgggtttgaaggtagactggcgtcgttccttcatcaccactgatgttaatccttactatgattcatttgtcagatggcaatttttaacattaagagaaagaaacaaaattaaatttgggaagcggtatacaatttactctccgaaagatggacagccttgcatggatcatgatagacaaactggagagggtgttggacctcaggaatatactttactcaaattgaaggtgcttgagccatacccatctaaattaagtggcctgaaaggtaaaaatattttcttggtggctgctactctcagacctgagaccatgtttgggcagacaaattgttgggttcgtcctgatatgaagtacattggatttgagacggtgaatggtgatatattcatctgtacccaaaaagcagccaggaatatgtcataccagggctttaccaaagacaatggcgtggtgcctgttgttaaggaattaatgggggaggaaattcttggtgcatcactttctgcacctttaacatcatacaaggtgatctatgttctcccaatgctaactattaaggaggataaaggcactggtgtggttacaagtgttccttccgactcccctgatgatattgctgccctcagagacttgaagaaaaagcaagccttacgagcaaaatatggaattagagatgacatggtcttgccatttgagccggtgccagtcattgaaatcccaggttttggaaatctttctgctgtaaccatttgtgatgagttgaaaattcagagccagaatgaccgggaaaaacttgcagaagcaaaggagaagatatatctaaaaggattttatgagggtatcatgttggtggatggatttaaaggacagaaggttcaagatgtaaagaagactattcagaaaaagatgattgacgctggagatgcacttatttacatggaaccagagaaacaagtgatgtccaggtcgtcagatgaatgtgttgtggctctgtgtgaccagtggtacttggattatggagaagagaattggaagaaacagacatctcagtgcttgaagaacctggaaacattctgtgaggagaccaggaggaattttgaagccaccttaggttggctacaagaacatgcttgctcaagaacttatggtctaggcactcacctgccttgggatgagcagtggctgattgaatcactttctgactccactatttacatggcattttacacagttgcacacctattgcaggggggtaacttgcatggacaggcagagtctccgctgggcattagaccgcaacagatgaccaaggaagtttgggattatgttttcttcaaggaggctccatttcctaagactcagattgcaaaggaaaaattagatcagttaaagcaggagtttgaattctggtatcctgttgatcttcgcgtctctggcaaggatcttgttccaaatcatctttcatattacctttataatcatgtggctatgtggccggaacaaagtgacaaatggcctacagctgtgagagcaaatggacatctcctcctgaactctgagaagatgtcaaaatccacaggcaacttcctcactttgacccaagctattgacaaattttcagcagatggaatgcgtttggctctggctgatgctggtgacactgtagaagatgccaactttgtggaagccatggcagatgcaggtattctccgtctgtacacctgggtagagtgggtgaaagaaatggttgccaactgggacagcctaagaagtggtcctgccagcactttcaatgatagagtttttgccagtgaattgaatgcaggaattataaaaacagatcaaaactatgaaaagatgatgtttaaagaagctttgaaaacagggttttttgagtttcaggccgcaaaagataagtaccgtgaattggctgtggaagggatgcacagagaacttgtgttccggtttattgaagttcagacacttctcctcgctccattctgtccacatttgtgtgagcacatctggacactcctgggaaagcctgactcaattatgaatgcttcatggcctgtggcaggtcctgttaatgaagttttaatacactcctcacagtatcttatggaagtaacacatgaccttagactacgactcaagaactatatgatgccagctaaagggaagaagactgacaaacaacccctgcagaagccctcacattgcaccatctatgtggcaaagaactatccaccttggcaacataccaccctgtctgttctacgtaaacactttgaggccaataacggaaaactgcctgacaacaaagtcattgctagtgaactaggcagtatgccagaactgaagaaatacatgaagaaagtcatgccatttgttgccatgattaaggaaaatctggagaagatggggcctcgtattctggatttgcaattagaatttgatgaaaaggctgtgcttatggagaatatagtctatctgactaattcgcttgagctagaacacatagaagtcaagtttgcctccgaagcagaagataaaatcagggaagactgctgtcctgggaaaccacttaatgtttttagaatagaacctggtgtgtccgtttctctggtgaatccccagccatccaatggccacttctcaaccaaaattgaaatcaggcaaggagataactgtgattccataatcaggcgtttaatgaaaatgaatcgaggaattaaagacctttccaaagtgaaactgatgagatttgatgatccactgttggggcctcgacgagttcctgtcctgggaaaggagtacaccgagaagacccccatttctgagcatgctgttttcaatgtggacctcatgagcaagaaaattcatctgactgagaatgggataagggtggatattggcgatacaataatctatctggttcattaaactcatgcacattggagatttatcctggtttcttaggaatactactactctgattgtgtctactgattggctatcagaaccttaggctggacctaaatagattgatttcatttctaaccatccaattctgcatgtattcataattctatcaagtcatctttgattcctggacctaataaattttttttccctttctttgggtgtccaagagaaatggtttttgccaaactctttttaaaaaacaaattgttgctatttcctag

SEQ ID NO: 15967 - DNA, 4281 bp, Homo sapiens
  source 1..4281: mol_type = unassigned DNA
gttgctctcctcccttccccggtcccgcccccgtctgtctgtgtcgactgcggacgctatcgataaagttgctgttttgacaacatggcggcgcccatggtccgtggcccggcagtgctcgcctaaaggtggagaacgaggagtagaggagccgcaggccagagcctgtgagcagatccagacctacagataaaaaacattatttaatctatctgggatttactccggcttatgatttgagggccttctcaccttctgaagaatggcttctgtttggcagagattgggtttttatgcctctcttctgaaaagacagctaaatggtgggccagatgtcatcaagtgggaaaggagagtaattcccggatgtaccagaagcatctacagtgccacgggaaagtggacaaaagagtatacattgcagacaagaaaggatgttgagaaatggtggcatcaacgaataaaagaacaggcctccaaaatttcagaagctgataaatcgaagccaaaattttacgtgctttccatgttcccttatccttctggtaagctgcacatgggccatgtgcgtgtctacaccatcagcgacaccatagcacggttccagaagatgagagggatgcaggtcatcaaccccatgggatgggatgcttttggattgcctgctgaaaatgccgcagtcgagaggaatctacatccacaaagttggacacaaagtaatattaaacacatgaggaaacagcttgatcgtctgggcctgtgtttcagctgggatagggaaataactacgtgtttgccagattactacaagtggactcagtatctctttattaaactgtatgaggctgggctggcctatcaaaaggaggccctggttaactgggacccagtggatcaaacagtgcttgccaatgagcaggtggatgaacatggctgttcatggcgttctggagcaaaggtggaacagaagtacctcagacaatggtttattaagacaaccgcttatgcaaaggccatgcaggacgcgttggcagaccttccagaatggtatggaataaaaggcatgcaagcccactggattggggactgtgtgggctgccacctggacttcacattaaaggttcatgggcaagccacgggcgaaaagctgactgcctatacggccacccctgaagccatttatggcacctcccacgtggccatctcgcccagccacagactcctacatgggcacagctctctgaaggaagccttgaggatggcccttgtccctggcaaagattgcctcacgcctgtaatggctgtgaacatgcttacccagcaggaggtccctgtcgttattttggccaaagctgacttggaaggctctctggattcaaaaataggaattcccagtactagctcagaggacaccatcttagcccaaaccctgggcctggcctactctgaagtcattgaaactttgccagatggcacagagagactgagcagctctgctgagttcacaggtatgacccggcaggatgcttttctagccctgactcagaaagcccgggggaagagagtgggtggagacgtgacaagtgataaactgaaagactggctgatttcacggcagcggtactggggcacaccaatccccattgtccactgcccagtctgtggccccacacctgtgcccctggaggacttgcctgtgaccctgcccaacatcgcgtctttcactggcaagggaggccccccactggccatggcttcagagtgggtgaactgctcctgcccaaggtgcaagggagcagccaagagagagacagacacgatggatacctttgttgattctgcttggtactacttcagatacactgaccctcataatccacacagcccttttaacacagcagtggccgattactggatgcctgtggatttgtacattggagggaaagaacatgccgtcatgcacttgttctatgcaagattctttagtcatttttgccatgatcaaaaaatggttaaacatagggagccttttcataagctgctggcccaaggccttatcaaggggcagacattccgcctaccatctggacagtatctacagagagaggaagtggatctcacaggttccgttcctgttcatgcaaaaacgaaagagaagttagaggtgacgtgggagaagatgagtaagtccaaacacaacggggtggacccagaggaagttgtggagcagtatgggatcgacacgattcggctctacatcctttttgctgcccctcctgagaaggatatcttgtgggatgtgaaaactgatgctctccctggggtgctgagatggcaacaacgactgtggaccttgacaactcggtttattgaggccagggcttctgggaagtctccccagcctcagctgctgagtaacaaggagaaagctgaggccaggaagctctgggagtacaagaactccgtcatctctcaggtgaccacccatttcacagaggacttctcactgaattctgcaatttctcagctgatgggactcagcaatgccctctcgcaagcctctcagagcgtcattctccacagccccgagtttgaggatgctttgtgtgccctgatggtaatggctgctccactggcccctcatgtaacctcagagatctgggcaggcctggcgctggtgccgaggaagctctgtgcccactacacttgggatgccagtgtgctgctccaggcatggcctgctgtggacccggagttcctgcagcagcctgaggttgtccagatggcagttctgatcaacaataaagcttgtggcaaaattcctgtgccccaacaagttgcccgggaccaggacaaagtccacgaatttgttcttcaaagcgagctgggtgtcaggcttttgcaaggacgaagcatcaagaagtccttcctttccccgagaactgccctcatcaacttcctggtgcaagattgacagccaggaggctgcagctaccacgagggcctctgaggaacctccttccaggcctgggatgagggggcgatgtctgctggcccaggggaagggaaaagacaaatgtcttgactgttgacctcggtcctgtggcagactgcagtcaacagtgtgcctctgtagtgtggcctggtgctggggtgaaggtgagctgggcaaaggagaaatatgagctactgaggagggggttggacatcctgcccctcaccccccacccacactgcaggtagaggaggccatctgatcccatgggaagccatcagagacactgctggtgggagcaggaaggagcagtgcccctcgagcagccaggaagcctgcggatctgggaaatggctctgccttaggcacttctcgggaatttgaggccagcctgaggaactgcaggactcaggtgcaatgtgccagccacttggaactgctaactgagcctccagatggtagtgaatggtctctttgccttcaggctggatgaggaagtcatttaggaaatgttcaaataaccaatatgtggaaatggacacagggatcttctgaagttgctttgaatcaaaaggcaggcagtgctggttcctctgcctgtgtccccaccactccccagctctgtcatgcaggcctgtcctccccaaccccagctggatgtgcctcccaggcctgctgtggttctgacacacaggatcccaggcaaggcaccacttcctcacatgaatgaggagcagcaagtcataaccactcccttgggtatacaatttgctgtgtagtgaagtggaaccaggctcaggctgctggtcccaacctcagagccccaccgcagcccagtagggatgcagcacgccccagagggctcatgtgggccccagatggcaatgccaccattgttgatgtgactccagagccagttattaggaagagcaagctcaccacagaggagtggaactgaggccccccagatgttgcctccggtgtccaagccacagcggtctggctgttgggaagatggccaggaatggactcataccattggcacattaggctaatcctggttttatgtgaagtcagcaattaagtgttcccactagaactgacctaagccactgattaatatttaatgagggaaggtaggggagaatctagccattttataatgccagaaatctatatatgttatctgatgccatttttctgaagtagcctcacatgtggtccccctgcagttcagcagttaacagatgacttttttagtgtaataaaatgtttatcatctatga

SEQ ID NO: 15968 - DNA, 2800 bp, Homo sapiens
  source 1..2800: mol_type = unassigned DNA
atcgataaagttgctgttttgacaacatggcggcgcccatggtccgtggcccggcagtgctcgcctaaaggtggagaacgaggagtagaggagccgcaggccagagcctgtgagcagggccttctcaccttctgaagaatggcttctgtttggcagagattgggtttttatgcctctcttctgaaaagacagctaaatggtgggccagatgtcatcaagtgggaaaggagagtaattcccggatgtaccagaagcatctacagtgccacgggaaagtggacaaaagagtatacattgcagacaagaaaggatgttgagaaatggtggcatcaacgaataaaagaacaggcctccaaaatttcagaagctgatgtcatcaaccccatgggatgggatgcttttggattgcctgctgaaaatgccgcagtcgagaggaatctacatccacaaagttggacacaaagtaatattaaacacatgaggaaacagcttgatcgtctgggcctgtgtttcagctgggatagggaaataactacgtgtttgccagattactacaagtggactcagtatctctttattaaactgtatgaggctgggctggcctatcaaaaggaggccctggttaactgggacccagtggatcaaacagtgcttgccaatgagcaggtggatgaacatggctgttcatggcgttctggagcaaaggtggaacagaagtacctcagacaatggtttattaagacaaccgcttatgcaaaggccatgcaggacgcgttggcagaccttccagaatggtatggaataaaaggcatgcaagcccactggattggggactgtgtgggctgccacctggacttcacattaaaggttcatgggcaagccacgggcgaaaagctgactgcctatacggccacccctgaagccatttatggcacctcccacgtggccatctcgcccagccacagactcctacatgggcacagctctctgaaggaagccttgaggatggcccttgtccctggcaaagattgcctcacgcctgtaatggctgtgaacatgcttacccagcaggaggtccctgtcgttattttggccaaagctgacttggaaggctctctggattcaaaaataggaattcccagtactagctcagaggacaccatcttagcccaaaccctgggcctggcctactctgaagtcattgaaactttgccagatggcacagagagactgagcagctctgctgagttcacaggtatgacccggcaggatgcttttctagccctgactcagaaagcccgggggaagagagtgggtggagacgtgacaagtgataaactgaaagactggctgatttcacggcagcggtactggggcacaccaatccccattgtccactgcccagtctgtggccccacacctgtgcccctggaggacttgcctgtgaccctgcccaacatcgcgtctttcactggcaagggaggccccccactggccatggcttcagagtgggtgaactgctcctgcccaaggtgcaagggagcagccaagagagagacagacacgatggatacctttgttgattctgcttggtactacttcagatacactgaccctcataatccacacagcccttttaacacagcagtggccgattactggatgcctgtggatttgtacattggagggaaagaacatgccgtcatgcacttgttctatgcaagattctttagtcatttttgccatgatcaaaaaatggttaaacatagggagccttttcataagctgctggcccaaggccttatcaaggggcagacattccgcctaccatctggacagtatctacagagagaggaagtggatctcacaggttccgttcctgttcatgcaaaaacgaaagagaagttagaggtgacgtgggagaagatgagtaagtccaaacacaacggggtggacccagaggaagttgtggagcagtatgggatcgacacgattcggctctacatcctttttgctgcccctcctgagaaggatatcttgtgggatgtgaaaactgatgctctccctggggtgctgagatggcaacaacgactgtggaccttgacaactcggtttattgaggccagggcttctgggaagtctccccagcctcagctgctgagtaacaaggagaaagctgaggccaggaagctctgggagtacaagaactccgtcatctctcaggtgaccacccatttcacagaggacttctcactgaattctgcaatttctcagctgatgggactcagcaatgccctctcgcaagcctctcagagcgtcattctccacagccccgagtttgaggatgctttgtgtgccctgatggtaatggctgctccactggcccctcatgtaacctcagagatctgggcaggcctggcgctggtgccgaggaagctctgtgcccactacacttgggatgccagtgtgctgctccaggcatggcctgctgtggacccggagttcctgcagcagcctgaggttgtccagatggcagttctgatcaacaataaagcttgtggcaaaattcctgtgccccaacaagttgcccgggaccaggacaaagtccacgaatttgttcttcaaagcgagctgggtgtcaggcttttgcaaggacgaagcatcaagaagtccttcctttccccgagaactgccctcatcaacttcctggtgcaagattgacagccaggaggctgcagctaccacgagggcctctgaggaacctccttccaggcctgggatgagggggcgatgtctgctg

SEQ ID NO: 15969 - DNA, 4744 bp, Homo sapiens
  source 1..4744: mol_type = unassigned DNA
gctatcgataaagttgctgttttgacaacatggcggcgcccatggtccgtggcccggcagtgctcgcctaaaggtggagaacgaggagtagaggagccgcaggccagagcctgtgagcagggccttctcaccttctgaagaatggcttctgtttggcagagattgggtttttatgcctctcttctgaaaagacagctaaatggtgggccagatgtcatcaagtgggaaaggagagtaattcccggatgtaccagaagcatctacagtgccacgggaaagtggacaaaagagtatacattgcagacaagaaaggatgttgagaaatggtggcatcaacgaataaaagaacaggcctccaaaatttcagaagctgataaatcgaagccaaaattttacgtgctttccatgttcccttatccttctggtaagctgcacatgggccatgtgcgtgtctacaccatcagcgacaccatagcacggttccagaagatgagagggatgcaggtcatcaaccccatgggatgggatgcttttggattgcctgctgaaaatgccgcagtcgagaggaatctacatccacaaagttggacacaaagtaatattaaacacatgaggaaacagcttgatcgtctgggcctgtgtttcagctgggatagggaaataactacgtgtttgccagattactacaagtggactcagtatctctttattaaactgtatgaggctgggctggcctatcaaaaggaggccctggttaactgggacccagtggatcaaacagtgcttgccaatgagcaggtggatgaacatggctgttcatggcgttctggagcaaaggtggaacagaagtacctcagacaatggtttattaagacaaccgcttatgcaaaggccatgcaggacgcgttggcagaccttccagaatggtatggaataaaaggcatgcaagcccactggattggggactgtgtgggctgccacctggacttcacattaaaggttcatgggcaagccacgggcgaaaagctgactgcctatacggccacccctgaagccatttatggcacctcccacgtggccatctcgcccagccacagactcctacatgggcacagctctctgaaggaagccttgaggatggcccttgtccctggcaaagattgcctcacgcctgtaatggctgtgaacatgcttacccagcaggaggtccctgtcgttattttggccaaagctgacttggaaggctctctggattcaaaaataggaattcccagtactagctcagaggacaccatcttagcccaaaccctgggcctggcctactctgaagtcattgaaactttgccagatggcacagagagactgagcagctctgctgagttcacaggtatgacccggcaggatgcttttctagccctgactcagaaagcccgggggaagagagtgggtggagacgtgacaagtgataaactgaaagactggctgatttcacggcagcggtactggggcacaccaatccccattgtccactgcccagtctgtggccccacacctgtgcccctggaggacttgcctgtgaccctgcccaacatcgcgtctttcactggcaagggaggccccccactggccatggcttcagagtgggtgaactgctcctgcccaaggtgcaagggagcagccaagagagagacagacacgatggatacctttgttgattctgcttggtactacttcagatacactgaccctcataatccacacagcccttttaacacagcagtggccgattactggatgcctgtggatttgtacattggagggaaagaacatgccgtcatgcacttgttctatgcaagattctttagtcatttttgccatgatcaaaaaatggttaaacatagggagccttttcataagctgctggcccaaggccttatcaaggggcagacattccgcctaccatctggacagtatctacagagagaggaagtggatctcacaggttccgttcctgttcatgcaaaaacgaaagagaagttagaggtgacgtgggagaagatgagtaagtccaaacacaacggggtggacccagaggaagttgtggagcagtatgggatcgacacgattcggctctacatcctttttgctgcccctcctgagaaggatatcttgtgggatgtgaaaactgatgctctccctggggtgctgagatggcaacaacgactgtggaccttgacaactcggtttattgaggccagggcttctgggaagtctccccagcctcagctgctgagtaacaaggagaaagctgaggccaggaagctctgggagtacaagaactccgtcatctctcaggtgaccacccatttcacagaggacttctcactgaattctgcaatttctcagctgatgggactcagcaatgccctctcgcaagcctctcagagcgtcattctccacagccccgagtttgaggatgctttgtgtgccctgatggtaatggctgctccactggcccctcatgtaacctcagagatctgggcaggcctggcgctggtgccgaggaagctctgtgcccactacacttgggatgccagtgtgctgctccaggcatggcctgctgtggacccggagttcctgcagcagcctgaggttgtccagatggcagttctgatcaacaataaagcttgtggcaaaattcctgtgccccaacaagttgcccgggaccaggacaaagtccacgaatttgttcttcaaagcgagctgggtgtcaggcttttgcaaggacgaagcatcaagaagtccttcctttccccgagaactgccctcatcaacttcctggtgcaagattgacagccaggaggctgcagctaccacgagggcctctgaggaacctccttccaggcctgggatgagggggcgatgtctgctggcccaggggaagggaaaagacaaatgtcttgactgttgacctcggtcctgtggcagactgcagtcaacagtgtgcctctgtagtgtggcctggtgctggggtgaaggtgagctgggcaaaggagaaatatgagctactgaggagggggttggacatcctgcccctcaccccccacccacactgcaggtagaggaggccatctgatcccatgggaagccatcagagacactgctggtgggagcaggaaggagcagtgcccctcgagcagccaggaagcctgcggatctgggaaatggctctgccttaggcacttctcgggaatttgaggccagcctgaggaactgcaggactcaggtgcaatgtgccagccacttggaactgctaactgagcctccagatggtagtgaatggtctctttgccttcaggctggatgaggaagtcatttaggaaatgttcaaataaccaatatgtggaaatggacacagggatcttctgaagttgctttgaatcaaaaggcaggcagtgctggttcctctgcctgtgtccccaccactccccagctctgtcatgcaggcctgtcctccccaaccccagctggatgtgcctcccaggcctgctgtggttctgacacacaggatcccaggcaaggcaccacttcctcacatgaatgaggagcagcaagtcataaccactcccttgggtatacaatttgctgtgtagtgaagtggaaccaggctcaggctgctggtcccaacctcagagccccaccgcagcccagtagggatgcagcacgccccagagggctcatgtgggccccagatggcaatgccaccattgttgatgtgactccagagccagttattaggaagagcaagctcaccacagaggagtggaactgaggccccccagatgttgcctccggtgtccaagccacagcggtctggctgttgggaagatggccaggaatggactcataccattggcacattaggctaatcctggttttatgtgaagtcagcaattaagtgttcccactagaactgacctaagccactgattaatatttaatgagggaaggtaggggagaatctagccattttataatgccagaaatctatatatgttatctgatgccatttttctgaagtagcctcacatgtggtccccctgcagttcagcagttaacagatgacttttttagtgtaataaaatgtttatcatctatgacttcaggacatatgtgtgatcctggaatacaccatattccaatttcagagttaattacaaacagattgaggtattccatcatcatcggaagcattggctgtgtgtctgactccacatggaatgctataaagtgggatacatgtggttcttcttgttccagaacttacagtccatggtagacaacactgatacaggcaaactagcaacagcaattaagtcactggttctcagacttaatactctgcctggtcctcatgcccagatattccaatttaattggtccatggtgtggcttgaacaccaggaatctttaaaactccacaagtgattctaatgggcagcaaagtttgagaatcactggacacattgatgcacttgagccatcatttctatctagttcttcctcttcctaatcttcaggttagcggggataagtttggtccaggaccaagagttggaccaaaagggaagacaggggccagaagtctagagtgctagagccgacttgaatgtactcagtctcattgcacatggcagtgaatatggattaaatataagcccatgaaaatatttggtacaaggaa

SEQ ID NO: 15970 - DNA, 566 bp, Homo sapiens
  source 1..566: mol_type = unassigned DNA
agtgctcgcctaaaggtggagaacgaggagtagaggagccgcaggccagagcctgtgagcaggtcgttttcacgttagggctcggaggtcctcagaaagatgaggttccagacgagaaatccgcctgaggtcacagatccagacctacagataaaaaacattatttaatctatctgggatttactccggcttatgatttgagggccttctcaccttctgaagaatggcttctgtttggcagagattgggtttttatgcctctcttctgaaaagacagctaaatggtgggccagatgtcatcaagtgggaaaggagagtaattcccggatgtaccagaagcatctacagtgccacgggaaagtggacaaaagagtatacattgcagacaagaaaggatgttgagaaatggtggcatcaacgaataaaagaacaggcctccaaaatttcagaagctgataaatcgaagccaaaattttacgtgctttccatgttcccttatccttctggtaagctgcacatgggccatgtgcgtgtctacaccatcagcgacaccatagcacggttcc

SEQ ID NO: 15971 - DNA, 3969 bp, Homo sapiens
  source 1..3969: mol_type = unassigned DNA
cttcctggactggggatcccggctaaatatagctgtttctgtcttacaacacaggctccagtatataaatcaggcaaattccccatttgagcatgaacctctgaaaactgccggcatctgaggtttcctccaaggccctctgaagtgcagcccataatgaaggtcttggcggcaggagttgtgcccctgctgttggttctgcactggaaacatggggcggggagccccctccccatcacccctgtcaacgccacctgtgccatacgccacccatgtcacaacaacctcatgaaccagatcaggagccaactggcacagctcaatggcagtgccaatgccctctttattctctattacacagcccagggggagccgttccccaacaacctggacaagctatgtggccccaacgtgacggacttcccgcccttccacgccaacggcacggagaaggccaagctggtggagctgtaccgcatagtcgtgtaccttggcacctccctgggcaacatcacccgggaccagaagatcctcaaccccagtgccctcagcctccacagcaagctcaacgccaccgccgacatcctgcgaggcctccttagcaacgtgctgtgccgcctgtgcagcaagtaccacgtgggccatgtggacgtgacctacggccctgacacctcgggtaaggatgtcttccagaagaagaagctgggctgtcaactcctggggaagtataagcagatcatcgccgtgttggcccaggccttctagcaggaggtcttgaagtgtgctgtgaaccgagggatctcaggagttgggtccagatgtgggggcctgtccaagggtggctggggcccagggcatcgctaaacccaaatgggggctgctggcagaccccgagggtgcctggccagtccactccactctgggctgggctgtgatgaagctgagcagagtggaaacttccatagggagggagctagaagaaggtgccccttcctctgggagattgtggactggggagcgtgggctggacttctgcctctacttgtccctttggccccttgctcactttgtgcagtgaacaaactacacaagtcatctacaagagccctgaccacagggtgagacagcagggcccaggggagtggaccagcccccagcaaattatcaccatctgtgcctttgctgccccttaggttgggacttaggtgggccagaggggctaggatcccaaaggactccttgtcccctagaagtttgatgagtggaagatagagaggggcctctgggatggaaggctgtcttcttttgaggatgatcagagaacttgggcataggaacaatctggcagaagtttccagaaggaggtcacttggcattcaggctcttggggaggcagagaagccaccttcaggcctgggaaggaagacactgggaggaggagaggcctggaaagctttggtaggttcttcgttctcttccccgtgatcttccctgcagcctgggatggccagggtctgatggctggacctgcagcaggggtttgtggaggtgggtagggcaggggcaggttgctaagtcaggtgcagaggttctgagggacccaggctcttcctctgggtaaaggtctgtaagaaggggctggggtagctcagagtagcagctcacatctgaggccctgggaggccttgtgaggtcacacagaggtacttgagggggactggaggccgtctctggtccccagggcaagggaacagcagaacttagggtcagggtctcagggaaccctgagctccaagcgtgctgtgcgtctgacctggcatgatttctatttattatgatatcctatttatattaacttattggtgctttcagtggccaagttaattcccctttccctggtccctactcaacaaaatatgatgatggctcccgacacaagcgccagggccagggcttagcagggcctggtctggaagtcgacaatgttacaagtggaataagccttacgggtgaagctcagagaagggtcggatctgagagaatggggaggcctgagtgggagtggggggccttgctccacccccccccatcccctactgtgacttgctttagggtgtcagggtccaggctgcaggggctgggccaatttgtggagaggccgggtgcctttctgtcttgattccagggggctggttcacactgttcttgggcgccccagcattgtgttgtgaggcgcactgttcctggcagatattgtgccccctggagcagtgggcaagacagtccttgtggcccaccctgtccttgtttctgtgtccccatgctgcctctgaaatagcgccctggaacaaccctgcccctgcacccagcatgctccgacacagcagggaagctcctcctgtggcccggacacccatagacggtgcggggggcctggctgggccagaccccaggaaggtggggtagactggggggatcagctgcccattgctcccaagaggaggagagggaggctgcagatgcctgggactcagaccaggaagctgtgggccctcctgctccacccccatcccactcccacccatgtctgggctcccaggcagggaacccgatctcttcctttgtgctggggccaggcgagtggagaaacgccctccagtctgagagcaggggagggaaggaggcagcagagttggggcagctgctcagagcagtgttctggcttcttctcaaaccctgagcgggctgccggcctccaagttcctccgacaagatgatggtactaattatggtacttttcactcactttgcacctttccctgtcgctctctaagcactttacctggatggcgcgtgggcagtgtgcaggcaggtcctgaggcctggggttggggtggagggtgcggcccggagttgtccatctgtccatcccaacagcaagacgaggatgtggctgttgagatgtgggccacactcacccttgtccaggatgcagggactgccttctccttcctgcttcatccggcttagcttggggctggctgcattcccccaggatgggcttcgagaaagacaaacttgtctggaaaccagagttgctgattccacccggggggcccggctgactcgcccatcacctcatctccctgtggacttgggagctctgtgccaggcccaccttgcggccctggctctgagtcgctctcccacccagcctggacttggccccatgggacccatcctcagtgctccctccagatcccgtccggcagcttggcgtccaccctgcacagcatcactgaatcacagagcctttgcgtgaaacagctctgccaggccgggagctgggtttctcttccctttttatctgctggtgtggaccacacctgggcctggccggaggaagagagagtttaccaagagagatgtctccgggcccttatttattatttaaacatttttttaaaaagcactgctagtttacttgtctctcctccccatcgtccccatcgtcctccttgtccctgacttggggcacttccaccctgacccagccagtccagctctgccttgccggctctccagagtagacatagtgtgtggggttggagctctggcacccggggaggtagcatttccctgcagatggtacagatgttcctgccttagagtcatctctagttccccacctcaatcccggcatccagccttcagtcccgcccacgtgctagctccgtgggcccaccgtgcggccttagaggtttccctccttcctttccactgaaaagcacatggccttgggtgacaaattcctctttgatgaatgtaccctgtggggatgtttcatactgacagattatttttatttattcaatgtcatatttaaaatatttattttttataccaaatgaatacttttttttttaagaaaaaaaagagaaatgaataaagaatctactcttggctggc

SEQ ID NO: 15972 - DNA, 10089 bp, Homo sapiens
  source 1..10089: mol_type = unassigned DNA
aatcctaaccctctctcccagaacgtgtctctgctgcaaggcaccgggccctttcgctctgcagaactgcacttgcaagaccattatcaactcctaatcccagctcagaaagggagcctctgcgactcattcatcgccctccaggactgactgcattgcacagatgatggatatttacgtatgtttgaaacgaccatcctggatggtggacaataaaagaatgaggactgcttcaaatttccagtggctgttatcaacatttattcttctatatctaatgaatcaagtaaatagccagaaaaagggggctcctcatgatttgaagtgtgtaactaacaatttgcaagtgtggaactgttcttggaaagcaccctctggaacaggccgtggtactgattatgaagtttgcattgaaaacaggtcccgttcttgttatcagttggagaaaaccagtattaaaattccagctctttcacatggtgattatgaaataacaataaattctctacatgattttggaagttctacaagtaaattcacactaaatgaacaaaacgtttccttaattccagatactccagagatcttgaatttgtctgctgatttctcaacctctacattatacctaaagtggaacgacaggggttcagtttttccacaccgctcaaatgttatctgggaaattaaagttctacgtaaagagagtatggagctcgtaaaattagtgacccacaacacaactctgaatggcaaagatacacttcatcactggagttgggcctcagatatgcccttggaatgtgccattcattttgtggaaattagatgctacattgacaatcttcatttttctggtctcgaagagtggagtgactggagccctgtgaagaacatttcttggatacctgattctcagactaaggtttttcctcaagataaagtgatacttgtaggctcagacataacattttgttgtgtgagtcaagaaaaagtgttatcagcactgattggccatacaaactgccccttgatccatcttgatggggaaaatgttgcaatcaagattcgtaatatttctgtttctgcaagtagtggaacaaatgtagtttttacaaccgaagataacatatttggaaccgttatttttgctggatatccaccagatactcctcaacaactgaattgtgagacacatgatttaaaagaaattatatgtagttggaatccaggaagggtgacagcgttggtgggcccacgtgctacaagctacactttagttgaaagtttttcaggaaaatatgttagacttaaaagagctgaagcacctacaaacgaaagctatcaattattatttcaaatgcttccaaatcaagaaatatataattttactttgaatgctcacaatccgctgggtcgatcacaatcaacaattttagttaatataactgaaaaagtttatccccatactcctacttcattcaaagtgaaggatattaattcaacagctgttaaactttcttggcatttaccaggcaactttgcaaagattaattttttatgtgaaattgaaattaagaaatctaattcagtacaagagcagcggaatgtcacaatcaaaggagtagaaaattcaagttatcttgttgctctggacaagttaaatccatacactctatatacttttcggattcgttgttctactgaaactttctggaaatggagcaaatggagcaataaaaaacaacatttaacaacagaagccagtccttcaaaggggcctgatacttggagagagtggagttctgatggaaaaaatttaataatctattggaagcctttacccattaatgaagctaatggaaaaatactttcctacaatgtatcgtgttcatcagatgaggaaacacagtccctttctgaaatccctgatcctcagcacaaagcagagatacgacttgataagaatgactacatcatcagcgtagtggctaaaaattctgtgggctcatcaccaccttccaaaatagcgagtatggaaattccaaatgatgatctcaaaatagaacaagttgttgggatgggaaaggggattctcctcacctggcattacgaccccaacatgacttgcgactacgtcattaagtggtgtaactcgtctcggtcggaaccatgccttatggactggagaaaagttccctcaaacagcactgaaactgtaatagaatctgatgagtttcgaccaggtataagatataattttttcctgtatggatgcagaaatcaaggatatcaattattacgctccatgattggatatatagaagaattggctcccattgttgcaccaaattttactgttgaggatacttctgcagattcgatattagtaaaatgggaagacattcctgtggaagaacttagaggctttttaagaggatatttgttttactttggaaaaggagaaagagacacatctaagatgagggttttagaatcaggtcgttctgacataaaagttaagaatattactgacatatcccagaagacactgagaattgctgatcttcaaggtaaaacaagttaccacctggtcttgcgagcctatacagatggtggagtgggcccggagaagagtatgtatgtggtgacaaaggaaaattctgtgggattaattattgccattctcatcccagtggcagtggctgtcattgttggagtggtgacaagtatcctttgctatcggaaacgagaatggattaaagaaaccttctaccctgatattccaaatccagaaaactgtaaagcattacagtttcaaaagagtgtctgtgagggaagcagtgctcttaaaacattggaaatgaatccttgtaccccaaataatgttgaggttctggaaactcgatcagcatttcctaaaatagaagatacagaaataatttccccagtagctgagcgtcctgaagatcgctctgatgcagagcctgaaaaccatgtggttgtgtcctattgtccacccatcattgaggaagaaataccaaacccagccgcagatgaagctggagggactgcacaggttatttacattgatgttcagtcgatgtatcagcctcaagcaaaaccagaagaagaacaagaaaatgaccctgtaggaggggcaggctataagccacagatgcacctccccattaattctactgtggaagatatagctgcagaagaggacttagataaaactgcgggttacagacctcaggccaatgtaaatacatggaatttagtgtctccagactctcctagatccatagacagcaacagtgagattgtctcatttggaagtccatgctccattaattcccgacaatttttgattcctcctaaagatgaagactctcctaaatctaatggaggagggtggtcctttacaaacttttttcagaacaaaccaaacgattaacagtgtcaccgtgtcacttcagtcagccatctcaataagctcttactgctagtgttgctacatcagcactgggcattcttggagggatcctgtgaagtattgttaggaggtgaacttcactacatgttaagttacactgaaagtgttcatgtgcttttaatgtagtctaaaagccaaagtatagtgactcagaatcctcaatccacaaaactcaagattgggagctctttgtgatcaagccaaagaattctcatgtactctaccttcaagaagcatttcaaggctaatacctacttgtacgtacatgtaaaacaaatcccgccgcaactgttttctgttctgttgtttgtggttttctcatgtgtatacttggtggaattgtaagtggatttgcaggccagggagaaaatgtccaagtaacaggtgaagtttatttgcctgacgtttactcctttctagatgaaaaccaagcacagattttaaaacttctaagattattctcctctatccacagcattcacaaaaattaatataatttttaatgtagtgacagcgatttagtgttttgtttgataaagtatgcttatttctgtgcctactgtataatggttatcaaacagttgtctcaggggtacaaactttgaaaacaagtgtgacactgaccagcccaaatcataatcatgttttcttgctgtgataggttttgcaagccttttcattattttttagcttttatgcttgcttccattatttcagttggttgccctaatatttaaaatttacacttctaagactagagacccacattttttaaaaatcattttattttgtgatacagtgacagctttatatgagcaaattcaatattattcataagcatgtaattccagtgacttactatgtgagatgactactaagcaatatctagcagcgttagctgtccatatagttctgattggatttcgttcctcctgaggagaccatgccgttgagcttggctacccaggcagtggtgatctttgacaccttctggtggatgttcctcccactcatgagtcttttcatcatgccacattatctgatccagtcctcacatttttaaatataaaactaaagagagaatgcttcttacaggaacagttacccaagggctgtttcttagtaactgtcataaactgatctgaatccatgggcatacctgtgttgcaggtgcagcaattgcttggtgagctgtgcagaattgattgccttcagcacagcatcctctgcccacccttgtttctcataagcgatgtctggagtgattgtggttcttggaaaagcagaaggaaaaactaaaaagtgtatcttgtattttccctgccctcaggttgcctatgtattttaccttttcatatttaaggcaaaagtacttgaaaattttaagtgtccgaataagatatgtcttttttgtttgttttttttggttgtttgtttgttttttatcatctgagattctgtaatgtatttgcaaataatggatcaattaattttttttgaagctcatattgtatctttttaaaaaccatgttgtggaaaaaagccagagtgacaagtgacaaaatctatttaggttctctgtgtatgaatcctgattttaactgctaggattcagctaaatttctgagctttatgatctgtggaaatttggaatgaaatgcaattcattttgtacatacatagtatattaaaactatataatagttcatagaaatgttcagtaatgaaaaatatatccaatcagagccatccctaaagagtgttctcttgtcttcctttgtatcctctttggctccttcccttagcttccaccccagacatcagacctggggctgccttctctccctgccaaagcttgctgttagcattgtctgcttgccctcaactcctgccttgttccctgttgaaatgtatcaatcccgtactttatctctccaggacaaggataagtgtggctacagtaaaagtttattgctctaaacggcgctaacctgagataatgagaaaaggccagaagagattgtttgatctctgtctgtcaatatatatgcatttcaactgtgaccatctggatccagggccctttctaacctatataacgactcatttgtttggttaatgatgaatatcactggggctcttaagtcctttcgttctatccaagacttcattgtttttttctgtatgaaaaaagtgcagaatatcactcacctttcccctacttttggatcccctacacgaggatcactagcttaatgagaagcagagtaacgctattaagtctgggcaagctccttataagttgctgtgtgcttaaaagaatgtgatttatgtctggggccaaagcagttttccttcttttccctcattgaattcaagacagctagacccttgtgtagatcccaggatattacctctactccccccaacctgtgtgtgtagggagagtaacaacacgggaagaggggagggaagttggaaggagattggtcacatgttcagttgtctgagatactggtaaatgtgcgctgtttgtcaatgaaggttgcatgcctgcatttacaaggtggtctcatactgattgtgctctgtccagttagattcgtggcttctcccttggaagctacaattaaggactagttagaagcagaggctagatgtgttctctccagcccttactaactgggaaaataattgagaaatccctcttttcctcagtgaaagcccagtcattggttagaaaaatctaattgtcaaactagcattatgttccatcatatctgtgggatagtaattcatgtaagacacatttttacctctcttacaagtcaattcacttacaagccagtttcaaatcaagcttcccttgcgaggaatggagatcattatggggcttattatgactacatttcttttatgagtgaccattttaaataattaatattttatttaatattaaattattaaagacttagctagacttttaacattagatgaaccttgtgaatcatatattgcatagattagcacatgtatgcaatctaggtcatcaatttgttgaatttatacagccctagatttgagattgtggccctgagtatctggatagttgagttgtgtgtttatgtgcttatatgatagaggtgctttgttcctgcagcttagaaacagaagcagccattcactgagaagcttaagagaggaagtatcaacctcattttccaaaccagcattactttcaccgctcgtggatctgaaagattacatttagaacatttagtactattacactctcagaaactgtggtaaaaagtcacattttcaaaacttcatgcatattgtattcttgttggaaataagtcctatagtttcttaattgtcttcatgccgtccatatttaacaaacattgcaagtcctttttatatttgggtaattatttgtaatttagtgaaggagactaggggatgttttcttccaaagggaatttaaaatcaattttatggtattttgaaagtaaaatactccttaacgtgtcaatatttttaaaatgttatctcgaagttttctattgctcaggtatataatctaataaaattttttgtttgctctaaggttatttttgctattctctattttgaattatgttaaaatttgtgtgcattttatgaaatgccttttttcttattttgaaagtgtaaaattgggcatctcagagtaaaatgtgggattattagctacaaagactaggcacatcgtgaaagctcagtaactaattttcttgactgagtcctatcccagagtgtcacagattcaacagaattttcctgaagggtgatacacaccaaaatctagcttgtgtggatctgagactattgactcaaagattcaaatctacttcggaagtgactccacggtttgagtgaaaactgaggaaggactcatgcctgtatatcactagatatcttatttctccataattttaagtgttcataatttcttcttctttgatgggtgtgcaactggggcatgtttgtaccagccagcatgtgttctgcccaacagtgtgtccgtgtgtgaggttaactgattcagaactcattctcttgataaactatttcttgaaagcatttattttaagtctttatttcctgctgaaatgaagtttcatgctgtcatgcccatcttatttattctagaagaaaattttcatagaagaaaatgatttatggccaaagttacagaacattcatcttttagacttagccttagaatatcattggaaattacttggcttgaatttggttcgtttttatctttatggattatgtaccagggctattaataatacttaaaccccttattttgctatggtggttagatttttttattccttttcaattagtgctattaattattacatggtcgtattcatgcttattacagatgaactatttttagtgccagtgtaaaggattaagaataacattcaattagttggctatttcaggctttattgtacatggtaatgtttcagggagtgtgatttggtctagaatatatccagatccttgtaattatgatattgggttatgacaggattctattatttttagctatgaatggtgcttatttttccctatattaggaatgttaatatttggattatcagagtccatgttataaacagaatttacctatgcaagacaaattctaactgtgcaacattttcatgagaattaaaagttgtgtgttaaggggaaaaccctctgaatgtttttatgtgtaagtgcctaaagaaccgtagaaacagtacatcaaaagctcttataaaagaaaaactgattgaacattagccagaaacaaaatatgatttacatttttttttttggttgctgggactgaataccctaaaaactaagagatgtgagtggggaaaatgtctaattgataagaaagttgatttatattatatttacatgcatcttctaagattgcctttacagtagccaatcagaactttaaaaaaaaaaaagctaacaacatagatcctatgtgttgcccttaagactaaaatactttgcacacgtgattgaatggctcacttaagttgttgaatttccttatacatttaaagtgtacttccgttaagaattattccattttaaatgggtaactttcagcttccgaactattttcctaaacattccagttgtgtattataaaagatcaaaatatctctaggtggtagtacaattttcatttataacgtggaaaagttaactgttaggtttaacattagtattagtgtttttgcaattgctcatagaaaagaacactgaataatggttttcatacaatttttgtaaaacattcttctcccagtttgattccaaatgcttttccccaaattgtctaatatatcataagctagtgtttccttgtatttaatttttccttccaacacaatatttaggaaaaatatgaataacattgtgagtagcgggagacaacacgaaaaagaaacctttcattgttgtggaggggtaggtgttatgtgattgatgcccttcctggcgtttgttttatcctgttattttctcaaaaaagagcacggctttttcttaaatacatttaaattcagaattgcttgcaaaagattggcctggatagatagacatcctagatttaagatagtaccatcttaaaagtatgttgaaaggtaaaataaatcatttcaaaatacttaactttcctaataaggatgttaggttttcttctctttcattagctggccataagtcaaggtccttataacactaggaaattacctttttttactttcaaaattgcattatagtgaattactgtttacaaaatacacatactgtgaacagatataagtttctgtcttttataaggtttgtagaatgaatgtttttttaaagtgagtattatatgttaaatattttaagttttttataaatactagtaactgtttactaatttttgtttggtcaaatgcttgtaaatgtagctgaaagaagatagggagaaactgcggatcccaaactgttccctttttcatttcttgaaatgttaccactacagacatttttttaaggtgaataaacagttgtgatgtgctgtacctaaaatcatgtttaatcgtataaggaaacatttcaatacacttatacaggaagaaaactatagatgaagtacatgtgtgtgattcagtctgattcacagaattctgagagtaatatggaataaaacaactccacttagatgataactgaagcatttcctgccttgtgaaaatttggattttaaattgctgttagaatgggaaatttggacactttatatcattgtataatttcagaatttagtttctgtatcttttggaaaacatgattatagcaaaaacatagaaaataatctattactaaaacaccataaatgtaaaactagtatgcttggctgttaactctaaagatgttacttatgtctgtttttaaaacatgcatgtatttaacaattttatcatagtattgtcatggaaaaaataaatatattttcttacatctta

SEQ ID NO: 15973 - DNA, 4253 bp, Homo sapiens
  source 1..4253: mol_type = unassigned DNA
agtcccggctggagcgactcggccgtggcggtggccgttaccgttgcctctgggaggctctggcggcggcggcggcccgcggggttcgcggagcgcagcgggccgcccttcgcccgtggccgcctcaagcagcctcgcgccgacacaggggaggcgagacggcggctgcggaggcggcggcgcattgtgcccggccccctccttggcggctcctgcccccgggcggctgtgggatctgggcagccccggggcggcggccgaggctacagagccggcggcaggggatggcaagatagcggcgcgggagcgtaccgactgactgcattgcacagatgatggatatttacgtatgtttgaaacgaccatcctggatggtggacaataaaagaatgaggactgcttcaaatttccagtggctgttatcaacatttattcttctatatctaatgaatcaagtaaatagccagaaaaagggggctcctcatgatttgaagtgtgtaactaacaatttgcaagtgtggaactgttcttggaaagcaccctctggaacaggccgtggtactgattatgaagtttgcattgaaaacaggtcccgttcttgttatcagttggagaaaaccagtattaaaattccagctctttcacatggtgattatgaaataacaataaattctctacatgattttggaagttctacaagtaaattcacactaaatgaacaaaacgtttccttaattccagatactccagagatcttgaatttgtctgctgatttctcaacctctacattatacctaaagtggaacgacaggggttcagtttttccacaccgctcaaatgttatctgggaaattaaagttctacgtaaagagagtatggagctcgtaaaattagtgacccacaacacaactctgaatggcaaagatacacttcatcactggagttgggcctcagatatgcccttggaatgtgccattcattttgtggaaattagatgctacattgacaatcttcatttttctggtctcgaagagtggagtgactggagccctgtgaagaacatttcttggatacctgattctcagactaaggtttttcctcaagataaagtgatacttgtaggctcagacataacattttgttgtgtgagtcaagaaaaagtgttatcagcactgattggccatacaaactgccccttgatccatcttgatggggaaaatgttgcaatcaagattcgtaatatttctgtttctgcaagtagtggaacaaatgtagtttttacaaccgaagataacatatttggaaccgttatttttgctggatatccaccagatactcctcaacaactgaattgtgagacacatgatttaaaagaaattatatgtagttggaatccaggaagggtgacagcgttggtgggcccacgtgctacaagctacactttagttgaaagtttttcaggaaaatatgttagacttaaaagagctgaagcacctacaaacgaaagctatcaattattatttcaaatgcttccaaatcaagaaatatataattttactttgaatgctcacaatccgctgggtcgatcacaatcaacaattttagttaatataactgaaaaagtttatccccatactcctacttcattcaaagtgaaggatattaattcaacagctgttaaactttcttggcatttaccaggcaactttgcaaagattaattttttatgtgaaattgaaattaagaaatctaattcagtacaagagcagcggaatgtcacaatcaaaggagtagaaaattcaagttatcttgttgctctggacaagttaaatccatacactctatatacttttcggattcgttgttctactgaaactttctggaaatggagcaaatggagcaataaaaaacaacatttaacaacagaagccagtccttcaaaggggcctgatacttggagagagtggagttctgatggaaaaaatttaataatctattggaagcctttacccattaatgaagctaatggaaaaatactttcctacaatgtatcgtgttcatcagatgaggaaacacagtccctttctgaaatccctgatcctcagcacaaagcagagatacgacttgataagaatgactacatcatcagcgtagtggctaaaaattctgtgggctcatcaccaccttccaaaatagcgagtatggaaattccaaatgatgatctcaaaatagaacaagttgttgggatgggaaaggggattctcctcacctggcattacgaccccaacatgacttgcgactacgtcattaagtggtgtaactcgtctcggtcggaaccatgccttatggactggagaaaagttccctcaaacagcactgaaactgtaatagaatctgatgagtttcgaccaggtataagatataattttttcctgtatggatgcagaaatcaaggatatcaattattacgctccatgattggatatatagaagaattggctcccattgttgcaccaaattttactgttgaggatacttctgcagattcgatattagtaaaatgggaagacattcctgtggaagaacttagaggctttttaagaggatatttgttttactttggaaaaggagaaagagacacatctaagatgagggttttagaatcaggtcgttctgacataaaagttaagaatattactgacatatcccagaagacactgagaattgctgatcttcaaggtaaaacaagttaccacctggtcttgcgagcctatacagatggtggagtgggcccggagaagagtatgtatgtggtgacaaaggaaaattctgtgggattaattattgccattctcatcccagtggcagtggctgtcattgttggagtggtgacaagtatcctttgctatcggaaacgagaatggattaaagaaaccttctaccctgatattccaaatccagaaaactgtaaagcattacagtttcaaaagagtgtctgtgagggaagcagtgctcttaaaacattggaaatgaatccttgtaccccaaataatgttgaggttctggaaactcgatcagcatttcctaaaatagaagatacagaaataatttccccagtagctgagcgtcctgaagatcgctctgatgcagagcctgaaaaccatgtggttgtgtcctattgtccacccatcattgaggaagaaataccaaacccagccgcagatgaagctggagggactgcacaggttatttacattgatgttcagtcgatgtatcagcctcaagcaaaaccagaagaagaacaagaaaatgaccctgtaggaggggcaggctataagccacagatgcacctccccattaattctactgtggaagatatagctgcagaagaggacttagataaaactgcgggttacagacctcaggccaatgtaaatacatggaatttagtgtctccagactctcctagatccatagacagcaacagtgagattgtctcatttggaagtccatgctccattaattcccgacaatttttgattcctcctaaagatgaagactctcctaaatctaatggaggagggtggtcctttacaaacttttttcagaacaaaccaaacgattaacagtgtcaccgtgtcacttcagtcagccatctcaataagctcttactgctagtgttgctacatcagcactgggcattcttggagggatcctgtgaagtattgttaggaggtgaacttcactacatgttaagttacactgaaagtgttcatgtgcttttaatgtagtctaaaagccaaagtatagtgactcagaatcctcaatccacaaaactcaagattgggagctctttgtgatcaagccaaagaattctcatgtactctaccttcaagaagcatttcaaggctaatacctacttgtacgtacatgtaaaacaaatcccgccgcaactgttttctgttctgttgtttgtggttttctcatgtgtatacttggtggaattgtaagtggatttgcaggccagggagaaaatgtccaagtaacaggtgaagtttatttgcctgacgtttactcctttctagatgaaaaccaagcacagattttaaaacttctaagattattctcctctatccacagcattcacaaaaattaatataatttttaatgtagtgacagcgatttagtgttttgtttgataaagtatgcttatttctgtgcctactgtataatggttatcaaacagttgtctc

SEQ ID NO: 15974 - DNA, 760 bp, Homo sapiens
  source 1..760: mol_type = unassigned DNA
ggagcgactcggccgtggcggtggccgttaccgttgcctctgggaggctctggcggcggcggcggcccgcggggttcgcggagcgcagcgggccgcccttcgcccgtggccgcctcaagcagcctcgcgccgacacaggggaggcgagacggcggctgcggaggcggcggcgcattgtgcccggccccctccttggcggctcctgcccccgggcggctgtgggatctgggcagccccggggcggcggccgaggctacagagccggcggcaggggatggcaagatagcggcgcgggagcgtaccgtgatcggagcagctatttcctcttcaagaattgaattgagacttctttgctttgtaataggactgactgcattgcacagatgatggatatttacgtatgtttgaaacgaccatcctggatggtggacaataaaagaatgaggactgcttcaaatttccagtggctgttatcaacatttattcttctatatctaatgaatcaagtaaatagccagaaaaagggggctcctcatgatttgaagtgtgtaactaacaatttgcaagtgtggaactgttcttggaaagcaccctctggaacaggccgtggtactgattatgaagtttgcattgaaaacaggtcccgttcttgttatcagttggagaaaaccagtattaaaattccagctctttcacatggtgattatgaaataacaataaattctctacatgattttggaagttctacaagtaaattcac

SEQ ID NO: 15975 - DNA, 574 bp, Homo sapiens
  source 1..574: mol_type = unassigned DNA
caaacgcgtccggcatacagcgtaaacatcttcagaccgtgattctgcgccatcaaacgctctccagctaatttcatttggtgattactctgctagaaaaccgaggccaagtgaaactgcggaaatgggaacaatgtacggaggaaaaatctcaccccattaagagatccgtttcttctccgcacaaataagcccaccccgcctccgaggcaagactagatggctccaggatactctcggcgcgcccgctggccatctcgggcaggggagccccacacccggcaggaggaccaggacgcgagcggcggcgcctcggccctgggctgtttaggactgactgcattgcacagatgatggatatttacgtatgtttgaaacgaccatcctggatggtggacaataaaagaatgaggactgcttcaaatttccagtggctgttatcaacatttattcttctatatctaatgaatcaagtaaatagccagaaaaagggggctcctcatgatttgaagtgtgtaactaacaatttgcaagtgtggaactgttcttggaaagcaccctctggaacaggccg

SEQ ID NO: 15976 - DNA, 1077 bp, Homo sapiens
  source 1..1077: mol_type = unassigned DNA
aaatcaaatagctatccatggaatattagaacttgacttgctccatcctcttaaactttttgtgtctcacactaaagaaatgagagatgcagaattctaaggctaaatagctaggaagtattcattcaaacttgaatattcttcaaagagagtgtgggggcaactctaatcagaggaagaaactaaaggaagtaaaaccagatgttttccaccaaagccctccttttggctggtctgatttctaccgcactggcagggccatgggctaatatatgtgctggcaagtcttccaatgagatccggacgtgtgaccgccatggctgtggacagtactctgctcaaagaagtcagaggcctcaccagggtgtggacatcttgtgctctgctggatctactgtgtacgcaccattcactggaatgattgtgggccaggagaaaccttatcaaaacaagaatgctatcaataatggtgttcgaatatctggaagaggtttttgtgtcaaaatgttctacattaagccaattaagtataaaggtcctattaagaagggagaaaaacttggaactctattgcccttgcagaaagtttatcctggcatacaatcgcatgtgcacattgaaaactgtgactcgagtgaccctactgcatacctgtaaatcgaaggccaatggtcagatcttcaaaataaaaagtcatcttaaaaacctggatgcatacccttctcttcaagaaatttgtgttcacaaaggaaaaatgcatgaagggatggataccccattttccatgacatgattattacacattgcatgcctgtatcaaaacatctcacgtacctcataaacaaatacacctatgtacccacaaaaattttttaattaaaaaaaggaaatttgagtttaaatagaaacatgataaatgcaagaaagaaaacattttgattttaactcattgtcactctgatgttcatgtgaactggttgcttcgggctctttgatctgtcacctatggaatctgagtggttttattttttagatttctcagtcccgaagatctaagataaataaacaagagaactt

SEQ ID NO: 15977 - DNA, 1320 bp, Homo sapiens
  source 1..1320: mol_type = unassigned DNA
atgacccccatcctcacggtcctgatctgtctcgggctgagcctggaccccaggacccacgtgcaggcagggcccctccccaagcccaccctctgggctgagccaggctctgtgatcacccaagggagtcctgtgaccctcaggtgtcaggggagcctggagacgcaggagtaccatctatatagagaaaagaaaacagcactctggattacacggatcccacaggagcttgtgaagaagggccagttccccatcctatccatcacctgggaacatgcagggcggtattgctgtatctatggcagccacactgcaggcctctcagagagcagtgaccccctggagctggtggtgacaggagcctacagcaaacccaccctctcagctctgcccagccctgtggtgacctcaggagggaatgtgaccatccagtgtgactcacaggtggcatttgatggcttcattctgtgtgtttctaagaagccatcactctcagtgcagccgggtcctgtcgtggcccctggggagaagctgaccttccagtgtggctctgatgccggctacgacagatttgttctgtacaaggagtggggacgtgacttcctccagcgccctggccggcagccccaggctgggctctcccaggccaacttcaccctgggccctgtgagccgctcctacgggggccagtacacatgctccggtgcatacaacctctcctccgagtggtcggcccccagcgaccccctggacatcctgatcacaggacagatccgtgccagacccttcctctccgtgcggccgggccccacagtggcctcaggagagaacgtgaccctgctgtgtcagtcacagggagggatgcacactttccttttgaccaaggagggggcagctgattccccgctgcgtctaaaatcaaagcgccaatctcataagtaccaggctgaattccccatgagtcctgtgacctcggcccacgcggggacctacaggtgctacggctcactcagctccaacccctacctgctgactcaccccagtgaccccctggagctcgtggtctcaggagcagctgagaccctcagcccaccacaaaacaagtccgactccaaggctggtgagtgaggagatgcttgccgtgatgacgctgggcacagagggtcaggtcctgtcaagaggagctgggtgtcctgggtggacatttgaagaattatattcattccaacttgaagaattattcaacacctttaacaatgtatatgtgaagtactttattctttcatattttaaaaataaaagataattatccatgagaaa

SEQ ID NO: 15978 - DNA, 2878 bp, Homo sapiens
  source 1..2878: mol_type = unassigned DNA
ggggactatttggttgaaagaaaacccacaatccagtgtcaagaaagaagtcaacttttcttccctatttccctgcatttctcttctgtgctcgctgccacacgcagctcagcctgggcggcacagccagatgcgagatgcgtctctgctgatctgagtctgcctgcagcatggacctgggtcttccctgaagcatctccagggctggagggacgactgccatgcaccgagggctcatccatccacagagcagggcagtgggaggagacgccatgacccccatcctcacggtcctgatctgtctcgggctgagtctgggccccaggacccacgtgcaggcagggcacctccccaagcccaccctctgggctgaaccaggctctgtgatcacccaggggagtcctgtgaccctcaggtgtcaggggggccaggagacccaggagtaccgtctatatagagaaaagaaaacagcactctggattacacggatcccacaggagcttgtgaagaagggccagttccccatcccatccatcacctgggaacatgcagggcggtatcgctgttactatggtagcgacactgcaggccgctcagagagcagtgaccccctggagctggtggtgacaggagcctacatcaaacccaccctctcagcccagcccagccccgtggtgaactcaggagggaatgtaatcctccagtgtgactcacaggtggcatttgatggcttcagtctgtgtaaggaaggagaagatgaacacccacaatgcctgaactcccagccccatgcccgtgggtcgtcccgcgccatcttctccgtgggccccgtgagcccgagtcgcaggtggtggtacaggtgctatgcttatgactcgaactctccctatgagtggtctctacccagtgatctcctggagctcctggtcctaggtgtttctaagaagccatcactctcagtgcagccaggtcctatcgtggcccctgaggagaccctgactctgcagtgtggctctgatgctggctacaacagatttgttctgtataaggacggggaacgtgacttccttcagctcgctggcgcacagccccaggctgggctctcccaggccaacttcaccctgggccctgtgagccgctcctacgggggccagtacagatgctacggtgcacacaacctctcctccgagtggtcggcccccagcgaccccctggacatcctgatcgcaggacagttctatgacagagtctccctctcggtgcagccgggccccacggtggcctcaggagagaacgtgaccctgctgtgtcagtcacagggatggatgcaaactttccttctgaccaaggagggggcagctgatgacccatggcgtctaagatcaacgtaccaatctcaaaaataccaggctgaattccccatgggtcctgtgacctcagcccatgcggggacctacaggtgctacggctcacagagctccaaaccctacctgctgactcaccccagtgaccccctggagctcgtggtctcaggaccgtctgggggccccagctccccgacaacaggccccacctccacatctgcaggccctgaggaccagcccctcacccccaccgggtcggatccccagagtggtctgggaaggcacctgggggttgtgatcggcatcttggtggccgtcatcctactgctcctcctcctcctcctcctcttcctcatcctccgacatcgacgtcagggcaaacactggacatcgacccagagaaaggctgatttccaacatcctgcaggggctgtggggccagagcccacagacagaggcctgcagtggaggtccagcccagctgccgatgcccaggaagaaaacctctatgctgccgtgaagcacacacagcctgaggatggggtggagatggacactcggagcccacacgatgaagacccccaggcagtgacgtatgccgaggtgaaacactccagacctaggagagaaatggcctctcctccttccccactgtctggggaattcctggacacaaaggacagacaggcggaagaggacaggcagatggacactgaggctgctgcatctgaagccccccaggatgtgacctacgcccagctgcacagcttgaccctcagacgggaggcaactgagcctcctccatcccaggaagggccctctccagctgtgcccagcatctacgccactctggccatccactagcccagggggggacgcagaccccacactccatggagtctggaatgcatgggagctgcccccccagtggacaccattggaccccacccagcctggatctaccccaggagactctgggaacttttaggggtcactcaattctgcagtataaataactaatgtctctacaattttgaaataaagcaacagacttctcaataatcaatgaagtagctgagaaaactaagtcagaaagtgcattaaactgaatcacaatgtaaatattacacatcaagcgatgaaactggaaaactacaagccacgaatgaatgaattaggaaagaaaaaaagtaggaaatgaatgatcttggctttcctataagaaatttagggcagggcacggtggctcacgcctgtaattccagcactttgggaggccgaggcgggcagatcacgagttcaggagatcgagaccatcttggccaacatggtgaaaccctgtctctcctaaaaatacaaaaattagctggatgtggtggcagtgcctgtaatcccagctatttgggaggctgaggcaggagaatcgcttgaaccagggagtcagaggtttcagtgagccaagatcgcaccactgctctccagcctggcgacagagggagactccatctcaaatt

SEQ ID NO: 15979 - DNA, 2776 bp, Homo sapiens
  source 1..2776: mol_type = unassigned DNA
cgcagctcagcctgggcggcacagccagatgcgagatgcgtctctgctgatctgagtctgcctgcagcatggacctgggtcttccctgaagcatctccagggctggagggacgactgccatgcaccgagggctcatccatccacagagcagggcagtgggaggagacgccatgacccccatcctcacggtcctgatctgtctcgggctgagtctgggccccaggacccacgtgcaggcagggcacctccccaagcccaccctctgggctgaaccaggctctgtgatcacccaggggagtcctgtgaccctcaggtgtcaggggggccaggagacccaggagtaccgtctatatagagaaaagaaaacagcactctggattacacggatcccacaggagcttgtgaagaagggccagttccccatcccatccatcacctgggaacatgcagggcggtatcgctgttactatggtagcgacactgcaggccgctcagagagcagtgaccccctggagctggtggtgacaggagcctacatcaaacccaccctctcagcccagcccagccccgtggtgaactcaggagggaatgtaatcctccagtgtgactcacaggtggcatttgatggcttcagtctgtgtaaggaaggagaagatgaacacccacaatgcctgaactcccagccccatgcccgtgggtcgtcccgcgccatcttctccgtgggccccgtgagcccgagtcgcaggtggtggtacaggtgctatgcttatgactcgaactctccctatgagtggtctctacccagtgatctcctggagctcctggtcctaggtgtttctaagaagccatcactctcagtgcagccaggtcctatcgtggcccctgaggagaccctgactctgcagtgtggctctgatgctggctacaacagatttgttctgtataaggacggggaacgtgacttccttcagctcgctggcgcacagccccaggctgggctctcccaggccaacttcaccctgggccctgtgagccgctcctacgggggccagtacagatgctacggtgcacacaacctctcctccgagtggtcggcccccagcgaccccctggacatcctgatcgcaggacagttctatgacagagtctccctctcggtgcagccgggccccacggtggcctcaggagagaacgtgaccctgctgtgtcagtcacagggatggatgcaaactttccttctgaccaaggagggggcagctgatgacccatggcgtctaagatcaacgtaccaatctcaaaaataccaggctgaattccccatgggtcctgtgacctcagcccatgcggggacctacaggtgctacggctcacagagctccaaaccctacctgctgactcaccccagtgaccccctggagctcgtggtctcaggaccgtctgggggccccagctccccgacaacaggccccacctccacatctggccctgaggaccagcccctcacccccaccgggtcggatccccagagtggtctgggaaggcacctgggggttgtgatcggcatcttggtggccgtcatcctactgctcctcctcctcctcctcctcttcctcatcctccgacatcgacgtcagggcaaacactggacatcgacccagagaaaggctgatttccaacatcctgcaggggctgtggggccagagcccacagacagaggcctgcagtggaggtccagcccagctgccgatgcccaggaagaaaacctctatgctgccgtgaagcacacacagcctgaggatggggtggagatggacactcggcagagcccacacgatgaagacccccaggcagtgacgtatgccgaggtgaaacactccagacctaggagagaaatggcctctcctccttccccactgtctggggaattcctggacacaaaggacagacaggcggaagaggacaggcagatggacactgaggctgctgcatctgaagccccccaggatgtgacctacgcccagctgcacagcttgaccctcagacgggaggcaactgagcctcctccatcccaggaagggccctctccagctgtgcccagcatctacgccactctggccatccactagcccagggggggacgcagaccccacactccatggagtctggaatgcatgggagctgcccccccagtggacaccattggaccccacccagcctggatctaccccaggagactctgggaacttttaggggtcactcaattctgcagtataaataactaatgtctctacaattttgaaataaagcaacagacttctcaataatcaatgaagtagctgagaaaactaagtcagaaagtgcattaaactgaatcacaatgtaaatattacacatcaagcgatgaaactggaaaactacaagccacgaatgaatgaattaggaaagaaaaaaagtaggaaatgaatgatcttggctttcctataagaaatttagggcagggcacggtggctcacgcctgtaattccagcactttgggaggccgaggcgggcagatcacgagttcaggagatcgagaccatcttggccaacatggtgaaaccctgtctctcctaaaaatacaaaaattagctggatgtggtggcagtgcctgtaatcccagctatttgggaggctgaggcaggagaatcgcttgaaccagggagtcagaggtttcagtgagccaagatcgcaccactgctctccagcctggcgacagagggagactccatctcaaatt

SEQ ID NO: 15980 - DNA, 2784 bp, Homo sapiens
  source 1..2784: mol_type = unassigned DNA
ggggaagccactgctaccctcatcaggaagggcagacacaagaagcaccagttctatttgctgctacatcccggctctcgcaccgagggctcatccatccgcagagcagggcagtgggaggagacgccatgacccccatcgtcacagtcctgatctgtctcgggctgagtctgggccccaggacccacgtgcagacagggaccattcccaagcccaccctgtgggctgagccagactctgtgatcacccaggggagtcccgtcaccctcagttgtcaggggagccttgaagcccaggagtaccgtctatatagggagaaaaaatcagcatcttggattacacggatacgaccagagcttgtgaagaacggccagttccacatcccatccatcacctgggaacacacagggcgatatggctgtcagtattacagccgcgctcggtggtctgagctcagtgaccccctggtgctggtgatgacaggagcctacccaaaacccaccctctcagcccagcccagccctgtggtgacctcaggaggaagggtgaccctccagtgtgagtcacaggtggcatttggcggcttcattctgtgtaaggaaggagaagaagaacacccacaatgcctgaactcccagccccatgcccgtgggtcgtcccgcgccatcttctccgtgggccccgtgagcccgaatcgcaggtggtcgcacaggtgctatggttatgacttgaactctccctatgtgtggtcttcacccagtgatctcctggagctcctggtcccaggtgtttctaagaagccatcactctcagtgcagccgggtcctgtcgtggcccctggggaaagcctgaccctccagtgtgtctctgatgtcggctatgacagatttgttctgtacaaggagggggaacgtgaccttcgccagctccctggccggcagccccaggctgggctctcccaggccaacttcaccctgggccctgtgagccgctcctacgggggccagtacagatgctacggtgcacacaacctctcctctgagtgctcggcccccagcgaccccctggacatcctgatcacaggacagatccgtggcacacccttcatctcagtgcagccaggccccacagtggcctcaggagagaacgtgaccctgctgtgtcagtcatggcggcagttccacactttccttctgaccaaggcgggagcagctgatgccccactccgtctaagatcaatacacgaatatcctaagtaccaggctgaattccccatgagtcctgtgacctcagcccacgcggggacctacaggtgctacggctcactcaactccgacccctacctgctgtctcaccccagtgagcccctggagctcgtggtctcaggaccctccatgggttccagccccccacccaccggtcccatctccacacctggccctgaggaccagcccctcacccccactgggtcggatccccaaagtggtctgggaaggcacctgggggttgtgatcggcatcttggtggccgtcgtcctactgctcctcctcctcctcctcctcttcctcatcctccgacatcgacgtcagggcaaacactggacatcgacccagagaaaggctgatttccaacatcctgcaggggctgtggggccagagcccacagacagaggcctgcagtggaggtccagcccagctgccgacgcccaggaagaaaacctctatgctgccgtgaaggacacacagcctgaagatggggtggagatggacactcgggctgctgcatctgaagccccccaggatgtgacctacgcccagctgcacagcttgaccctcagacggaaggcaactgagcctcctccatcccaggaaagggaacctccagctgagcccagcatctacgccaccctggccatccactagcccggagggtacgcagactccacactcagtagaaggagactcaggactgctgaaggcacgggagctgcccccagtggacaccaatgaaccccagtcagcctggacccctaacaaagaccatgaggagatgctgggaactttgggactcacttgattctgcagtcgaaataactaatatccctacattttttaattaaagcaacagacttctcaataatcaatgagttaaccgagaaaactaaaatcagaagtaagaatgtgctttaaactgaatcacaatataaatattacacatcacacaatgaaattgaaaaagtacaaaccacaaatgaaaaaagtagaaacgaaaaaaaaaaactaggaaatgaatgacgttggctttcgtataaggaatttagaaaaagaataaccaattattccaaatgaaggtgtaagaaagggaataagaagaagaagagttgctcatgaggaaaaaccaaaacttgaaaattcaacaaagccaatgaagctcattcttgaaaatattaattacagtcataaatcctaactacattgagcaagagaaagaaagagcaggcacgcatttccatatgggagtgagccagcagacagcccagcagatcctacacacattttcacaaactaaccccagaacaggctgcaaacctataccaatatactagaaaatgcagattaaatggatgaaatattcaaaactggagtttacataatgaacgtaagagtaatcagagaatctgactcattttaaatgtgtgtgtatgtgtgtgtatatatatgtgtgtgtgtgtgtgtgtgtgtgtgtgtgaaaaacattgactgtaataaaaatgttcccatcgta

SEQ ID NO: 15981 - DNA, 2066 bp, Homo sapiens
  source 1..2066: mol_type = unassigned DNA
ccatgacgcccgccctcacagccctgctctgccttgggctgagtctgggccccaggacccgcgtgcaggcagggcccttccccaaacccaccctctgggctgagccaggctctgtgatcagctgggggagccccgtgaccatctggtgtcaggggagccaggaggcccaggagtaccgactgcataaagagggaagcccagagcccttggacagaaataacccactggaacccaagaacaaggccagattctccatcccatccatgacagagcaccatgcagggagataccgctgccactattacagctctgcaggctggtcagagcccagcgaccccctggagatggtgatgacaggagcctacagcaaacccaccctctcagccctgcccagccctgtggtggcctcaggggggaatatgaccctccgatgtggctcacagaagggatatcaccattttgttctgatgaaggaaggagaacaccagctcccccggaccctggactcacagcagctccacagtcgggggttccaggccctgttccctgtgggccccgtgacccccagccacaggtggaggttcacatgctattactattatacaaacaccccctgggtgtggtcccaccccagtgaccccctggagattctgccctcaggcgtgtctaggaagccctccctcctgaccctgcagggccctgtcctggcccctgggcagagcctgaccctccagtgtggctctgatgtcggctacaacagatttgttctgtataaggagggggaacgtgacttcctccagcgccctggccagcagccccaggctgggctctcccaggccaacttcaccctgggccctgtgagcccctccaatgggggccagtacaggtgctacggtgcacacaacctctcctccgagtggtcggcccccagcgaccccctgaacatcctgatggcaggacagatctatgacaccgtctccctgtcagcacagccgggccccacagtggcctcaggagagaacgtgaccctgctgtgtcagtcatggtggcagtttgacactttccttctgaccaaagaaggggcagcccatcccccactgcgtctgagatcaatgtacggagctcataagtaccaggctgaattccccatgagtcctgtgacctcagcccacgcggggacctacaggtgctacggctcatacagctccaacccccacctgctgtctcaccccagtgagcccctggagctcgtggtctcaggacactctggaggctccagcctcccacccacagggccgccctccacacctggtctgggaagatacctggaggttttgattggggtctcggtggccttcgtcctgctgctcttcctcctcctcttcctcctcctccgacgtcagcgtcacagcaaacacaggacatctgaccagagaaagactgatttccagcgtcctgcaggggctgcggagacagagcccaaggacaggggcctgctgaggaggtccagcccagctgctgacgtccaggaagaaaacctctatgctgccgtgaaggacacacagtctgaggacagggtggagctggacagtcagcagagcccacacgatgaagacccccaggcagtgacgtatgccccggtgaaacactccagtcctaggagagaaatggcctctcctccctcctcactgtctggggaattcctggacacaaaggacagacaggtggaagaggacaggcagatggacactgaggctgctgcatctgaagcctcccaggatgtgacctacgcccagctgcacagcttgacccttagacggaaggcaactgagcctcctccatcccaggaaggggaacctccagctgagcccagcatctacgccactctggccatccactagcccggggggtacgcagaccccacactcagcagaaggagactcaggactgctgaaggcacgggagctgcccccagtggacaccagtgaaccccagtcagcctggacccctaacacagaccatgaggagacgctgggaacttgtgggactcacctgactcaaagatg

SEQ ID NO: 15982 - DNA, 1761 bp, Homo sapiens
  source 1..1761: mol_type = unassigned DNA
catccatctgcacagctggggcccctgggaggagacgccatgatccccaccttcacggctctgctctgcctcgggctgagtctgggccccaggacccacatgcaggcagggcccctccccaaacccaccctctgggctgagccaggctctgtgatcagctgggggaactctgtgaccatctggtgtcaggggaccctggaggctcgggagtaccgtctggataaagaggaaagcccagcaccctgggacagacagaacccactggagcccaagaacaaggccagattctccatcccatccatgacagaggactatgcagggagataccgctgttactatcgcagccctgtaggctggtcacagcccagtgaccccctggagctggtgatgacaggagcctacagtaaacccaccctttcagccctgccgagtcctcttgtgacctcaggaaagagcgtgaccctgctgtgtcagtcacggagcccaatggacactttccttctgatcaaggagcgggcagcccatcccctactgcatctgagatcagagcacggagctcagcagcaccaggctgaattccccatgagtcctgtgacctcagtgcacggggggacctacaggtgcttcagctcacacggcttctcccactacctgctgtcacaccccagtgaccccctggagctcatagtctcaggatccttggaggatcccaggccctcacccacaaggtccgtctcaacagctgcaggccctgaggaccagcccctcatgcctacagggtcagtcccccacagtggtctgagaaggcactgggaggtactgatcggggtcttggtggtctccatcctgcttctctccctcctcctcttcctcctcctccaacactggcgtcagggaaaacacaggacattggcccagagacaggctgatttccaacgtcctccaggggctgccgagccagagcccaaggacgggggcctacagaggaggtccagcccagctgctgacgtccagggagaaaacttctgtgctgccgtgaagaacacacagcctgaggacggggtggaaatggacactcggagcccacacgatgaagacccccaggcagtgacgtatgccaaggtgaaacactccagacctaggagagaaatggcctctcctccctccccactgtctggggaattcctggacacaaaggacagacaggcagaagaggacagacagatggacactgaggctgctgcatctgaagccccccaggatgtgacctacgcccagctgcacagctttaccctcagacagaaggcaactgagcctcctccatcccaggaaggggcctctccagctgagcccagtgtctatgccactctggccatccactaatccaggggggacccagaccccacaagccatggagactcaggaccccagaaggcatggaagctgcctccagtagacatcactgaaccccagccagcccagacccctgacacagaccactagaagattccgggaacgttgggagtcacctgattctgcaaagataaataatatccctgcattatcaaaataaagtagcagacctctcaattcacaatgagttaactgataaaacaaaacagaagtcagacaatgttttaaattgaatgatcatgtaaatattacacatcaaaccaatgacatgggaaaatgggagcttctaatgaggacaaacaaaaaatagagaaaaattaataaagtcaaaatgtttattcttgaaaa

SEQ ID NO: 15983 - DNA, 1864 bp, Homo sapiens
  source 1..1864: mol_type = unassigned DNA
gtttttgtgtcctgccaggcaccgtggtctcatccgcctgcacagctgagtccagtgggagctgacgccatgaccctcaccctctcagtcctgatttgcctcgggctgagtgtgggccccaggacctgcgtgcaggcaggcaccctccccaaacccaccctctgggctgagccagcctctgtgatagctcgggggaagcccgtgaccctctggtgtcaggggcccctggagactgaggagtaccgtctggataaggagggactcccatgggcccggaagagacagaacccactggagcctggagccaaggccaagttccacattccatccacggtgtatgacagtgcagggcgataccgctgctactatgagacccctgcaggctggtcagagcccagtgaccccctggagctggtggcgacaggcgtgtctaggaagccctccctcctgatcccgcagggctctgtcgtggcccgcggaggcagcctgaccctgcagtgtcgctctgatgtcggctatgacatattcgttctgtacaaggagggggaacatgacctcgtccagggctctggccagcagccccaggctgggctctcccaggccaacttcaccctgggccctgtgagccgctcccacgggggccagtacagatgctacggtgcacacaacctctcccctaggtggtcggcccccagcgaccccctggacatcctgatcgcaggactgatccctgacatacccgccctctcggtgcagccgggccccaaggtggcctcaggagagaacgtgaccctgctgtgtcagtcatggcatcagatagacactttctttttgaccaaggagggggcagcccatcccccgctgtgtctaaagtcaaagtaccagtcttatagacaccaggctgaattctccatgagtcctgtgacctcagcccagggtggaacctaccgatgctacagcgcaatcaggtcctacccctacctgctgtccagccctagttacccccaggagctcgtggtctcaggaccctctggggatcccagcctctcacctacaggctccacccccacacctgcaggccctgaggaccagcccctcacccccacggggttggatccccagagtggtctgggaaggcacctgggggttgtgactggggtctcagtggccttcgtcctgctgctgttcctcctcctcttcctcctcctccgacatcggcatcagagcaaacacaggacatcggcccatttctaccgtcctgcaggggctgcggggccagagcccaaggaccagggcctgcagaagagggccagcccagttgctgacatccaggaggaaattctcaatgctgccgtgaaggacacacagcccaaggacggggtggagatggatgctcgggctgctgcatctgaagccccccaggatgtgacctacgcccagctacacagcttgaccctcagacgggaggcaactgagcctcctccatcccaggaaagggaacctccagctgaacccagcatctacgcccccctggccatccactagcccacgggggacccagatctcatactcaacagaaggagactcagagactccagaaggcacaggagctgcccccagtggacaccaatgaaccccagccagcctggacccctaacaaagaccaccaggacatcctgggaactctgggactcactagattctgcagtcaaagatgactaatatccttgcatttttgaaatgaagccacagacttctcaataaatcaatgagctgagaaaactgaaacagaaattagagcatggtataaatttggaatgataatgtaaatattacacattaaatgatgaaatcggaaaactac

SEQ ID NO: 15984 - DNA, 1910 bp, Homo sapiens
  source 1..1910: mol_type = unassigned DNA
ctcactgccacacgcagctcaacctgagctacacagccagatgcgagatgcttctctgctgatctgagtctgcctgcagcatggaccttggtcttccctgaagcatctccagggctggagggacgactgccatgcaccgagggctcatccatccgcagagcagggcagtgggaggagacgctatgacccccatcgtcacagtcctgatctgtctcaggctgagtctgggcccccggacccacgtgcaggcagggaccctccccaagcccacactctgggctgagccaggctctgtgatcacccaggggagtcccgtgaccctctggtgtcaggggatcctggagacccaggagtaccgtctgtatagagaaaagaaaacagcaccctggattacacggatcccacaggagattgtgaagaagggccagttccccatcccatccatcacctgggaacacacagggcggtatcgctgtttctacggtagccacactgcaggctggtcagagcccagtgaccccctggagctggtggtgacaggagcctacatcaaacccaccctctcagctctacccagccctgtggtgacctcaggagggaacgtgaccctccattgtgtctcacaggtggcatttggcagcttcattctgtgtaaggaaggagaagatgaacacccacaatgcctgaactcacagccccgtacccatgggtggtcccgggccatcttctctgtgggccccgtgagcccgagtcgcaggtggtcgtacaggtgctatgcttatgactcgaactctccccatgtgtggtctctacccagtgatctcctggagctcctggtcctaggtgtttctaagaagccatcactctcagtgcagccaggtcctatagtggcccctggggagagcctgaccctccagtgtgtttctgatgtcagctacgacagatttgttctgtataaggagggagaacgtgacttcctccagctccctggcccacagccccaggctgggctctcccaggccaacttcaccctgggccctgtgagccgctcctacgggggccagtacagatgctccggtgcatacaacctctcctccgagtggtcggcccccagcgaccccctggacatcctgatcgcaggacagttccgtggcagacccttcatctcggtgcatccgggccccacggtggcctcaggagagaacgtgaccctgctgtgtcagtcatgggggccgttccacactttccttctgaccaaggcgggagcagctgatgcccccctccgtctcagatcaatacacgaatatcctaagtaccaggctgaattccctatgagtcctgtgacctcagcccactcggggacctacaggtgctacggctcactcagctccaacccctacctgctgtctcaccccagtgactccctggagctcatggtctcaggagcagctgagaccctcagcccaccacaaaacaagtccgattccaaggctggagcagctaacaccctcagcccatcacaaaacaagactgcctcacacccccaggattacacagtggagaatctcatccgcatgggcatagctggcttggtcctggtggtcctcgggattctgctatttgaggctcagcacagccagagaagcctctgagatgcagccgggaggtgaacagcagagagaagaatgtacccttcagagtggtggagccttgggaacagatctgatgatgccaggaggttccgggagacaatttagggctgatgctatctggactgtctgccaatcatttttagagggaggaatcagtgttggattgcagagacattttctggagtgatccatgaaggaccattaacctgtgatacctttcctctctattaatgttgacttcccttggttggatcctct

SEQ ID NO: 15985 - DNA, 1702 bp, Homo sapiens
  source 1..1702: mol_type = unassigned DNA
ccgagtgtccacaccctgtgcgtctctctgtcctgccagcactgagggctcatccatccgcagagcagggcagtgggaggagacgccatgacccccatcctcacggtcctgatctgtctcgggctgagtctgggccccaggacccacgtgcaggcagggcacctccccaagcccaccctctgggctgagccaggctctgtgatcatccagggaagtcctgtgaccctcaggtgtcaggggagccttcaggctgaggagtaccatctatatagggaaaacaaatcagcatcctgggttagacggatacaagagcctgggaagaatggccagttccccatcccatccatcacctgggaacacgcagggcggtatcactgtcagtactacagccacaatcactcatcagagtacagtgaccccctggagctggtggtgacaggagcctacagcaaacccaccctctcagctctgcccagccctgtggtgaccttaggagggaacgtgaccctccagtgtgtctcacaggtggcatttgacggcttcattctgtgtaaggaaggagaagatgaacacccacaacgcctgaactcccattcccatgcccgtgggtggtcctgggccatcttctccgtgggccccgtgagcccgagtcgcaggtggtcgtacaggtgctatgcttatgactcgaactctccctatgtgtggtctctacccagtgatctcctggagctcctggtcccaggtgtttctaagaagccatcactctcagtgcagccaggtcctatggtggcccccggggagagcctgaccctccagtgtgtctctgatgtcggctacgacagatttgttctgtataaggagggagaacgtgacttcctccagcgccctggttggcagccccaggctgggctctcccaggccaacttcaccctgggccctgtgagcccctcccacgggggccagtacagatgctacagtgcacacaacctctcctccgagtggtcggcccccagtgaccccctggacatcctgatcacaggacagttctatgacagaccctctctctcggtgcagccggtccccacagtagccccaggaaagaacgtgaccctgctgtgtcagtcacgggggcagttccacactttccttctgaccaaggagggggcaggccatcccccactgcatctgagatcagagcaccaagctcagcagaaccaggctgaattccgcatgggtcctgtgacctcagcccacgtggggacctacagatgctacagctcactcagctccaacccctacctgctgtctctccccagtgaccccctggagctcgtggtctcagcatccctaggccaacacccccaggattacacagtggagaatctcatccgcatgggtgtggctggcttggtcctggtggtcctcgggattctgctatttgaggctcagcacagccagagaagcctacaagatgcagccgggaggtgaacagcagagaggacaatgcatccttcagcgtggtggagcctcagggacagatctgatgatcccaggaggctctggaggacaatctaggacctacattatctggactgtatgctggtcatttctagagacagcaatcaatatttgagtgtaaggaaactgtctggggtgattcctagaagatcattaaactgtggtacatttttttgtctatgaa

SEQ ID NO: 15986 - DNA, 1799 bp, Homo sapiens
  source 1..1799: mol_type = unassigned DNA
gcgtctctgctgatctgagtctaactgcagcatggacctgggttttccctgaagcatctccagggctggagggacgaccgccatgcactgagggctcatccatccgcagagcagggcagtgggaggagacgccatgacccccatcctcacggtcctgatctgtctcgggctgagtctgggccccaggacccacgtgcaggcagggcacctccccaagcccaccctctgggctgagccaggctctgtgatcatccagggaagtcctgtgaccctcaggtgtcaggggagccttcaggctgaggagtaccatctatatagggaaaacaaatcagcatcctgggttagacggatacaagagcctgggaagaatggccagttccccatcccatccatcacctgggaacacgcagggcggtatcactgtcagtactacagccacaatcactcatcagagtacagtgaccccctggagctggtggtgacaggagcctacagcaaacccaccctctcagctctgcccagccctgtggtgaccttaggagggaacgtgaccctccagtgtgtctcacaggtggcatttgacggcttcattctgtgtaaggaaggagaagatgaacacccacaacgcctgaactcccattcccatgcccgtgggtggtcctgggccatcttctccgtgggccccgtgagcccgagtcgcaggtggtcgtacaggtgctatgcttatgactcgaactctccctatgtgtggtctctacccagtgatctcctggagctcctggtcccaggtgtttctaagaagccatcactctcagtgcagccaggtcctatggtggcccccggggagagcctgaccctccagtgtgtctctgatgtcggctacgacagatttgttctgtataaggagggagaacgtgacttcctccagcgccctggttggcagccccaggctgggctctcccaggccaacttcaccctgggccctgtgagcccctcccacgggggccagtacagatgctacagtgcacacaacctctcctccgagtggtcggcccccagtgaccccctggacatcctgatcacaggacagttctatgacagaccctctctctcggtgcagccggtccccacagtagccccaggaaagaacgtgaccctgctgtgtcagtcacgggggcagttccacactttccttctgaccaaggagggggcaggccatcccccactgcatctgagatcagagcaccaagctcagcagaaccaggctgaattccgcatgggtcctgtgacctcagcccacgtggggacctacagatgctacagctcactcagctccaacccctacctgctgtctctccccagtgaccccctggagctcgtggtctcagaagcagctgagaccctcagcccatcacaaaacaagacagactccacgactacatccctaggccaacacccccaggattacacagtggagaatctcatccgcatgggtgtggctggcttggtcctggtggtcctcgggattctgctatttgaggctcagcacagccagagaagcctacaagatgcagccgggaggtgaacagcagagaggacaatgcatccttcagcgtggtggagcctcagggacagatctgatgatcccaggaggctctggaggacaatctaggacctacattatctggactgtatgctggtcatttctagagacagcaatcaatatttgagtgtaaggaaactgtctggggtgattcctagaagatcattaaactgtggtacatttttttgtctatgaa

SEQ ID NO: 15987 - DNA, 1753 bp, Homo sapiens
  source 1..1753: mol_type = unassigned DNA
ctccgagtgtccacaccctgtgcgtctctctgtcctgccagcactgagggctcatccatccgcagagcagggcagtgggaggagacgccatgacccccatcctcacggtcctgatctgtctcgggctgagtctgggccccaggacccacgtgcaggcagggcacctccccaagcccaccctctgggctgagccaggctctgtgatcatccagggaagtcctgtgaccctcaggtgtcaggggagccttcaggctgaggagtaccatctatatagggaaaacaaatcagcatcctgggttagacggatacaagagcctgggaagaatggccagttccccatcccatccatcacctgggaacacgcagggcggtatcactgtcagtactacagccacaatcactcatcagagtacagtgaccccctggagctggtggtgacaggagcctacagcaaacccaccctctcagctctgcccagccctgtggtgaccttaggagggaacgtgaccctccagtgtgtctcacaggtggcatttgacggcttcattctgtgtaaggaaggagaagatgaacacccacaacgcctgaactcccattcccatgcccgtgggtggtcctgggccatcttctccgtgggccccgtgagcccgagtcgcaggtggtcgtacaggtgctatgcttatgactcgaactctccctatgtgtggtctctacccagtgatctcctggagctcctggtcccaggtgtttctaagaagccatcactctcagtgcagccaggtcctatggtggcccccggggagagcctgaccctccagtgtgtctctgatgtcggctacgacagatttgttctgtataaggagggagaacgtgacttcctccagcgccctggttggcagccccaggctgggctctcccaggccaacttcaccctgggccctgtgagcccctcccacgggggccagtacagatgctacagtgcacacaacctctcctccgagtggtcggcccccagtgaccccctggacatcctgatcacaggacagttctatgacagaccctctctctcggtgcagccggtccccacagtagccccaggaaagaacgtgaccctgctgtgtcagtcacgggggcagttccacactttccttctgaccaaggagggggcaggccatcccccactgcatctgagatcagagcaccaagctcagcagaaccaggctgaattccgcatgggtcctgtgacctcagcccacgtggggacctacagatgctacagctcactcagctccaacccctacctgctgtctctccccagtgaccccctggagctcgtggtctcagaagcagctgagaccctcagcccatcacaaaacaagacagactccacgactacatccctaggccaacacccccaggattacacagtggagaatctcatccgcatgggtgtggctggcttggtcctggtggtcctcgggattctgctatttgaggctcagcacagccagagaagcctacaagatgcagccgggaggtgaacagcagagaggacaatgcatccttcagcgtggtggagcctcagggacagatctgatgatcccaggaggctctggaggacaatctaggacctacattatctggactgtatgctggtcatttctagagacagcaatcaatatttgagtgtaaggaaactgtctggggtgattcctagaagatcattaaactgtggtacatttttttgtctatg

SEQ ID NO: 15988 - DNA, 1571 bp, Homo sapiens
  source 1..1571: mol_type = unassigned DNA
ggctggaatgctaaggggtgatcatagctccctgcagcctccgcctcccaggccgaagtattcctcccacctcagcctcctgagtagctgggactagagatgtgagctgccatgcctggctaattttttgctttttttatacagacaaggtcttgctatgtggcccagggtaatctgaagctcctggcctctagccttcacccacctcagcctcctgaagtgctgggattccaggcatgagccaccatggtagaccctgcattactcctctgtgctcactgccacacgcagctcaacctgagctacacagccaggtgtcaggtgcgtctctgctgatctgagtctaactgcagcatggacctgggttttccctgaagcatctccagggctggagggacgaccgccatgccctaaaggtatgacagccaggctcctgagagggcagttgcacttcctgtgtggttgcacataacaaaaccccatgacaagaaggatccagcctccgagtgtccacaccctgtgcgtctctctgtcctgccagcactgagggctcatccatccgcagagcagggcagtgggaggagacgccatgacccccatcctcacggtcctgatctgtctcgggctgagtctgggccccaggacccacgtgcaggcagggcacctccccaagcccaccctctgggctgagccaggctctgtgatcatccagggaagtcctgtgaccctcaggtgtcaggggagccttcaggctgaggagtaccatctatatagggaaaacaaatcagcatcctgggttagacggatacaagagcctgggaagaatggccagttccccatcccatccatcacctgggaacacgcagggcggtatcactgtcagtactacagccacaatcactcatcagagtacagtgaccccctggagctggtggtgacaggagcctacagcaaacccaccctctcagctctgcccagccctgtggtgaccttaggagggaacgtgaccctccagtgtgtctcacaggtggcatttgacggcttcattctgtgtaaggaaggagaagatgaacacccacaacgcctgaactcccattcccatgcccgtgggtggtcctgggccatcttctccgtgggccccgtgagcccgagtcgcaggtggtcgtacaggtgctatgcttatgactcgaactctccctatgtgtggtctctacccagtgatctcctggagctcctggtcccaggtgtttctaagaagccatcactctcagtgcagccaggtcctatggtggcccccggggagagcctgaccctccagtgtgtctctgatgtcggctacgacagatttgttctgtataaggagggagaacgtgacttcctccagcgccctggttggcagccccaggctgggctctcccaggccaacttcaccctgggccctgtgagcccctcccacgggggccagtacagatgctacagtgcacacaacctctcctccgagtggtcggcccccagtgaccccctggacatcctgatcacaggacagttctatgacagaccctctctctcgg

SEQ ID NO: 15989 - DNA, 1604 bp, Homo sapiens
  source 1..1604: mol_type = unassigned DNA
gagcctccaagtgtccacaccctgtgtgtcctctgtcctgccagcaccgagggctcatccatccacagagcagtgcagtgggaggagacgccatgacccccatcctcacggtcctgatctgtctcgggctgagcctggaccccaggacccacgtgcaggcagggcccctccccaagcccaccctctgggctgagccaggctctgtgatcacccaagggagtcctgtgaccctcaggtgtcaggggagcctggagacgcaggagtaccatctatatagagaaaagaaaacagcactctggattacacggatcccacaggagcttgtgaagaagggccagttccccatcctatccatcacctgggaacatgcagggcggtattgctgtatctatggcagccacactgcaggcctctcagagagcagtgaccccctggagctggtggtgacaggagcctacagcaaacccaccctctcagctctgcccagccctgtggtgacctcaggagggaatgtgaccatccagtgtgactcacaggtggcatttgatggcttcattctgtgtaaggaaggagaagatgaacacccacaatgcctgaactcccattcccatgcccgtgggtcatcccgggccatcttctccgtgggccccgtgagcccaagtcgcaggtggtcgtacaggtgctatggttatgactcgcgcgctccctatgtgtggtctctacccagtgatctcctggggctcctggtcccaggtgtttctaagaagccatcactctcagtgcagccgggtcctgtcgtggcccctggggagaagctgaccttccagtgtggctctgatgccggctacgacagatttgttctgtacaaggagtggggacgtgacttcctccagcgccctggccggcagccccaggctgggctctcccaggccaacttcaccctgggccctgtgagccgctcctacgggggccagtacacatgctccggtgcatacaacctctcctccgagtggtcggcccccagcgaccccctggacatcctgatcacaggacagatccgtgccagacccttcctctccgtgcggccgggccccacagtggcctcaggagagaacgtgaccctgctgtgtcagtcacagggagggatgcacactttccttttgaccaaggagggggcagctgattccccgctgcgtctaaaatcaaagcgccaatctcataagtaccaggctgaattccccatgagtcctgtgacctcggcccacgcggggacctacaggtgctacggctcactcagctccaacccctacctgctgactcaccccagtgaccccctggagctcgtggtctcaggagcagctgagaccctcagcccaccacaaaacaagtccgactccaaggctggtgagtgaggagatgcttgccgtgatgacgctgggcacagagggtcaggtcctgtcaagaggagctgggtgtcctgggtggacatttgaagaattatattcattccaacttgaagaattattcaacacctttaacaatgtatatgtgaagtactttattctttcatattttaaaaataaaagataattatccatgagaaa

SEQ ID NO: 15990 - DNA, 1880 bp, Homo sapiens
  source 1..1880: mol_type = unassigned DNA
gcctgatgtcagatgcgtctctgctgacctgagtctgccctgcaccatggacctgcattttccctgaagcatctccacgacggatgagatgactggccatgggctgagtctgagcttcaggacccatgtgcaggcagggattaaggtgcagagggacggccaaggatgcaatgggcaccgaggaggcaggaaagactcagagctcagcctgggctgcacagccaggtgtcaggtgcgtctctgctgatctgagtccaccctgcagcatggacctgcatcttccctgaaggatctccagggctggagggacgactgccatgcaccgagggctcatccatccacagagcagtgcagtgggaggagacgccatgacccccatcctcacggtcctgatctgtctcgggctgagcctggaccccaggacccacgtgcaggcagggcccctccccaagcccaccctctgggctgagccaggctctgtgatcacccaagggagtcctgtgaccctcaggtgtcaggggagcctggagacgcaggagtaccatctatatagagaaaagaaaacagcactctggattacacggatcccacaggagcttgtgaagaagggccagttccccatcctatccatcacctgggaacatgcagggcggtattgctgtatctatggcagccacactgcaggcctctcagagagcagtgaccccctggagctggtggtgacaggagcctacagcaaacccaccctctcagctctgcccagccctgtggtgacctcaggagggaatgtgaccatccagtgtgactcacaggtggcatttgatggcttcattctgtgtaaggaaggagaagatgaacacccacaatgcctgaactcccattcccatgcccgtgggtcatcccgggccatcttctccgtgggccccgtgagcccaagtcgcaggtggtcgtacaggtgctatggttatgactcgcgcgctccctatgtgtggtctctacccagtgatctcctggggctcctggtcccaggtgtttctaagaagccatcactctcagtgcagccgggtcctgtcgtggcccctggggagaagctgaccttccagtgtggctctgatgccggctacgacagatttgttctgtacaaggagtggggacgtgacttcctccagcgccctggccggcagccccaggctgggctctcccaggccaacttcaccctgggccctgtgagccgctcctacgggggccagtacacatgctccggtgcatacaacctctcctccgagtggtcggcccccagcgaccccctggacatcctgatcacaggacagatccgtgccagacccttcctctccgtgcggccgggccccacagtggcctcaggagagaacgtgaccctgctgtgtcagtcacagggagggatgcacactttccttttgaccaaggagggggcagctgattccccgctgcgtctaaaatcaaagcgccaatctcataagtaccaggctgaattccccatgagtcctgtgacctcggcccacgcggggacctacaggtgctacggctcactcagctccaacccctacctgctgactcaccccagtgaccccctggagctcgtggtctcaggagcagctgagaccctcagcccaccacaaaacaagtccgactccaaggctggtgagtgaggagatgcttgccgtgatgacgctgggcacagagggtcaggtcctgtcaagaggagctgggtgtcctgggtggacatttgaagaattatattcattccaacttgaagaattattcaacacctttaacaatgtatatgtgaagtactttattctttcatattttaaaaataaaagataattatccatgagaaa

SEQ ID NO: 15991 - DNA, 2834 bp, Homo sapiens
  source 1..2834: mol_type = unassigned DNA
aagtcaacttttcttccctatttccctgcatttctcttctgtgctcgctgccacacgcagctcagcctgggcggcacagccagatgcgagatgcgtctctgctgatctgagtctgcctgcagcatggacctgggtcttccctgaagcatctccagggctggagggacgactgccatgcaccgagggctcatccatccacagagcagggcagtgggaggagacgccatgacccccatcctcacggtcctgatctgtctcgggctgagtctgggccccaggacccacgtgcaggcagggcacctccccaagcccaccctctgggctgaaccaggctctgtgatcacccaggggagtcctgtgaccctcaggtgtcaggggggccaggagacccaggagtaccgtctatatagagaaaagaaaacagcactctggattacacggatcccacaggagcttgtgaagaagggccagttccccatcccatccatcacctgggaacatgcagggcggtatcgctgttactatggtagcgacactgcaggccgctcagagagcagtgaccccctggagctggtggtgacaggagcctacatcaaacccaccctctcagcccagcccagccccgtggtgaactcaggagggaatgtaatcctccagtgtgactcacaggtggcatttgatggcttcagtctgtgtaaggaaggagaagatgaacacccacaatgcctgaactcccagccccatgcccgtgggtcgtcccgcgccatcttctccgtgggccccgtgagcccgagtcgcaggtggtggtacaggtgctatgcttatgactcgaactctccctatgagtggtctctacccagtgatctcctggagctcctggtcctaggtgtttctaagaagccatcactctcagtgcagccaggtcctatcgtggcccctgaggagaccctgactctgcagtgtggctctgatgctggctacaacagatttgttctgtataaggacggggaacgtgacttccttcagctcgctggcgcacagccccaggctgggctctcccaggccaacttcaccctgggccctgtgagccgctcctacgggggccagtacagatgctacggtgcacacaacctctcctccgagtggtcggcccccagcgaccccctggacatcctgatcgcaggacagttctatgacagagtctccctctcggtgcagccgggccccacggtggcctcaggagagaacgtgaccctgctgtgtcagtcacagggatggatgcaaactttccttctgaccaaggagggggcagctgatgacccatggcgtctaagatcaacgtaccaatctcaaaaataccaggctgaattccccatgggtcctgtgacctcagcccatgcggggacctacaggtgctacggctcacagagctccaaaccctacctgctgactcaccccagtgaccccctggagctcgtggtctcaggaccgtctgggggccccagctccccgacaacaggccccacctccacatctgcaggccctgaggaccagcccctcacccccaccgggtcggatccccagagtggtctgggaaggcacctgggggttgtgatcggcatcttggtggccgtcatcctactgctcctcctcctcctcctcctcttcctcatcctccgacatcgacgtcagggcaaacactggacatcgacccagagaaaggctgatttccaacatcctgcaggggctgtggggccagagcccacagacagaggcctgcagtggaggtccagcccagctgccgatgcccaggaagaaaacctctatgctgccgtgaagcacacacagcctgaggatggggtggagatggacactcggcagagcccacacgatgaagacccccaggcagtgacgtatgccgaggtgaaacactccagacctaggagagaaatggcctctcctccttccccactgtctggggaattcctggacacaaaggacagacaggcggaagaggacaggcagatggacactgaggctgctgcatctgaagccccccaggatgtgacctacgcccagctgcacagcttgaccctcagacgggaggcaactgagcctcctccatcccaggaagggccctctccagctgtgcccagcatctacgccactctggccatccactagcccagggggggacgcagaccccacactccatggagtctggaatgcatgggagctgcccccccagtggacaccattggaccccacccagcctggatctaccccaggagactctgggaacttttaggggtcactcaattctgcagtataaataactaatgtctctacaattttgaaataaagcaacagacttctcaataatcaatgaagtagctgagaaaactaagtcagaaagtgcattaaactgaatcacaatgtaaatattacacatcaagcgatgaaactggaaaactacaagccacgaatgaatgaattaggaaagaaaaaaagtaggaaatgaatgatcttggctttcctataagaaatttagggcagggcacggtggctcacgcctgtaattccagcactttgggaggccgaggcgggcagatcacgagttcaggagatcgagaccatcttggccaacatggtgaaaccctgtctctcctaaaaatacaaaaattagctggatgtggtggcagtgcctgtaatcccagctatttgggaggctgaggcaggagaatcgcttgaaccagggagtcagaggtttcagtgagccaagatcgcaccactgctctccagcctggcgacagagggagactccatctcaaatt

SEQ ID NO: 15992 - DNA, 2094 bp, Homo sapiens
  source 1..2094: mol_type = unassigned DNA
atgacccccatcctcacggtcctgatctgtctcgggctgagtctgggccccaggacccacgtgcaggcagggcacctccccaagcccaccctctgggctgaaccaggctctgtgatcacccaggggagtcctgtgaccctcaggtgtcaggggggccaggagacccaggagtaccgtctatatagagaaaagaaaacagcactctggattacacggatcccacaggagcttgtgaagaagggccagttccccatcccatccatcacctgggaacatgcagggcggtatcgctgttactatggtagcgacactgcaggccgctcagagagcagtgaccccctggagctggtggtgacaggagcctacatcaaacccaccctctcagcccagcccagccccgtggtgaactcaggagggaatgtaatcctccagtgtgactcacaggtggcatttgatggcttcagtctgtgtaaggaaggagaagatgaacacccacaatgcctgaactcccagccccatgcccgtgggtcgtcccgcgccatcttctccgtgggccccgtgagcccgagtcgcaggtggtggtacaggtgctatgcttatgactcgaactctccctatgagtggtctctacccagtgatctcctggagctcctggtcctaggtgtttctaagaagccatcactctcagtgcagccaggtcctatcgtggcccctgaggagaccctgactctgcagtgtggctctgatgctggctacaacagatttgttctgtataaggacggggaacgtgacttccttcagctcgctggcgcacagccccaggctgggctctcccaggccaacttcaccctgggccctgtgagccgctcctacgggggccagtacagatgctacggtgcacacaacctctcctccgagtggtcggcccccagcgaccccctggacatcctgatcgcaggacagttctatgacagagtctccctctcggtgcagccgggccccacggtggcctcaggagagaacgtgaccctgctgtgtcagtcacagggatggatgcaaactttccttctgaccaaggagggggcagctgatgacccatggcgtctaagatcaacgtaccaatctcaaaaataccaggctgaattccccatgggtcctgtgacctcagcccatgcggggacctacaggtgctacggctcacagagctccaaaccctacctgctgactcaccccagtgaccccctggagctcgtggtctcaggaccgtctgggggccccagctccccgacaacaggccccacctccacatctggccctgaggaccagcccctcacccccaccgggtcggatccccagagtggtctgggaaggcacctgggggttgtgatcggcatcttggtggccgtcatcctactgctcctcctcctcctcctcctcttcctcatcctccgacatcgacgtcagggcaaacactggacatcgacccagagaaaggctgatttccaacatcctgcaggggctgtggggccagagcccacagacagaggcctgcagtggaggtccagcccagctgccgatgcccaggaagaaaacctctatgctgccgtgaagcacacacagcctgaggatggggtggagatggacactcggagcccacacgatgaagacccccaggcagtgacgtatgccgaggtgaaacactccagacctaggagagaaatggcctctcctccttccccactgtctggggaattcctggacacaaaggacagacaggcggaagaggacaggcagatggacactgaggctgctgcatctgaagccccccaggatgtgacctacgcccagctgcacagcttgaccctcagacgggaggcaactgagcctcctccatcccaggaagggccctctccagctgtgcccagcatctacgccactctggccatccactagcccagggggggacgcagaccccacactccatggagtctggaatgcatgggagctgcccccccagtggacaccattggaccccacccagcctggatctaccccaggagactctgggaacttttaggggtcactcaattctgc

SEQ ID NO: 15993 - DNA, 2960 bp, Homo sapiens
  source 1..2960: mol_type = unassigned DNA
gagaaaagaggagaggagaggaggaacagaaaagaaaagaaaagaaaaagtgggaaacaaataatctaagaatgaggagaaagcaagaagagtgacccccttgtgggcactccattggttttatggcgcctctactttctggagtttgtgtaaaacaaaaatattatggtctttgtgcacatttacatcaagctcagcctgggcggcacagccagatgcgagatgcgtctctgctgatctgagtctgcctgcagcatggacctgggtcttccctgaagcatctccagggctggagggacgactgccatgcaccgagggctcatccatccacagagcagggcagtgggaggagacgccatgacccccatcctcacggtcctgatctgtctcgggctgagtctgggccccaggacccacgtgcaggcagggcacctccccaagcccaccctctgggctgaaccaggctctgtgatcacccaggggagtcctgtgaccctcaggtgtcaggggggccaggagacccaggagtaccgtctatatagagaaaagaaaacagcactctggattacacggatcccacaggagcttgtgaagaagggccagttccccatcccatccatcacctgggaacatgcagggcggtatcgctgttactatggtagcgacactgcaggccgctcagagagcagtgaccccctggagctggtggtgacaggagcctacatcaaacccaccctctcagcccagcccagccccgtggtgaactcaggagggaatgtaatcctccagtgtgactcacaggtggcatttgatggcttcagtctgtgtaaggaaggagaagatgaacacccacaatgcctgaactcccagccccatgcccgtgggtcgtcccgcgccatcttctccgtgggccccgtgagcccgagtcgcaggtggtggtacaggtgctatgcttatgactcgaactctccctatgagtggtctctacccagtgatctcctggagctcctggtcctaggtgtttctaagaagccatcactctcagtgcagccaggtcctatcgtggcccctgaggagaccctgactctgcagtgtggctctgatgctggctacaacagatttgttctgtataaggacggggaacgtgacttccttcagctcgctggcgcacagccccaggctgggctctcccaggccaacttcaccctgggccctgtgagccgctcctacgggggccagtacagatgctacggtgcacacaacctctcctccgagtggtcggcccccagcgaccccctggacatcctgatcgcaggacagttctatgacagagtctccctctcggtgcagccgggccccacggtggcctcaggagagaacgtgaccctgctgtgtcagtcacagggatggatgcaaactttccttctgaccaaggagggggcagctgatgacccatggcgtctaagatcaacgtaccaatctcaaaaataccaggctgaattccccatgggtcctgtgacctcagcccatgcggggacctacaggtgctacggctcacagagctccaaaccctacctgctgactcaccccagtgaccccctggagctcgtggtctcaggaccgtctgggggccccagctccccgacaacaggccccacctccacatctggccctgaggaccagcccctcacccccaccgggtcggatccccagagtggtctgggaaggcacctgggggttgtgatcggcatcttggtggccgtcatcctactgctcctcctcctcctcctcctcttcctcatcctccgacatcgacgtcagggcaaacactggacatcgacccagagaaaggctgatttccaacatcctgcaggggctgtggggccagagcccacagacagaggcctgcagtggaggtccagcccagctgccgatgcccaggaagaaaacctctatgctgccgtgaagcacacacagcctgaggatggggtggagatggacactcggagcccacacgatgaagacccccaggcagtgacgtatgccgaggtgaaacactccagacctaggagagaaatggcctctcctccttccccactgtctggggaattcctggacacaaaggacagacaggcggaagaggacaggcagatggacactgaggctgctgcatctgaagccccccaggatgtgacctacgcccagctgcacagcttgaccctcagacgggaggcaactgagcctcctccatcccaggaagggccctctccagctgtgcccagcatctacgccactctggccatccactagcccagggggggacgcagaccccacactccatggagtctggaatgcatgggagctgcccccccagtggacaccattggaccccacccagcctggatctaccccaggagactctgggaacttttaggggtcactcaattctgcagtataaataactaatgtctctacaattttgaaataaagcaacagacttctcaataatcaatgaagtagctgagaaaactaagtcagaaagtgcattaaactgaatcacaatgtaaatattacacatcaagcgatgaaactggaaaactacaagccacgaatgaatgaattaggaaagaaaaaaagtaggaaatgaatgatcttggctttcctataagaaatttagggcagggcacggtggctcacgcctgtaattccagcactttgggaggccgaggcgggcagatcacgagttcaggagatcgagaccatcttggccaacatggtgaaaccctgtctctcctaaaaatacaaaaattagctggatgtggtggcagtgcctgtaatcccagctatttgggaggctgaggcaggagaatcgcttgaaccagggagtcagaggtttcagtgagccaagatcgcaccactgctctccagcctggcgacagagggagactccatctcaaatt

SEQ ID NO: 15994 - DNA, 2046 bp, Homo sapiens
  source 1..2046: mol_type = unassigned DNA
atgacccccatcctcacggtcctgatctgtctcgggctgagtctgggccccaggacccacgtgcaggcagggcacctccccaagcccaccctctgggctgaaccaggctctgtgatcacccaggggagtcctgtgaccctcaggtgtcaggggggccaggagacccaggagtaccgtctatatagagaaaagaaaacagcactctggattacacggatcccacaggagcttgtgaagaagggccagttccccatcccatccatcacctgggaacatgcagggcggtatcgctgttactatggtagcgacactgcaggccgctcagagagcagtgaccccctggagctggtggtgacaggagcctacatcaaacccaccctctcagcccagcccagccccgtggtgaactcaggagggaatgtaatcctccagtgtgactcacaggtggcatttgatggcttcagtctgtgtaaggaaggagaagatgaacacccacaatgcctgaactcccagccccatgcccgtgggtcgtcccgcgccatcttctccgtgggccccgtgagcccgagtcgcaggtggtggtacaggtgctatgcttatgactcgaactctccctatgagtggtctctacccagtgatctcctggagctcctggtcctaggtgtttctaagaagccatcactctcagtgcagccaggtcctatcgtggcccctgaggagaccctgactctgcagtgtggctctgatgctggctacaacagatttgttctgtataaggacggggaacgtgacttccttcagctcgctggcgcacagccccaggctgggctctcccaggccaacttcaccctgggccctgtgagccgctcctacgggggccagtacagatgctacggtgcacacaacctctcctccgagtggtcggcccccagcgaccccctggacatcctgatcgcaggacagttctatgacagagtctccctctcggtgcagccgggccccacggtggcctcaggagagaacgtgaccctgctgtgtcagtcacagggatggatgcaaactttccttctgaccaaggagggggcagctgatgacccatggcgtctaagatcaacgtaccaatctcaaaaataccaggctgaattccccatgggtcctgtgacctcagcccatgcggggacctacaggtgctacggctcacagagctccaaaccctacctgctgactcaccccagtgaccccctggagctcgtggtctcagcaggccctgaggaccagcccctcacccccaccgggtcggatccccagagtggtctgggaaggcacctgggggttgtgatcggcatcttggtggccgtcatcctactgctcctcctcctcctcctcctcttcctcatcctccgacatcgacgtcagggcaaacactggacatcgacccagagaaaggctgatttccaacatcctgcaggggctgtggggccagagcccacagacagaggcctgcagtggaggtccagcccagctgccgatgcccaggaagaaaacctctatgctgccgtgaagcacacacagcctgaggatggggtggagatggacactcggagcccacacgatgaagacccccaggcagtgacgtatgccgaggtgaaacactccagacctaggagagaaatggcctctcctccttccccactgtctggggaattcctggacacaaaggacagacaggcggaagaggacaggcagatggacactgaggctgctgcatctgaagccccccaggatgtgacctacgcccagctgcacagcttgaccctcagacgggaggcaactgagcctcctccatcccaggaagggccctctccagctgtgcccagcatctacgccactctggccatccactagcccagggggggacgcagaccccacactccatggagtctggaatgcatgggagctgcccccccagtggacaccattggaccccacccagcctggatctaccccaggagactctgggaacttttaggggtcactcaattctgc

SEQ ID NO: 15995 - DNA, 2828 bp, Homo sapiens
  source 1..2828: mol_type = unassigned DNA
aagtcaacttttcttccctatttccctgcatttctcttctgtgctcgctgccacacgcagctcagcctgggcggcacagccagatgcgagatgcgtctctgctgatctgagtctgcctgcagcatggacctgggtcttccctgaagcatctccagggctggagggacgactgccatgcaccgagggctcatccatccacagagcagggcagtgggaggagacgccatgacccccatcctcacggtcctgatctgtctcgggctgagtctgggccccaggacccacgtgcaggcagggcacctccccaagcccaccctctgggctgaaccaggctctgtgatcacccaggggagtcctgtgaccctcaggtgtcaggggggccaggagacccaggagtaccgtctatatagagaaaagaaaacagcactctggattacacggatcccacaggagcttgtgaagaagggccagttccccatcccatccatcacctgggaacatgcagggcggtatcgctgttactatggtagcgacactgcaggccgctcagagagcagtgaccccctggagctggtggtgacaggagcctacatcaaacccaccctctcagcccagcccagccccgtggtgaactcaggagggaatgtaatcctccagtgtgactcacaggtggcatttgatggcttcagtctgtgtaaggaaggagaagatgaacacccacaatgcctgaactcccagccccatgcccgtgggtcgtcccgcgccatcttctccgtgggccccgtgagcccgagtcgcaggtggtggtacaggtgctatgcttatgactcgaactctccctatgagtggtctctacccagtgatctcctggagctcctggtcctaggtgtttctaagaagccatcactctcagtgcagccaggtcctatcgtggcccctgaggagaccctgactctgcagtgtggctctgatgctggctacaacagatttgttctgtataaggacggggaacgtgacttccttcagctcgctggcgcacagccccaggctgggctctcccaggccaacttcaccctgggccctgtgagccgctcctacgggggccagtacagatgctacggtgcacacaacctctcctccgagtggtcggcccccagcgaccccctggacatcctgatcgcaggacagttctatgacagagtctccctctcggtgcagccgggccccacggtggcctcaggagagaacgtgaccctgctgtgtcagtcacagggatggatgcaaactttccttctgaccaaggagggggcagctgatgacccatggcgtctaagatcaacgtaccaatctcaaaaataccaggctgaattccccatgggtcctgtgacctcagcccatgcggggacctacaggtgctacggctcacagagctccaaaccctacctgctgactcaccccagtgaccccctggagctcgtggtctcaggaccgtctgggggccccagctccccgacaacaggccccacctccacatctggccctgaggaccagcccctcacccccaccgggtcggatccccagagtggtctgggaaggcacctgggggttgtgatcggcatcttggtggccgtcatcctactgctcctcctcctcctcctcctcttcctcatcctccgacatcgacgtcagggcaaacactggacatcgacccagagaaaggctgatttccaacatcctgcaggggctgtggggccagagcccacagacagaggcctgcagtggaggtccagcccagctgccgatgcccaggaagaaaacctctatgctgccgtgaagcacacacagcctgaggatggggtggagatggacactcggagcccacacgatgaagacccccaggcagtgacgtatgccgaggtgaaacactccagacctaggagagaaatggcctctcctccttccccactgtctggggaattcctggacacaaaggacagacaggcggaagaggacaggcagatggacactgaggctgctgcatctgaagccccccaggatgtgacctacgcccagctgcacagcttgaccctcagacgggaggcaactgagcctcctccatcccaggaagggccctctccagctgtgcccagcatctacgccactctggccatccactagcccagggggggacgcagaccccacactccatggagtctggaatgcatgggagctgcccccccagtggacaccattggaccccacccagcctggatctaccccaggagactctgggaacttttaggggtcactcaattctgcagtataaataactaatgtctctacaattttgaaataaagcaacagacttctcaataatcaatgaagtagctgagaaaactaagtcagaaagtgcattaaactgaatcacaatgtaaatattacacatcaagcgatgaaactggaaaactacaagccacgaatgaatgaattaggaaagaaaaaaagtaggaaatgaatgatcttggctttcctataagaaatttagggcagggcacggtggctcacgcctgtaattccagcactttgggaggccgaggcgggcagatcacgagttcaggagatcgagaccatcttggccaacatggtgaaaccctgtctctcctaaaaatacaaaaattagctggatgtggtggcagtgcctgtaatcccagctatttgggaggctgaggcaggagaatcgcttgaaccagggagtcagaggtttcagtgagccaagatcgcaccactgctctccagcctggcgacagagggagactccatctcaaatt

SEQ ID NO: 15996 - DNA, 2018 bp, Homo sapiens
  source 1..2018: mol_type = unassigned DNA
atgacccccatcctcacggtcctgatctgtctcgggctgagtctgggccccaggacccacgtgcaggcagggcacctccccaagcccaccctctgggctgaaccaggctctgtgatcacccaggggagtcctgtgaccctcaggtgtcaggggggccaggagacccaggagtaccgtctatatagagaaaagaaaacagcactctggattacacggatcccacaggagcttgtgaagaagggccagttccccatcccatccatcacctgggaacatgcagggcggtatcgctgttactatggtagcgacactgcaggccgctcagagagcagtgaccccctggagctggtggtgacaggagcctacatcaaacccaccctctcagcccagcccagccccgtggtgaactcaggagggaatgtaatcctccagtgtgactcacaggtggcatttgatggcttcagtctgtgtaaggaaggagaagatgaacacccacaatgcctgaactcccagccccatgcccgtgggtcgtcccgcgccatcttctccgtgggccccgtgagcccgagtcgcaggtggtggtacaggtgctatgcttatgactcgaactctccctatgagtggtctctacccagtgatctcctggagctcctggtcctaggtgtttctaagaagccatcactctcagtgcagccaggtcctatcgtggcccctgaggagaccctgactctgcagtgtggctctgatgctggctacaacagatttgttctgtataaggacggggaacgtgacttccttcagctcgctggcgcacagccccaggctgggctctcccaggccaacttcaccctgggccctgtgagccgctcctacgggggccagtacagatgctacggtgcacacaacctctcctccgagtggtcggcccccagcgaccccctggacatcctgatcgcaggacagttctatgacagagtctccctctcggtgcagccgggccccacggtggcctcaggagagaacgtgaccctgctgtgtcagtcacagggatggatgcaaactttccttctgaccaaggagggggcagctgatgacccatggcgtctaagatcaacgtaccaatctcaaaaataccaggctgaattccccatgggtcctgtgacctcagcccatgcggggacctacaggtgctacggctcacagagctccaaaccctacctgctgactcaccccagtgaccccctggagctcgtggtctcaggaccgtctgggggccccagctccccgacaacaggccccacctccacatctggccctgaggaccagcccctcacccccaccgggtcggatccccagagtggtctgggaaggcacctgggggttgtgatcggcatcttggtggccgtcatcctactgctcctcctcctcctcctcctcttcctcatcctccgacatcgacgtcagggcaaacactggacatcgagtccagcccagctgccgatgcccaggaagaaaacctctatgctgccgtgaagcacacacagcctgaggatggggtggagatggacactcggagcccacacgatgaagacccccaggcagtgacgtatgccgaggtgaaacactccagacctaggagagaaatggcctctcctccttccccactgtctggggaattcctggacacaaaggacagacaggcggaagaggacaggcagatggacactgaggctgctgcatctgaagccccccaggatgtgacctacgcccagctgcacagcttgaccctcagacgggaggcaactgagcctcctccatcccaggaagggccctctccagctgtgcccagcatctacgccactctggccatccactagcccagggggggacgcagaccccacactccatggagtctggaatgcatgggagctgcccccccagtggacaccattggaccccacccagcctggatctaccccaggagactctgggaacttttaggggtcactcaattctgc

SEQ ID NO: 15997 - DNA, 2286 bp, Homo sapiens
  source 1..2286: mol_type = unassigned DNA
gggactatttggttgaaagaaaacccacaatccagtgtcaagaaagaagtcaacttttcttcccctacttccctgcatttctcctctgtgctcactgccacacgcagctcaacctggacggcacagccagaggcgagatgcttctctgctgatctgagtctgcctgcagcatggacctgggtcttccctgaagcatctccagggctggagggacgactgccatgcaccgagggctcatccatccgcagagcagggcagtgggaggagacgccatgacccccatcgtcacagtcctgatctgtctcgggctgagtctgggccccaggacccacgtgcagacagggaccattcccaagcccaccctgtgggctgagccagactctgtgatcacccaggggagtcccgtcaccctcagttgtcaggggagccttgaagcccaggagtaccgtctatatagggagaaaaaatcagcatcttggattacacggatacgaccagagcttgtgaagaacggccagttccacatcccatccatcacctgggaacacacagggcgatatggctgtcagtattacagccgcgctcggtggtctgagctcagtgaccccctggtgctggtgatgacaggagcctacccaaaacccaccctctcagcccagcccagccctgtggtgacctcaggaggaagggtgaccctccagtgtgagtcacaggtggcatttggcggcttcattctgtgtaaggaaggagaagaagaacacccacaatgcctgaactcccagccccatgcccgtgggtcgtcccgcgccatcttctccgtgggccccgtgagcccgaatcgcaggtggtcgcacaggtgctatggttatgacttgaactctccctatgtgtggtcttcacccagtgatctcctggagctcctggtcccaggtgtttctaagaagccatcactctcagtgcagccgggtcctgtcgtggcccctggggaaagcctgaccctccagtgtgtctctgatgtcggctatgacagatttgttctgtacaaggagggggaacgtgaccttcgccagctccctggccggcagccccaggctgggctctcccaggccaacttcaccctgggccctgtgagccgctcctacgggggccagtacagatgctacggtgcacacaacctctcctctgagtgctcggcccccagcgaccccctggacatcctgatcacaggacagatccgtggcacacccttcatctcagtgcagccaggccccacagtggcctcaggagagaacgtgaccctgctgtgtcagtcatggcggcagttccacactttccttctgaccaaggcgggagcagctgatgccccactccgtctaagatcaatacacgaatatcctaagtaccaggctgaattccccatgagtcctgtgacctcagcccacgcggggacctacaggtgctacggctcactcaactccgacccctacctgctgtctcaccccagtgagcccctggagctcgtggtctcaggaccctccatgggttccagccccccacccaccggtcccatctccacacctgcaggccctgaggaccagcccctcacccccactgggtcggatccccaaagtggtctgggaaggcacctgggggttgtgatcggcatcttggtggccgtcgtcctactgctcctcctcctcctcctcctcttcctcatcctccgacatcgacgtcagggcaaacactggacatcgacccagagaaaggctgatttccaacatcctgcaggggctgtggggccagagcccacagacagaggcctgcagtggaggtccagcccagctgccgacgcccaggaagaaaacctctatgctgccgtgaaggacacacagcctgaagatggggtggagatggacactcgggctgctgcatctgaagccccccaggatgtgacctacgcccagctgcacagcttgaccctcagacggaaggcaactgagcctcctccatcccaggaaagggaacctccagctgagcccagcatctacgccaccctggccatccactagcccggagggtacgcagactccacactcagtagaaggagactcaggactgctgaaggcacgggagctgcccccagtggacaccaatgaaccccagtcagcctggacccctaacaaagaccatgaggagatgctgggaactttgggactcacttgattctgcagtcgaaataactaatatccctacattttttaattaaagcaacagacttctcaataa

SEQ ID NO: 15998 - DNA, 2105 bp, Homo sapiens
  source 1..2105: mol_type = unassigned DNA
aatccagtgtcaagaaagaagtcaacttttcttcccctacttccctgcatttctcctctgtgctcactgccacacgcagctcaacctggacggcacagccagaggcgagatgcttctctgctgatctgagtctgcctgcagcatggacctgggtcttccctgaagcatctccagggctggagggacgactgccatgcaccgagggctcatccatccgcagagcagggcagtgggaggagacgccatgacccccatcgtcacagtcctgatctgtctcgggagaaaaaatcagcatcttggattacacggatacgaccagagcttgtgaagaacggccagttccacatcccatccatcacctgggaacacacagggcgatatggctgtcagtattacagccgcgctcggtggtctgagctcagtgaccccctggtgctggtgatgacaggagcctacccaaaacccaccctctcagcccagcccagccctgtggtgacctcaggaggaagggtgaccctccagtgtgagtcacaggtggcatttggcggcttcattctgtgtaaggaaggagaagaagaacacccacaatgcctgaactcccagccccatgcccgtgggtcgtcccgcgccatcttctccgtgggccccgtgagcccgaatcgcaggtggtcgcacaggtgctatggttatgacttgaactctccctatgtgtggtcttcacccagtgatctcctggagctcctggtcccaggtgtttctaagaagccatcactctcagtgcagccgggtcctgtcgtggcccctggggaaagcctgaccctccagtgtgtctctgatgtcggctatgacagatttgttctgtacaaggagggggaacgtgaccttcgccagctccctggccggcagccccaggctgggctctcccaggccaacttcaccctgggccctgtgagccgctcctacgggggccagtacagatgctacggtgcacacaacctctcctctgagtgctcggcccccagcgaccccctggacatcctgatcacaggacagatccgtggcacacccttcatctcagtgcagccaggccccacagtggcctcaggagagaacgtgaccctgctgtgtcagtcatggcggcagttccacactttccttctgaccaaggcgggagcagctgatgccccactccgtctaagatcaatacacgaatatcctaagtaccaggctgaattccccatgagtcctgtgacctcagcccacgcggggacctacaggtgctacggctcactcaactccgacccctacctgctgtctcaccccagtgagcccctggagctcgtggtctcaggaccctccatgggttccagccccccacccaccggtcccatctccacacctgcaggccctgaggaccagcccctcacccccactgggtcggatccccaaagtggtctgggaaggcacctgggggttgtgatcggcatcttggtggccgtcgtcctactgctcctcctcctcctcctcctcttcctcatcctccgacatcgacgtcagggcaaacactggacatcgacccagagaaaggctgatttccaacatcctgcaggggctgtggggccagagcccacagacagaggcctgcagtggaggtccagcccagctgccgacgcccaggaagaaaacctctatgctgccgtgaaggacacacagcctgaagatggggtggagatggacactcgggctgctgcatctgaagccccccaggatgtgacctacgcccagctgcacagcttgaccctcagacggaaggcaactgagcctcctccatcccaggaaagggaacctccagctgagcccagcatctacgccaccctggccatccactagcccggagggtacgcagactccacactcagtagaaggagactcaggactgctgaaggcacgggagctgcccccagtggacaccaatgaaccccagtcagcctggacccctaacaaagaccatgaggagatgctgggaactttgggactcacttgattctgcagtcgaaataactaatatccctacattttttaattaaagcaacagacttctcaat

SEQ ID NO: 15999 - DNA, 2204 bp, Homo sapiens
  source 1..2204: mol_type = unassigned DNA
ctgtcctgccagcactgagggctcatccctctgcagagcgcggggtcaccgggaggagacgccatgacgcccgccctcacagccctgctctgccttgggctgagtctgggccccaggacccgcgtgcaggcagggcccttccccaaacccaccctctgggctgagccaggctctgtgatcagctgggggagccccgtgaccatctggtgtcaggggagccaggaggcccaggagtaccgactgcataaagagggaagcccagagcccttggacagaaataacccactggaacccaagaacaaggccagattctccatcccatccatgacagagcaccatgcagggagataccgctgccactattacagctctgcaggctggtcagagcccagcgaccccctggagatggtgatgacaggagcctacagcaaacccaccctctcagccctgcccagccctgtggtggcctcaggggggaatatgaccctccgatgtggctcacagaagggatatcaccattttgttctgatgaaggaaggagaacaccagctcccccggaccctggactcacagcagctccacagtcgggggttccaggccctgttccctgtgggccccgtgacccccagccacaggtggaggttcacatgctattactattatacaaacaccccctgggtgtggtcccaccccagtgaccccctggagattctgccctcaggcgtgtctaggaagccctccctcctgaccctgcagggccctgtcctggcccctgggcagagcctgaccctccagtgtggctctgatgtcggctacaacagatttgttctgtataaggagggggaacgtgacttcctccagcgccctggccagcagccccaggctgggctctcccaggccaacttcaccctgggccctgtgagcccctccaatgggggccagtacaggtgctacggtgcacacaacctctcctccgagtggtcggcccccagcgaccccctgaacatcctgatggcaggacagatctatgacaccgtctccctgtcagcacagccgggccccacagtggcctcaggagagaacgtgaccctgctgtgtcagtcatggtggcagtttgacactttccttctgaccaaagaaggggcagcccatcccccactgcgtctgagatcaatgtacggagctcataagtaccaggctgaattccccatgagtcctgtgacctcagcccacgcggggacctacaggtgctacggctcatacagctccaacccccacctgctgtctcaccccagtgagcccctggagctcgtggtctcaggtcctgaggaccagccccttaaccccccagggtcaggccctcagaatcctccgggtctcggctctggtgcaggaacaagggctgcaggtctgggaagatacctggaggttttgattggggtctcggtggccttcgtcctgctgctcttcctcctcctcttcctcctcctccgacgtcagcgtcacagcaaacacaggacatctgaccagagaaagactgatttccagcgtcctgcaggggctgcggagacagagcccaaggacaggggcctgctgaggaggtccagcccagctgctgacgtccaggaagaaaacctctatgctgccgtgaaggacacacagtctgaggacagggtggagctggacagtcagagcccacacgatgaagacccccaggcagtgacgtatgccccggtgaaacactccagtcctaggagagaaatggcctctcctccctcctcactgtctggggaattcctggacacaaaggacagacaggtggaagaggacaggcagatggacactgaggctgctgcatctgaagcctcccaggatgtgacctacgcccagctgcacagcttgacccttagacggaaggcaactgagcctcctccatcccaggaaggggaacctccagctgagcccagcatctacgccactctggccatccactagcccggggggtacgcagaccccacactcagcagaaggagactcaggactgctgaaggcacgggagctgcccccagtggacaccagtgaaccccagtcagcctggacccctaacacagaccatgaggagacgctgggaacttgtgggactcacctgactcaaagatgactaatatcgtcccattttggaaataaagcaacagacttctcaa

SEQ ID NO: 16000 - DNA, 2848 bp, Homo sapiens
  source 1..2848: mol_type = unassigned DNA
tgcgtctctgctgatctgagtctgcctgcagcatggacctgggtcttccctgaagcatctccagggctggagagacgactgccatgcactgagggctcatccctctgcagagcgcggggtcaccgggaggagacgccatgacgcccgccctcacagccctgctctgccttgggctgagtctgggccccaggacccgcgtgcaggcagggcccttccccaaacccaccctctgggctgagccaggctctgtgatcagctgggggagccccgtgaccatctggtgtcaggggagccaggaggcccaggagtaccgactgcataaagagggaagcccagagcccttggacagaaataacccactggaacccaagaacaaggccagattctccatcccatccatgacagagcaccatgcagggagataccgctgccactattacagctctgcaggctggtcagagcccagcgaccccctggagatggtgatgacaggagcctacagcaaacccaccctctcagccctgcccagccctgtggtggcctcaggggggaatatgaccctccgatgtggctcacagaagggatatcaccattttgttctgatgaaggaaggagaacaccagctcccccggaccctggactcacagcagctccacagtcgggggttccaggccctgttccctgtgggccccgtgacccccagccacaggtggaggttcacatgctattactattatacaaacaccccctgggtgtggtcccaccccagtgaccccctggagattctgccctcaggcgtgtctaggaagccctccctcctgaccctgcagggccctgtcctggcccctgggcagagcctgaccctccagtgtggctctgatgtcggctacaacagatttgttctgtataaggagggggaacgtgacttcctccagcgccctggccagcagccccaggctgggctctcccaggccaacttcaccctgggccctgtgagcccctccaatgggggccagtacaggtgctacggtgcacacaacctctcctccgagtggtcggcccccagcgaccccctgaacatcctgatggcaggacagatctatgacaccgtctccctgtcagcacagccgggccccacagtggcctcaggagagaacgtgaccctgctgtgtcagtcatggtggcagtttgacactttccttctgaccaaagaaggggcagcccatcccccactgcgtctgagatcaatgtacggagctcataagtaccaggctgaattccccatgagtcctgtgacctcagcccacgcggggacctacaggtgctacggctcatacagctccaacccccacctgctgtctcaccccagtgagcccctggagctcgtggtctcaggacactctggaggctccagcctcccacccacagggccgccctccacacctggtctgggaagatacctggaggttttgattggggtctcggtggccttcgtcctgctgctcttcctcctcctcttcctcctcctccgacgtcagcgtcacagcaaacacaggacatctgaccagagaaagactgatttccagcgtcctgcaggggctgcggagacagagcccaaggacaggggcctgctgaggaggtccagcccagctgctgacgtccaggaagaaaacctctatgctgccgtgaaggacacacagtctgaggacagggtggagctggacagtcagagcccacacgatgaagacccccaggcagtgacgtatgccccggtgaaacactccagtcctaggagagaaatggcctctcctccctcctcactgtctggggaattcctggacacaaaggacagacaggtggaagaggacaggcagatggacactgaggctgctgcatctgaagcctcccaggatgtgacctacgcccagctgcacagcttgacccttagacggaaggcaactgagcctcctccatcccaggaaggggaacctccagctgagcccagcatctacgccactctggccatccactagcccggggggtacgcagaccccacactcagcagaaggagactcaggactgctgaaggcacgggagctgcccccagtggacaccagtgaaccccagtcagcctggacccctaacacagaccatgaggagacgctgggaacttgtgggactcacctgactcaaagatgactaatatcgtcccattttggaaataaagcaacagacttctcaacaatcaatgagttaataacaaaaaaacaaaaaacaaaaacagacgtaaaggccgggtgtggtactcaggaggctgagtggggaggattccttgaacacaagaagttaaggctgctgaggctgcagtgagctatgactgtgccactgcactccagcctgtgtgacagagcgagaccttgtctctaaaaaaaaaaacagtgaatgttttaaactgaatgataatgtaaatattatacatcgaacttatgacatgggaaaattaagaagcataaataggccgggcgcggtggctcacgcctataatctcagcactttgggaggctgatgcgggcggatcatgaggtcaggagatcgagaccatcctggctaacacggtgaaaccccgtctctactaaaaatacaaaaaaattagccgggcgtggtggcgagtgcctatagtcccagctactcaggaggctgaggcaggagaatggcatgagcccgggaggcagagcttgcagtgagctgagatcgcaccactgcactccagcctgggcgacagagtgagattccgtctcgaaaaaaaaaaaaaaagaaagaaaaaaaataaaaaagaagcataaccagg

SEQ ID NO: 16001 - DNA, 2114 bp, Homo sapiens
  source 1..2114: mol_type = unassigned DNA
ccatgacgcccgccctcacagccctgctctgccttgggctgagtctgggccccaggacccgcgtgcaggcagggcccttccccaaacccaccctctgggctgagccaggctctgtgatcagctgggggagccccgtgaccatctggtgtcaggggagcctggaggcccaggagtaccaactggataaagagggaagcccagagcccttggacagaaataacccactggaacccaagaacaaggccagattctccatcccatccatgacacagcaccatgcagggagataccgctgccactattacagctctgcaggctggtcagagcccagcgaccccctggagctggtgatgacaggagcctacagcaaacccaccctctcagccctgcccagccctgtggtggcctcaggggggaatatgaccctccgatgtggctcacagaagggatatcaccattttgttctgatgaaggaaggagaacaccagctcccccggaccctggactcacagcagctccacagtcgggggttccaggccctgttccctgtgggccccgtgacccccagccacaggtggaggttcacatgctattactattatacaaacaccccctgggtgtggtcccaccccagtgaccccctggagattctgccctcaggcgtgtctaggaagccctccctcctgaccctgcagggccctgtcctggcccctgggcagagcctgaccctccagtgtggctctgatgtcggctacaacagatttgttctgtataaggagggggaacgtgacttcctccagcgccctggccagcagccccaggctgggctctcccaggccaacttcaccctgggccctgtgagcccctccaatgggggccagtacaggtgctacggtgcacacaacctctcctccgagtggtcggcccccagcgaccccctgaacatcctgatggcaggacagatctatgacaccgtctccctgtcagcacagccgggccccacagtggcctcaggagagaacgtgaccctgctgtgtcagtcatggtggcagtttgacactttccttctgaccaaagaaggggcagcccatcccccactgcgtctgagatcaatgtacggagctcataagtaccaggctgaattccccatgagtcctgtgacctcagcccacgcggggacctacaggtgctacggctcatacagctccaacccccacctgctgtctcaccccagtgagcccctggagctcgtggtctcaggacactctggaggctccagcctcccacccacagggccgccctccacacctggaggtcctgaggaccagccccttaaccccccagggtcaggccctcagaatcgtctgggaagatacctggaggttttgattggggtctcggtggccttcgtcctgctgctcttcctcctcctcttcctcctcctccgacgtcagcgtcacagcaaacacaggacatctgaccagagaaagactgatttccagcgtcctgcaggggctgcggagacagagcccaaggacaggggcctgctgaggaggtccagcccagctgctgacgtccaggaagaaaacctctatgctgccgtgaaggacacacagtctgaggacagggtggagctggacagtcagagcccacacgatgaagacccccaggcagtgacgtatgccccggtgaaacactccagtcctaggagagaaatggcctctcctccctcctcactgtctggggaattcctggacacaaaggacagacaggtggaagaggacaggcagatggacactgaggctgctgcatctgaagcctcccaggatgtgacctacgcccagctgcacagcttgacccttagacggaaggcaactgagcctcctccatcccaggaaggggaacctccagctgagcccagcatctacgccactctggccatccactagcccggggggtacgcagaccccacactcagcagaaggagactcaggactgctgaaggcacgggagctgcccccagtggacaccagtgaaccccagtcagcctggacccctaacacagaccatgaggagacgctgggaacttgtgggactcacctgactcaaagatg

SEQ ID NO: 16002 - DNA, 2822 bp, Homo sapiens
  source 1..2822: mol_type = unassigned DNA
atgacaagaaggacccagcctccgagcggccacaccctgtgtgtctctctgtcctgccagcactgagggctcatccctctgcagagcgcggggtcaccgggaggagacgccatgacgcccgccctcacagccctgctctgccttgggctgagtctgggccccaggacccgcgtgcaggcagggcccttccccaaacccaccctctgggctgagccaggctctgtgatcagctgggggagccccgtgaccatctggtgtcaggggagccaggaggcccaggagtaccgactgcataaagagggaagcccagagcccttggacagaaataacccactggaacccaagaacaaggccagattctccatcccatccatgacagagcaccatgcagggagataccgctgccactattacagctctgcaggctggtcagagcccagcgaccccctggagatggtgatgacaggagcctacagcaaacccaccctctcagccctgcccagccctgtggtggcctcaggggggaatatgaccctccgatgtggctcacagaagggatatcaccattttgttctgatgaaggaaggagaacaccagctcccccggaccctggactcacagcagctccacagtcgggggttccaggccctgttccctgtgggccccgtgacccccagccacaggtggaggttcacatgctattactattatacaaacaccccctgggtgtggtcccaccccagtgaccccctggagattctgccctcaggcgtgtctaggaagccctccctcctgaccctgcagggccctgtcctggcccctgggcagagcctgaccctccagtgtggctctgatgtcggctacaacagatttgttctgtataaggagggggaacgtgacttcctccagcgccctggccagcagccccaggctgggctctcccaggccaacttcaccctgggccctgtgagcccctccaatgggggccagtacaggtgctacggtgcacacaacctctcctccgagtggtcggcccccagcgaccccctgaacatcctgatggcaggacagatctatgacaccgtctccctgtcagcacagccgggccccacagtggcctcaggagagaacgtgaccctgctgtgtcagtcatggtggcagtttgacactttccttctgaccaaagaaggggcagcccatcccccactgcgtctgagatcaatgtacggagctcataagtaccaggctgaattccccatgagtcctgtgacctcagcccacgcggggacctacaggtgctacggctcatacagctccaacccccacctgctgtctcaccccagtgagcccctggagctcgtggtctcaggacactctggaggctccagcctcccacccacagggccgccctccacacctggtctgggaagatacctggaggttttgattggggtctcggtggccttcgtcctgctgctcttcctcctcctcttcctcctcctccgacgtcagcgtcacagcaaacacaggacatctgaccagagaaagactgatttccagcgtcctgcaggggctgcggagacagagcccaaggacaggggcctgctgaggaggtccagcccagctgctgacgtccaggaagaaaacctctatgctgccgtgaaggacacacagtctgaggacagggtggagctggacagtcagagcccacacgatgaagacccccaggcagtgacgtatgccccggtgaaacactccagtcctaggagagaaatggcctctcctccctcctcactgtctggggaattcctggacacaaaggacagacaggtggaagaggacaggcagatggacactgaggctgctgcatctgaagcctcccaggatgtgacctacgcccagctgcacagcttgacccttagacggaaggcaactgagcctcctccatcccaggaaggggaacctccagctgagcccagcatctacgccactctggccatccactagcccggggggtacgcagaccccacactcagcagaaggagactcaggactgctgaaggcacgggagctgcccccagtggacaccagtgaaccccagtcagcctggacccctaacacagaccatgaggagacgctgggaacttgtgggactcacctgactcaaagatgactaatatcgtcccattttggaaataaagcaacagacttctcaacaatcaatgagttaataacaaaaaaacaaaaaacaaaaacagacgtaaaggccgggtgtggtactcaggaggctgagtggggaggattccttgaacacaagaagttaaggctgctgaggctgcagtgagctatgactgtgccactgcactccagcctgtgtgacagagcgagaccttgtctctaaaaaaaaaaacagtgaatgttttaaactgaatgataatgtaaatattatacatcgaacttatgacatgggaaaattaagaagcataaataggccgggcgcggtggctcacgcctataatctcagcactttgggaggctgatgcgggcggatcatgaggtcaggagatcgagaccatcctggctaacacggtgaaaccccgtctctactaaaaatacaaaaaaattagccgggcgtggtggcgagtgcctatagtcccagctactcaggaggctgaggcaggagaatggcatgagcccgggaggcagagcttgcagtgagctgagatcgcaccactgcactccagcctgggcgacagagtgagattccgtctcgaaaaaaaaaaaaaaagaaagaaaaaaaataaaaaagaagcataaccagg

SEQ ID NO: 16003 - DNA, 586 bp, Homo sapiens
  source 1..586: mol_type = unassigned DNA
atgacaagaaggacccagcctccgagcggccacaccctgtgtgtctctctgtcctgccagcactgagggctcatccctctgcagagcgcggggtcaccgggaggagacgccatgacgcccgccctcacagccctgctctgccttgggctgagtctgggccccaggacccgcgtgcaggcagggcccttccccaaacccaccctctgggctgagccaggctctgtgatcagctgggggagccccgtgaccatctggtgtcaggggagccaggaggcccaggagtaccgactgcataaagagggaagcccagagcccttggacagaaataacccactggaacccaagaacaaggccagattctccatcccatccatgacagagcaccatgcagggagataccgctgccactattacagctctgcaggctggtcagagcccagcgaccccctggagatggtgatgacaggagcctacagcaaacccaccctctcagccctgcccagccctgtggtggcctcaggggggaatatgaccctccgatgtggctcacagaagggatatcaccattttgttctgatgaaggaag

SEQ ID NO: 16004 - DNA, 2083 bp, Homo sapiens
  source 1..2083: mol_type = unassigned DNA
cacttgttcaatgatgtacccccagtgtcaggcgctttgcaaacacacgatacatacgggttgatgtttggtcaagagaggaattaagaccaggcagacagcaggctgggatcagagagaccccatttctgtctgaaatgtctgcagagaacctggtgcctgcctcagccctagctctggggaaatgaaagccaggctggggttcaaatgagggcagtttcccttcctgtgggctgctgatggaacaaccccatgacgagaaggacccagcctccaagcggccacaccctgtgtgtctctttgtcctgccggcactgaggactcatccatctgcacagctggggcccctgggaggagacgccatgatccccaccttcacggctctgctctgcctcgggctgagtctgggccccaggacccacatgcaggcagggcccctccccaaacccaccctctgggctgagccaggctctgtgatcagctgggggaactctgtgaccatctggtgtcaggggaccctggaggctcgggagtaccgtctggataaagaggaaagcccagcaccctgggacagacagaacccactggagcccaagaacaaggccagattctccatcccatccatgacagaggactatgcagggagataccgctgttactatcgcagccctgtaggctggtcacagcccagtgaccccctggagctggtgatgacaggagcctacagtaaacccaccctttcagccctgccgagtcctcttgtgacctcaggaaagagcgtgaccctgctgtgtcagtcacggagcccaatggacactttccttctgatcaaggagcgggcagcccatcccctactgcatctgagatcagagcacggagctcagcagcaccaggctgaattccccatgagtcctgtgacctcagtgcacggggggacctacaggtgcttcagctcacacggcttctcccactacctgctgtcacaccccagtgaccccctggagctcatagtctcaggatccttggaggatcccaggccctcacccacaaggtccgtctcaacagctgcaggccctgaggaccagcccctcatgcctacagggtcagtcccccacagtggtctgagaaggcactgggaggtactgatcggggtcttggtggtctccatcctgcttctctccctcctcctcttcctcctcctccaacactggcgtcagggaaaacacaggacattggcccagagacaggctgatttccaacgtcctccaggggctgccgagccagagcccaaggacgggggcctacagaggaggtccagcccagctgctgacgtccagggagaaaacttctgtgctgccgtgaagaacacacagcctgaggacggggtggaaatggacactcggcagagcccacacgatgaagacccccaggcagtgacgtatgccaaggtgaaacactccagacctaggagagaaatggcctctcctccctccccactgtctggggaattcctggacacaaaggacagacaggcagaagaggacagacagatggacactgaggctgctgcatctgaagccccccaggatgtgacctacgcccagctgcacagctttaccctcagacagaaggcaactgagcctcctccatcccaggaaggggcctctccagctgagcccagtgtctatgccactctggccatccactaatccaggggggacccagaccccacaagccatggagactcaggaccccagaaggcatggaagctgcctccagtagacatcactgaaccccagccagcccagacccctgacacagaccactagaagattccgggaacgttgggagtcacctgattctgcaaagataaataatatccctgcattatcaaaataaagtagcagacctctcaattcacaatgagttaactgataaaacaaaacagaagtcagacaatgttttaaattgaatgatcatgtaaatattacacatcaaaccaatgacatgggaaaatgggagcttctaatgaggacaaacaaaaaatagagaaaaattaataaagtcaaaatgtttattcttg

SEQ ID NO: 16005 - DNA, 4002 bp, Homo sapiens
  source 1..4002: mol_type = unassigned DNA
ggcctgtgggaggcagaatagtgacctcccagagatgtccacctcctgaggcccagaccctcccagggagacccattttggacttgtgacctccgggacgagaacctggtgcctgcctcagccctagctctggggaaatgaaagccaggctggggttcaaatgagggcagtttcccttcctgtgggctgctgatggaacaaccccatgacgagaaggacccagcctccaagcggccacaccctgtgtgtctctttgtcctgccggcactgaggactcatccatctgcacagctggggcccctgggaggagacgccatgatccccaccttcacggctctgctctgcctcgggctgagtctgggccccaggacccacatgcaggcagggcccctccccaaacccaccctctgggctgagccaggctctgtgatcagctgggggaactctgtgaccatctggtgtcaggggaccctggaggctcgggagtaccgtctggataaagaggaaagcccagcaccctgggacagacagaacccactggagcccaagaacaaggccagattctccatcccatccatgacagaggactatgcagggagataccgctgttactatcgcagccctgtaggctggtcacagcccagtgaccccctggagctggtgatgacaggagcctacagtaaacccaccctttcagccctgccgagtcctcttgtgacctcaggaaagagcgtgaccctgctgtgtcagtcacggagcccaatggacactttccttctgatcaaggagcgggcagcccatcccctactgcatctgagatcagagcacggagctcagcagcaccaggctgaattccccatgagtcctgtgacctcagtgcacggggggacctacaggtgcttcagctcacacggcttctcccactacctgctgtcacaccccagtgaccccctggagctcatagtctcaggatccttggaggatcccaggccctcacccacaaggtccgtctcaacagctgcaggccctgaggaccagcccctcatgcctacagggtcagtcccccacagtggtctgagaaggcactgggaggtactgatcggggtcttggtggtctccatcctgcttctctccctcctcctcttcctcctcctccaacactggcgtcagggaaaacacaggacattggcccagagacaggctgatttccaacgtcctccaggggctgccgagccagagcccaaggacgggggcctacagaggaggtccagcccagctgctgacgtccagggagaaaacttctgtgctgccgtgaagaacacacagcctgaggacggggtggaaatggacactcggcagagcccacacgatgaagacccccaggcagtgacgtatgccaaggtgaaacactccagacctaggagagaaatggcctctcctccctccccactgtctggggaattcctggacacaaaggacagacaggcagaagaggacagacagatggacactgaggctgctgcatctgaagccccccaggatgtgacctacgcccagctgcacagctttaccctcagacagaaggcaactgagcctcctccatcccaggaaggggcctctccagctgagcccagtgtctatgccactctggccatccactaatccaggggggacccagaccccacaagccatggagactcaggaccccagaaggcatggaagctgcctccagtagacatcactgaaccccagccagcccagacccctgacacagaccactagaagattccgggaacgttgggagtcacctgattctgcaaagataaataatatccctgcattatcaaaataaagtagcagacctctcaattcacaatgagttaactgataaaacaaaacagaagtcagacaatgttttaaattgaatgatcatgtaaatattacacatcaaaccaatgacatgggaaaatgggagcttctaatgaggacaaacaaaaaatagagaaaaattaataaagtcaaaatgtttattcttgaaaacattaatgatacatgaatcttggccacaatgagaaaaataaaaatgaaaaaagagcaggcatccatttccatacaggaacaaaataggaggcagcactacagaccctacacacagctttacagaggtgaaagaaaactgtcagcaattctatgctgacataacagaaaatgtagatgagatagatgaaatacgaaaaattacagtttacttaatgaacataaggataaatagaaaaactgaatcatcatacataaacatatataaaatgcattgatcctgtaatcaaaaatgttcccacaaagtaaatgccacttcagcaaggtttgttggtggttttttcaaactcttatgcactcatgaaacacacagacacacacacacacaaacttgcataaattttccctgagaatattttgtatatatttacacaaatacatttgatcagactaggaacaagttgataccaaaacctgaaaaggaaactacagaatgggaaagtcatagaagatctctcacagaaatataaatcccttaacaaatattaacaagtaagattcatgtctctataaaatagacagtatatcatgaccacactggttttttgttatcctttgattttgtttatgaaaagcaaggatagcttaattttcaaaaactcaatcaatgtaattcagtattttaacaaaaggaatgaaaaattatcatctcaatagacaaagcttttgtctgagcaccttttcatatagctgctgaccatttgtatgtcttcttttgagaaatgcctgttcagctactttgcccatgtttcaagtagtttttggtttcttgctgttgctttgttttagttccttacatatttttgcatattaaccctttatcaggtatacagcttgcaactattttctcccatttctgagttgtctcttcattctgtttgcagaagctgtttagaagccacaccttttgtctatttttgcttttgttgcttgtgttttcagggccatatccaaaaaaaccttgcccggaccaacgtcttgaagcttttctcccacccatttttgtatatgggataagggttcaatttcattcttcttcatatgaatatccccaggatgtgtcctatgcccagctgcacagcttaccctcaaacagaaaataatgaagccttcttcctcccaggaaaggggacgttcagctgagccgagtgtgtatactgctctggccatccactagcccagggaggacccagacctccacactccatggagactcagttctcctaggaccatttattcaaaaggactgccctctcttgttcttggaaactttgttgaggatcaattcaccataaatatgtgtgtttccttctttgctttcatccctgttgcactgatcactgtacctgtttctattccagttccatgatgtcttcctggctgtagctttgtaggatatttggggattccatagtgtgatatccccttcttccctttgctcaagattgttttggctatttggggtccttttgtagtcccattcaaattttaggattgtttttctatttctgtggaaaacgaccttggaattttgttaggaattgcattgagtctgcaggtatgaacttttttttaaagttccagggcacatgtacaggacctgcagctttgttacataggtaggcttgtgccatggtggtttgctgcacctatcaacccattacctagttattaagcccagcatgcattagctctttttcctgatgctctccctcccttcatcatccgccctcccactacaagccccagtgtgtgttgttcccctccctgtgtccatgtgttctcattgttatacgaacattttaacaatgttaattcttgcagaccatgaacataagctaccttcccatttatatgcgtcttgttcaatttcattcatcaatgttataaagattttagtgcaga

SEQ ID NO: 16006 - DNA, 2268 bp, Homo sapiens
  source 1..2268: mol_type = unassigned DNA
gtgacagggagaacccagcctccagtccacactctgcgtgtttttgtgtcctgccaggcaccgtggtctcatccgcctgcacagctgagtccagtgggagctgacgccatgaccctcaccctctcagtcctgatttgcctcgggctgagtgtgggccccaggacctgcgtgcaggcaggcaccctccccaaacccaccctctgggctgagccagcctctgtgatagctcgggggaagcccgtgaccctctggtgtcaggggcccctggagactgaggagtaccgtctggataaggagggactcccatgggcccggaagagacagaacccactggagcctggagccaaggccaagttccacattccatccacggtgtatgacagtgcagggcgataccgctgctactatgagacccctgcaggctggtcagagcccagtgaccccctggagctggtggcgacaggattctatgcagaacccactcttttagccctgccgagtcctgtggtggcctcaggaggaaatgtgaccctccagtgtgatacactggacggacttctcacgtttgttcttgttgaggaagaacagaagctccccaggaccctgtactcacagaagctccccaaagggccatcccaggccctgttccctgtgggtcccgtgacccccagctgcaggtggaggttcagatgctattactattacaggaaaaaccctcaggtgtggtcgaaccccagtgacctcctggagattctggtcccaggcgtgtctaggaagccctccctcctgatcccgcagggctctgtcgtggcccgcggaggcagcctgaccctgcagtgtcgctctgatgtcggctatgacatattcgttctgtacaaggagggggaacatgacctcgtccagggctctggccagcagccccaggctgggctctcccaggccaacttcaccctgggccctgtgagccgctcccacgggggccagtacagatgctacggtgcacacaacctctcccctaggtggtcggcccccagcgaccccctggacatcctgatcgcaggactgatccctgacatacccgccctctcggtgcagccgggccccaaggtggcctcaggagagaacgtgaccctgctgtgtcagtcatggcatcagatagacactttctttttgaccaaggagggggcagcccatcccccgctgtgtctaaagtcaaagtaccagtcttatagacaccaggctgaattctccatgagtcctgtgacctcagcccagggtggaacctaccgatgctacagcgcaatcaggtcctacccctacctgctgtccagccctagttacccccaggagctcgtggtctcaggaccctctggggatcccagcctctcacctacaggctccacccccacacctggccctgaggaccagcccctcacccccacggggttggatccccagagtggtctgggaaggcacctgggggttgtgactggggtctcagtggccttcgtcctgctgctgttcctcctcctcttcctcctcctccgacatcggcatcagagcaaacacaggacatcggcccatttctaccgtcctgcaggggctgcggggccagagcccaaggaccagggcctgcagaagagggccagcccagttgctgacatccaggaggaaattctcaatgctgccgtgaaggacacacagcccaaggacggggtggagatggatgctcgggctgctgcatctgaagccccccaggatgtgacctacgcccagctacacagcttgaccctcagacgggaggcaactgagcctcctccatcccaggaaagggaacctccagctgaacccagcatctacgcccccctggccatccactagcccacgggggacccagatctcatactcaacagaaggagactcagagactccagaaggcacaggagctgcccccagtggacaccaatgaaccccagccagcctggacccctaacaaagaccaccaggacatcctgggaactctgggactcactagattctgcagtcaaagatgactaatatccttgcatttttgaaatgaagccacagacttctcaataaatcaatgagctgagaaaactgaaacagaaattagagcatggtataaatttggaatgataatgtaaatattacacattaaatgatgaaatcggaaaactacaaatgagcgaatgaattagaaaagaataaaacctacgtaattaatgaccttggcaatgacagaaagaa

SEQ ID NO: 16007 - DNA, 2264 bp, Homo sapiens
  source 1..2264: mol_type = unassigned DNA
cttgtgacagggagaacccagcctccagtccacactctgcgtgtttttgtgtcctgccaggcaccgtggtctcatccgcctgcacagctgagtccagtgggagctgacgccatgaccctcaccctctcagtcctgatttgcctcgggctgagtgtgggccccaggacctgcgtgcaggcaggcaccctccccaaacccaccctctgggctgagccagcctctgtgatagctcgggggaagcccgtgaccctctggtgtcaggggcccctggagactgaggagtaccgtctggataaggagggactcccatgggcccggaagagacagaacccactggagcctggagccaaggccaagttccacattccatccacggtgtatgacagtgcagggcgataccgctgctactatgagacccctgcaggctggtcagagcccagtgaccccctggagctggtggcgacaggattctatgcagaacccactcttttagccctgccgagtcctgtggtggcctcaggaggaaatgtgaccctccagtgtgatacactggacggacttctcacgtttgttcttgttgaggaagaacagaagctccccaggaccctgtactcacagaagctccccaaagggccatcccaggccctgttccctgtgggtcccgtgacccccagctgcaggtggaggttcagatgctattactattacaggaaaaaccctcaggtgtggtcgaaccccagtgacctcctggagattctggtcccaggcgtgtctaggaagccctccctcctgatcccgcagggctctgtcgtggcccgcggaggcagcctgaccctgcagtgtcgctctgatgtcggctatgacatattcgttctgtacaaggagggggaacatgacctcgtccagggctctggccagcagccccaggctgggctctcccaggccaacttcaccctgggccctgtgagccgctcccacgggggccagtacagatgctacggtgcacacaacctctcccctaggtggtcggcccccagcgaccccctggacatcctgatcgcaggactgatccctgacatacccgccctctcggtgcagccgggccccaaggtggcctcaggagagaacgtgaccctgctgtgtcagtcatggcatcagatagacactttctttttgaccaaggagggggcagcccatcccccgctgtgtctaaagtcaaagtaccagtcttatagacaccaggctgaattctccatgagtcctgtgacctcagcccagggtggaacctaccgatgctacagcgcaatcaggtcctacccctacctgctgtccagccctagttacccccaggagctcgtggtctcaggaccctctggggatcccagcctctcacctacaggctccacccccacacctgcaggccctgaggaccagcccctcacccccacggggttggatccccagagtggtctgggaaggcacctgggggttgtgactggggtctcagtggccttcgtcctgctgctgttcctcctcctcttcctcctcctccgacatcggcatcagagcaaacacaggacatcggcccatttctaccgtcctgcaggggctgcggggccagagcccaaggaccagggcctgcagaagagggccagcccagttgctgacatccaggaggaaattctcaatgctgccgtgaaggacacacagcccaaggacggggtggagatggatgctcgggctgctgcatctgaagccccccaggatgtgacctacgcccagctacacagcttgaccctcagacgggaggcaactgagcctcctccatcccaggaaagggaacctccagctgaacccagcatctacgcccccctggccatccactagcccacgggggacccagatctcatactcaacagaaggagactcagagactccagaaggcacaggagctgcccccagtggacaccaatgaaccccagccagcctggacccctaacaaagaccaccaggacatcctgggaactctgggactcactagattctgcagtcaaagatgactaatatccttgcatttttgaaatgaagccacagacttctcaataaatcaatgagctgagaaaactgaaacagaaattagagcatggtataaatttggaatgataatgtaaatattacacattaaatgatgaaatcggaaaactacaaatgagcgaatgaattagaaaagaataaaacctacgtaattaatgaccttggcaatg

SEQ ID NO: 16008 - DNA, 2444 bp, Homo sapiens
  source 1..2444: mol_type = unassigned DNA
actctgcgtgtttttgtgtcctgccaggcaccgtggtctcatccgcctgcacagctgagtccagtgggagctgacgccatgaccctcaccctctcagtcctgatttgcctcgggctgagtgtgggccccaggacctgcgtgcaggcaggcaccctccccaaacccaccctctgggctgagccagcctctgtgatagctcgggggaagcccgtgaccctctggtgtcaggggcccctggagactgaggagtaccgtctggataaggagggactcccatgggcccggaagagacagaacccactggagcctggagccaaggccaagttccacattccatccacggtgtatgacagtgcagggcgataccgctgctactatgagacccctgcaggctggtcagagcccagtgaccccctggagctggtggcgacagccctgccgagtcctgtggtggcctcaggaggaaatgtgaccctccagtgtgatacactggacggacttctcacgtttgttcttgttgaggaagaacagaagctccccaggaccctgtactcacagaagctccccaaagggccatcccaggccctgttccctgtgggtcccgtgacccccagctgcaggtggaggttcagatgctattactattacaggaaaaaccctcaggtgtggtcgaaccccagtgacctcctggagattctggtcccaggcgtgtctaggaagccctccctcctgatcccgcagggctctgtcgtggcccgcggaggcagcctgaccctgcagtgtcgctctgatgtcggctatgacatattcgttctgtacaaggagggggaacatgacctcgtccagggctctggccagcagccccaggctgggctctcccaggccaacttcaccctgggccctgtgagccgctcccacgggggccagtacagatgctacggtgcacacaacctctcccctaggtggtcggcccccagcgaccccctggacatcctgatcgcaggactgatccctgacatacccgccctctcggtgcagccgggccccaaggtggcctcaggagagaacgtgaccctgctgtgtcagtcatggcatcagatagacactttctttttgaccaaggagggggcagcccatcccccgctgtgtctaaagtcaaagtaccagtcttatagacaccaggctgaattctccatgagtcctgtgacctcagcccagggtggaacctaccgatgctacagcgcaatcaggtcctacccctacctgctgtccagccctagttacccccaggagctcgtggtctcaggaccctctggggatcccagcctctcacctacaggctccacccccacacctgcaggccctgaggaccagcccctcacccccacggggttggatccccagagtggtctgggaaggcacctgggggttgtgactggggtctcagtggccttcgtcctgctgctgttcctcctcctcttcctcctcctccgacatcggcatcagagcaaacacaggacatcggcccatttctaccgtcctgcaggggctgcggggccagagcccaaggaccagggcctgcagaagagggccagcccagttgctgacatccaggaggaaattctcaatgctgccgtgaaggacacacagcccaaggacggggtggagatggatgctcggcagagcccacacgatgaagacccccaggcagtgacgtatgccgaggtgaaacactccagacctaggagagaaatggcctctcctccctccccactgtctggggaattcctggacacaaaggacagacaggcagaagaggacagacagatggacactgagagagtcctttcctctccaggcccccaggcctccccacccccaccacgttccttacctctcactctcccccgctgcaggctgctgcatctgaagccccccaggatgtgacctacgcccagctacacagcttgaccctcagacgggaggcaactgagcctcctccatcccaggaaagggaacctccagctgaacccagcatctacgcccccctggccatccactagcccacgggggacccagatctcatactcaacagaaggagactcagagactccagaaggcacaggagctgcccccagtggacaccaatgaaccccagccagcctggacccctaacaaagaccaccaggacatcctgggaactctgggactcactagattctgcagtcaaagatgactaatatccttgcatttttgaaatgaagccacagacttctcaataaatcaatgagctgagaaaactgaaacagaaattagagcatggtataaatttggaatgataatgtaaatattacacattaaatgatgaaatcggaaaactacaaatgagcgaatgaattagaaaagaataaaacctacgtaattaatgaccttggcaatgacag

SEQ ID NO: 16009 - DNA, 3100 bp, Homo sapiens
  source 1..3100: mol_type = unassigned DNA
agctttaggtccggggagtgtctcgccagcggcagcacacccctgtaagtggtggccagggctgccgtggcaaaatgagctgtcaactttaggttgacaggggtgtggccgcgaccgcaagggcttttgttgccgggtggacccaacagggatgggctgctggggacagctgctggtgtggttcggagccgcgggcgccattctctgctctagcccggggtcccaggagacttttctgcggtcctcgcccctgccgctggcaagtcccagcccccgggacccgaaagtcagcgccccgcctagtatcttggagccagcctccccgctgaattctccgggcaccgaggggtcttggctgttttctacctgcggggccagcggccggcatgggcccacacagacacaatgtgacggggcgtacgcggggaccagcgtggtggtgaccgtgggggccgccgggcagctgagaggcgtgcagctgtggcgcgtgccgggccctggccagtatctgatctcagcctacggagccgcgggcggcaaaggcgccaagaaccacctgtcgcgggcgcatggcgtcttcgtctcagcaatcttctccctcggtctcggggagtcgctgtacatcctggtggggcagcagggagaggacgcctgtcccggaggtagcccggagagccagctcgtctgcctcggggagtctcgagccgttgaagagcacgcggcgatggatgggagcgaaggggtcccggggtcgcggcgctgggcgggaggtggcgggggtggcgggggcgccacctacgttttccgggtgcgcgctggcgagctggaaccgttgctggtggcggccggaggcggcggtcgggcctacctgaggccgcgggaccgaggccggactcaggcctcccccgagaaactggagaaccgctcggaggcgcccgggagcggcgggagaggcggggcggcaggtggtgggggcggctggacgtcgcgggctccctctccgcaggccggccgctcactgcaggagggggcggagggcggccagggctgctccgaggcttgggcgacccttggctgggccgcggccggcggcttcgggggcggcggcggggcctgcactgcgggcggaggcggcggcggctacagggggggcgacgcttcagagactgacaacctctgggctgatggggaagatggagtatccttcatacaccccagcagcgagctcttcctgcagcctctggcagtcaccgagaaccacggagaggtagagatccgaaggcacctcaactgcagtcactgccctttgagagactgccaatggcaggcagagctccagctggctgaatgcctgtgcccagaaggcatggagctagctgtggataacgtcacctgcatggacctgcacaagcccccaggccctctggttctgatggtggctgtggtggcaacctcaacactgagcctccttatggtgtgtggggtcctgattctggtgaagcagaagaagtggcagggcctgcaggagatgaggctgccgagccctgagcttgagctgagcaagcttcgaacctctgccatcaggacagcccccaatccctattattgccaggtggggcttggcccggcccagtcctggcctctgccaccaggtgtcaccgaggtttccccagccaatgttactctgctcagagccctgggccatggtgcctttggggaggtgtatgagggactggtaattggccttcctggggactccagtcccctgcaggtagctatcaagaccctgccagaactctgctcgcctcaggatgagctggatttcctcatggaggccctcatcatcagcaagtttcgccatcagaacattgtgcggtgtgtggggctcagcctcagggccacccctcgcctcattctgctggaactgatgtctggaggggacatgaagagtttcctgaggcacagtcggccacacctgggccagccatcacctctggtcatgcgggacctgctgcaactggcccaggacatagcccagggctgccactacctggaggaaaatcacttcatccacagggatattgccgcccggaactgcctgctgagctgcgctggacccagccgagtggccaagattggggactttgggatggcacgagatatctaccgggccagttattaccgcaggggggaccgggccttgctcccagtcaagtggatgcccccagaggccttcctggagggcatcttcacatccaagacagattcctggtcttttggggtgctgctctgggagatcttctcactgggctacatgccctatcctgggcgcaccaaccaggaggtgctggacttcgtcgttggaggaggccggatggaccctcctaggggctgcccagggcctgtgtaccgcatcatgacccagtgttggcagcacgagcctgagctccgccctagctttgccagcatcttggagcgtctgcagtactgcactcaggacccggatgtgctgaattcactcctgccaatggagctggggcccaccccagaggaggaagggacttctgggctggggaacagatctttggagtgcctaagacccccacagccccaggaactgagtccagagaagttgaaaagctggggaggtagccctcttggcccctggctgtcctctggcctcaagcccctcaaatccaggggcctccaacctcagaacctttggaatcccacttatcgctcctgagccccaaggggccctgagggtaaggactgaggcactgagggtccctccctatactcctcaggctcctgggtggcctgttatgccagcggcctctgttccctgcagtctgtgctgtgtgtctgggcctgtctcggggctggcctggcagcgctgcacttgccatgctggaaaccagcccaggcctcccagggaagggcccagccacttccagcttttgatcttggggccagaggccgccttacacacaccccaggtgtccatggggagcactggattgctctcccattatgagcatccttcatctgggcagaccccccaccctgcagatgcttctaataaaaagctcttctcatc

SEQ ID NO: 16010 - DNA, 2940 bp, Homo sapiens
  source 1..2940: mol_type = unassigned DNA
aggtgggcgtggccagaccagctttaggtccggggagtgtctcgccagcggcagcacacccctgtaagtggtggccagggctgccgtggcaaaatgagctgtcaactttaggttgacaggggtgtggccgcgaccgcaagggcttttgttgccgggtggacccaacagggatgggctgctggggacagctgctggtgtggttcggagccgcgggcgccattctctgctctagcccggggtcccaggagacttttctgcggtcctcgcccctgccgctggcaagtcccagcccccgggacccgaaagtcagcgccccgcctagtatcttggagccagcctccccgctgaattctccgggcaccgaggggtcttggctgttttctacctgcggggccagcggccggcatgggcccacacagacacaatgtgacggggcgtacgcggggaccagcgtggtggtgaccgtgggggccgccgggcagctgagaggcgtgcagctgtggcgcgtgccgggccctggccagtatctgatctcagcctacggagccgcgggcggcaaaggcgccaagaaccacctgtcgcgggcgcatggcgtcttcgtctcagcaatcttctccctcggtctcggggagtcgctgtacatcctggtggggcagcagggagaggacgcctgtcccggaggtagcccggagagccagctcgtctgcctcggggagtctcgagccgttgaagagcacgcggcgatggatgggagcgaaggggtcccggggtcgcggcgctgggcgggaggtggcgggggtggcgggggcgccacctacgttttccgggtgcgcgctggcgagctggaaccgttgctggtggcggccggaggcggcggtcgggcctacctgaggccgcgggaccgaggccggactcaggcctcccccgagaaactggagaaccgctcggaggcgcccgggagcggcgggagaggcggggcggcagggggcgacgcttcagagactgacaacctctgggctgatggggaagatggagtatccttcatacaccccagcagcgagctcttcctgcagcctctggcagtcaccgagaaccacggagaggtagagatccgaaggcacctcaactgcagtcactgccctttgagagactgccaatggcaggcagagctccagctggctgaatgcctgtgcccagaaggcatggagctagctgtggataacgtcacctgcatggacctgcacaagcccccaggccctctggttctgatggtggctgtggtggcaacctcaacactgagcctccttatggtgtgtggggtcctgattctggtgaagcagaagaagtggcagggcctgcaggagatgaggctgccgagccctgagcttgagctgagcaagcttcgaacctctgccatcaggacagcccccaatccctattattgccaggtggggcttggcccggcccagtcctggcctctgccaccaggtgtcaccgaggtttccccagccaatgttactctgctcagagccctgggccatggtgcctttggggaggtgtatgagggactggtaattggccttcctggggactccagtcccctgcaggtagctatcaagaccctgccagaactctgctcgcctcaggatgagctggatttcctcatggaggccctcatcatcagcaagtttcgccatcagaacattgtgcggtgtgtggggctcagcctcagggccacccctcgcctcattctgctggaactgatgtctggaggggacatgaagagtttcctgaggcacagtcggccacacctgggccagccatcacctctggtcatgcgggacctgctgcaactggcccaggacatagcccagggctgccactacctggaggaaaatcacttcatccacagggatattgccgcccggaactgcctgctgagctgcgctggacccagccgagtggccaagattggggactttgggatggcacgagatatctaccgggccagttattaccgcaggggggaccgggccttgctcccagtcaagtggatgcccccagaggccttcctggagggcatcttcacatccaagacagattcctggtcttttggggtgctgctctgggagatcttctcactgggctacatgccctatcctgggcgcaccaaccaggaggtgctggacttcgtcgttggaggaggccggatggaccctcctaggggctgcccagggcctgtgtaccgcatcatgacccagtgttggcagcacgagcctgagctccgccctagctttgccagcatcttggagcgtctgcagtactgcactcaggacccggatgtgctgaattcactcctgccaatggagctggggcccaccccagaggaggaagggacttctgggctggggaacagatctttggagtgcctaagacccccacagccccaggaactgagtccagagaagttgaaaagctggggaggtagccctcttggcccctggctgtcctctggcctcaagcccctcaaatccaggggcctccaacctcagaacctttggaatcccacttatcgctcctgagccccaaggggccctgagggtaaggactgaggcactgagggtccctccctatactcctcaggctcctgggtggcctgttatgccagcggcctctgttccctgcagtctgtgctgtgtgtctgggcctgtctcggggctggcctggcagcgctgcacttgccatgctggaaaccagcccaggcctcccagggaagggcccagccacttccagcttttgatcttggggccagaggccgccttacacacaccccaggtgtccatggggagcactggattgctctcccattatgagcatccttcatctgggcagaccccccaccctgcagatgcttctaataaaaagctcttctcatcctcc

SEQ ID NO: 16011 - DNA, 1612 bp, Homo sapiens
  source 1..1612: mol_type = unassigned DNA
ggggtctgaggtgggcgtggccagaccagctttaggtccggggagtgtctcgccagcggcagcacacccctgtaagtggtggccagggctgccgtggcaaaatgagctgtcaactttaggttgacaggggtgtggccgcgaccgcaagggcttttgttgccgggtggacccaacagggatgggctgctggggacagctgctggtgtggttcggagccgcgggcgccattctctgctctagcccggggtcccaggagacttttctgcggtcctcgcccctgccgctggcaagtcccagcccccgggacccgaaagtcagcgccccgcctagtatcttggagccagcctccccgctgaattctccgggcaccgaggggtcttggctgttttctacctgcggggccagcggccggcatgggcccacacagacacaatgtgacggggcgtacgcggggaccagcgtggtggtgaccgtgggggccgccgggcagctgagaggcgtgcagctgtggcgcgtgccgggccctggccagtatctgatctcagcctacggagccgcgggcggcaaaggcgccaagaaccacctgtcgcgggcgcatggcgtcttcgtctcagcaatcttctccctcggtctcggggagtcgctgtacatcctggtggggcagcagggagaggacgcctgtcccggaggtagcccggagagccagctcgtctgcctcggggagtctcgagccgttgaagagcacgcggcgatggatgggagcgaaggggtcccggggtcgcggcgctgggcgggaggtggcgggggtggcgggggcgccacctacgttttccgggtgcgcgctggcgagctggaaccgttgctggtggcggccggaggcggcggtcgggcctacctgaggccgcgggaccgaggccggactcaggcctcccccgagaaactggagaaccgctcggaggcgcccgggagcggcgggagaggcggggcggcaggtggtgggggcggctggacgtcgcgggctccctctccgcaggccggccgctcactgcaggagggggcggagggcggccagggctgctccgaggcttgggcgacccttggctgggccgcggccggcggcttcgggggcggcggcggggcctgcactgcgggcggaggcggcggcggctacagggggggcgacgcttcagagactgacaacctctgggctgatggggaagatggagtatccttcatacaccccagcagcgagctcttcctgcagcctctggcagtcaccgagaaccacggagaggtagagatccgaaggcacctcaactgcagtcactgccctttgagagactgccaatggcaggcagagctccagctggctgaatgcctgtgcccagaaggcatggagctagctgtggataacgtcacctgcatggacctgcacaagcccccaggccctctggttctgatggtggctgtggtggcaacctcaacactgagcctccttatggtgtgtggggtcctgattctgggtacgaagcgtctagcaggcacagttgattcaaggctgctcctctccagtgagctgggatgggtttctgcgggagggggccggaggagg

SEQ ID NO: 16012 - DNA, 2737 bp, Homo sapiens
  source 1..2737: mol_type = unassigned DNA
ggggtctgaggtgggcgtggccagaccagctttaggtccggggagtgtctcgccagcggcagcacacccctgtaagtggtggccagggctgccgtggcaaaatgagctgtcaactttaggttgacaggggtgtggccgcgaccgcaagggcttttgttgccgggtggacccaacagggatgggctgctggggacagctgctggtgtggttcggagccgcgggcgccattctctgctctagcccggggtcccaggagacttttctgcggtcctcgcccctgccgctggcaagtcccagcccccgggacccgaaagtcagcgccccgcctagtatcttggagccagcctccccgctgaattctccgggcaccgaggggtcttggctgttttctacctgcggggccagcggccggcatgggcccacacagacacaatgtgacggggcgtacgcggggaccagcgtggtggtgaccgtgggggccgccgggcagctgagaggcgtgcagctgtggcgcgtgccgggccctggccagtatctgatctcagcctacggagccgcgggcggcaaaggcgccaagaaccacctgtcgcgggcgcatggcgtcttcgtctcagcaatcttctccctcggtctcggggagtcgctgtacatcctggtggggcagcagggagaggacgcctgtcccggaggtagcccggagagccagctcgtctgcctcggggagtctcgagccgttgaagagcacgcggcgatggatgggagcgaaggggtcccggggtcgcggcgctgggcgggaggtggcgggggtggcgggggcgccacctacgttttccgggtgcgcgctggcgagctggaaccgttgctggtggcggccggaggcggcggtcgggcctacctgaggccgcgggaccgaggccggactcaggcctcccccgagaaactggagaaccgctcggaggcgcccgggagcggcgggagaggcggggcggcagggggcgacgcttcagagactgacaacctctgggctgatggggaagatggagtatccttcatacaccccagcagcgagctcttcctgcagcctctggcagtcaccgagaaccacggagaggtagagatccgaaggcacctcaactgcagtcactgccctttgagagactgccaatggcaggcagagctccagctggctgaatgcctgtgcccagaaggcatggagctagctgtggataacgtcacctgcatggacctgcacaagcccccaggccctctggttctgatggtggctgtggtggcaacctcaacactgagcctccttatggtgtgtggggtcctgattctgggtggggcttggcccggcccagtcctggcctctgccaccaggtgtcaccgaggtttccccagccaatgttactctgctcagaccctgccagaactctgctcgcctcaggatgagctggatttcctcatggaggccctcatcatcagcaagtttcgccatcagaacattgtgcggtgtgtggggctcagcctcagggccacccctcgcctcattctgctggaactgatgtctggaggggacatgaagagtttcctgaggcacagtcggccacacctgggccagccatcacctctggtcatgcgggacctgctgcaactggcccaggacatagcccagggctgccactacctggaggaaaatcacttcatccacagggatattgccgcccggaactgcctgctgagctgcgctggacccagccgagtggccaagattggggactttgggatggcacgagatatctaccgggccagttattaccgcaggggggaccgggccttgctcccagtcaagtggatgcccccagaggccttcctggagggcatcttcacatccaagacagattcctggtcttttggggtgctgctctgggagatcttctcactgggctacatgccctatcctgggcgcaccaaccaggaggtgctggacttcgtcgttggaggaggccggatggaccctcctaggggctgcccagggcctgtgtaccgcatcatgacccagtgttggcagcacgagcctgagctccgccctagctttgccagcatcttggagcgtctgcagtactgcactcaggacccggatgtgctgaattcactcctgccaatggagctggggcccaccccagaggaggaagggacttctgggctggggaacagatctttggagtgcctaagacccccacagccccaggaactgagtccagagaagttgaaaagctggggaggtagccctcttggcccctggctgtcctctggcctcaagcccctcaaatccaggggcctccaacctcagaacctttggaatcccacttatcgctcctgagccccaaggggccctgagggtaaggactgaggcactgagggtccctccctatactcctcaggctcctgggtggcctgttatgccagcggcctctgttccctgcagtctgtgctgtgtgtctgggcctgtctcggggctggcctggcagcgctgcacttgccatgctggaaaccagcccaggcctcccagggaagggcccagccacttccagcttttgatcttggggccagaggccgccttacacacaccccaggtgtccatggggagcactggattgctctcccattatgagcatccttcatctgggcagaccccccaccctgcagatgcttctaataaaaagctcttctcatc

SEQ ID NO: 16013 - DNA, 624 bp, Homo sapiens
  source 1..624: mol_type = unassigned DNA
gggattagcagtgaggaatgatgaggaacttgaggcaagtcaccagcccctgatcatttcgcctaaaagagcaaggactagagttcctgacctccaggccagtccctgatccctgacctaatgttatcgcggaatgatgatatatgtatctacgggggcctggggctgggcgggctcctgcttctggcagtggtccttctgtccgcctgcctgtgttggctgcatcgaagaggcccagggctcctcagagcaggaactccactatgcatctctgcagaggctgccagtgcccagcagtgagggacctgacctcaggggcagagacaagagaggcaccaaggaggatccaagagctgactatgcctgcattgctgagaacaaacccacctgagcaccccagacaccttcctcaacccaggcgggtggacagggtccccctgtggtccagccagtaaaaaccatggtccccccacttctgtgtctcagtcctctcagtccatctcgagcctccgttcaaattgatcatcatcaaaacttatgtggctttttgacctttgaatagggaattttttaaattttttaaaaattaaaataaaaaaaacacatggctcacccttccaccca

SEQ ID NO: 16014 - DNA, 635 bp, Homo sapiens
  source 1..635: mol_type = unassigned DNA
acttcagccctagcagcatctgcctgtgggaagcagctctccacaccagccaagggggcccccacactcccgcgctgctctgcggctcagggagcagcccacctgctggatgaggaacttgaggcaagtcaccagcccctgatcatttcgcctaaaagagcaaggactagagttcctgacctccaggccagtccctgatccctgacctaatgttatcgcggaatgatgatatatgtatctacgggggcctggggctgggcgggctcctgcttctggcagtggtccttctgtccgcctgcctgtgttggctgcatcgaagagcaccttctgtcctggtcccaggcccagggctcctcagagcaggaactccactatgcatctctgcagaggctgccagtgcccagcagtgagggacctgacctcaggggcagagacaagagaggcaccaaggaggatccaagagctgactatgcctgcattgctgagaacaaacccacctgagcaccccagacaccttcctcaacccaggcgggtggacagggtccccctgtggtccagccagtaaaaaccatggtccccccacttctgtgtctcagtcctctcagtccatctcgagcctccgttcaaattgatca

SEQ ID NO: 16015 - DNA, 554 bp, Homo sapiens
  source 1..554: mol_type = unassigned DNA
atgaggaacttgaggcaagtcaccagcccctgatcatttcgcctaaaagagcaaggactagagttcctgacctccaggccagtccctgatccctgacctaatgttatcgcggaatgatgtaaagaggctggagaggagctggcaccttctgtcctggtcccaggcccagggctcctcagagcaggaactccactatgcatctctgcagaggctgccagtgcccagcagtgagggacctgacctcaggggcagagacaagagaggcaccaaggaggatccaagagctgactatgcctgcattgctgagaacaaacccacctgagcaccccagacaccttcctcaacccaggcgggtggacagggtccccctgtggtccagccagtaaaaaccatggtccccccacttctgtgtctcagtcctctcagtccatctcgagcctccgttcaaattgatcatcatcaaaacttatgtggctttttgacctttgaatagggaattttttaaattttttaaaaattaaaataaaaaaaacacatggctcacccttccaccc

SEQ ID NO: 16016 - DNA, 680 bp, Homo sapiens
  source 1..680: mol_type = unassigned DNA
ggtctttacttgggcaacgggcaccatgataccctatgttctggggattagcagtgaggaatggaaagtgcccagctcagggttggcacataagggaggctccccagcctgggaacgattataacagagggcccctcacttcacagatgaggaacttgaggcaagtcaccagcccctgatcatttcgcctaaaagagcaaggactagagttcctgacctccaggccagtccctgatccctgacctaatgttatcgcggaatgatgtaaagaggctggagaggagctgggcccagggctcctcagagcaggaactccactatgcatctctgcagaggctgccagtgcccagcagtgagggacctgacctcaggggcagagacaagagaggcaccaaggaggatccaagagctgactatgcctgcattgctgagaacaaacccacctgagcaccccagacaccttcctcaacccaggcgggtggacagggtccccctgtggtccagccagtaaaaaccatggtccccccacttctgtgtctcagtcctctcagtccatctcgagcctccgttcaaattgatcatcatcaaaacttatgtggctttttgacctttgaatagggaattttttaaattttttaaaaattaaaataaaaaaaacacatggctcacccttccaccca

SEQ ID NO: 16017 - DNA, 285 bp, Homo sapiens
  source 1..285: mol_type = unassigned DNA
atgaggaacttgaggcaagtcaccagcccctgatcatttcgcctaaaagagcaaggactagagttcctgacctccaggccagtccctgatccctgacctaatgttatcgcggaatgatgcaccttctgtcctggtcccaggcccagggctcctcagagcaggaactccactatgcatctctgcagaggctgccagtgcccagcagtgagggacctgacctcaggggcagagacaagagaggcaccaaggaggatccaagagctgactatgcctgcattgctgaga

SEQ ID NO: 16018 - DNA, 648 bp, Homo sapiens
  source 1..648: mol_type = unassigned DNA
atgaggaacttgaggcaagtcaccagcccctgatcatttcgcctaaaagagcaaggactagagttcctgacctccaggccagtccctgatccctgacctaatgttatcgcggaatgatgatatatgtatctacgggggcctggggctgggcgggctcctgcttctggcagtggtccttctgtccgcctgcctgtgttggctgcatcgaagagtaaagaggctggagaggagctggcaccttctgtcctggtcccaggcccagggctcctcagagcaggaactccactatgcatctctgcagaggctgccagtgcccagcagtgagggacctgacctcaggggcagagacaagagaggcaccaaggaggatccaagagctgactatgcctgcattgctgagaacaaacccacctgagcaccccagacaccttcctcaacccaggcgggtggacagggtccccctgtggtccagccagtaaaaaccatggtccccccacttctgtgtctcagtcctctcagtccatctcgagcctccgttcaaattgatcatcatcaaaacttatgtggctttttgacctttgaatagggaattttttaaattttttaaaaattaaaataaaaaaaacacatggctcacccttccaccca

SEQ ID NO: 16019 - DNA, 565 bp, Homo sapiens
  source 1..565: mol_type = unassigned DNA
agaggaggggcaggaatgtctgaggtggcaacacttctcttcagccagacagcactggccagtttggagtctgtccatcctgcaggccacaagctctggatgaggaacttgaggcaagtcaccagcccctgatcatttcgcctaaaagagcaaggactagagttcctgacctccaggccagtccctgatccctgacctaatgttatcgcggaatgatgaggctgccagtgcccagcagtgagggacctgacctcaggggcagagacaagagaggcaccaaggaggatccaagagctgactatgcctgcattgctgagaacaaacccacctgagcaccccagacaccttcctcaacccaggcgggtggacagggtccccctgtggtccagccagtaaaaaccatggtccccccacttctgtgtctcagtcctctcagtccatctcgagcctccgttcaaattgatcatcatcaaaacttatgtggctttttgacctttgaatagggaattttttaaattttttaaaaattaaaataaaaaaaacacatggctcacccttccaccca

SEQ ID NO: 16020 - DNA, 345 bp, Homo sapiens
  source 1..345: mol_type = unassigned DNA
gctggggaggaacccaggctgggggagaagttaaagccagaggaggggcaggaatgtctgaggtggcaacacttctcttcagccagacagcactggccagtttggagtctgtccatcctgcaggccacaagctctggatgaggaacttgaggcaagtcaccagcccctgatcatttcgcctaaaagagcaaggactagagttcctgacctccaggccagtccctgatccctgacctaatgttatcgcggaatgatgcaccttctgtcctggtcccaggcccagggctcctcagagcaggaactccactatgcatctctgcagaggctgccagtgcccagcagtga

SEQ ID NO: 16021 - DNA, 624 bp, Homo sapiens
  source 1..624: mol_type = unassigned DNA
atgaggaacttgaggcaagtcaccagcccctgatcatttcgcctaaaagagcaaggactagagttcctgacctccaggccagtccctgatccctgacctaatgttatcgcggaatgatgatatatgtatctacgggggcctggggctgggcgggctcctgcttctggcagtggtccttctgtccgcctgcctgtgttggctgcatcgaagagcaccttctgtcctggtcccaggcccagggctcctcagagcaggaactccactatgcatctctgcagaggctgccagtgcccagcagtgagggacctgacctcaggggcagagacaagagaggcaccaaggaggatccaagagctgactatgcctgcattgctgagaacaaacccacctgagcaccccagacaccttcctcaacccaggcgggtggacagggtccccctgtggtccagccagtaaaaaccatggtccccccacttctgtgtctcagtcctctcagtccatctcgagcctccgttcaaattgatcatcatcaaaacttatgtggctttttgacctttgaatagggaattttttaaattttttaaaaattaaaataaaaaaaacacatggctcacccttccaccc

SEQ ID NO: 16022 - DNA, 433 bp, Homo sapiens
  source 1..433: mol_type = unassigned DNA
ggaggggcaggaatgtctgaggtggcaacacttctcttcagccagacagcactggccagtttggagtctgtccatcctgcaggccacaagctctggatgaggaacttgaggcaagtcaccagcccctgatcatttcgcctaaaagagcaaggactagagttcctgacctccaggccagtccctgatccctgacctaatgttatcgcggaatgatgtaaagaggctggagaggagctggaggctgccagtgcccagcagtgagggacctgacctcaggggcagagacaagagaggcaccaaggaggatccaagagctgactatgcctgcattgctgagaacaaacccacctgagcaccccagacaccttcctcaacccaggcgggtggacagggtccccctgtggtccagccagtaaaaaccatggtcccccca

SEQ ID NO: 16023 - DNA, 763 bp, Homo sapiens
  source 1..763: mol_type = unassigned DNA
gctggggaggaacccaggctgggggagaagttaaagccagaggaggggcaggaatgtctgaggtggcaacacttctcttcagccagacagcactggccagtttggagtctgtccatcctgcaggccacaagctctggatgaggaacttgaggcaagtcaccagcccctgatcatttcgcctaaaagagcaaggactagagttcctgacctccaggccagtccctgatccctgacctaatgttatcgcggaatgatgatatatgtatctacgggggcctggggctgggcgggctcctgcttctggcagtggtccttctgtccgcctgcctgtgttggctgcatcgaagagtaaagaggctggagaggagctgggcccagggctcctcagagcaggaactccactatgcatctctgcagaggctgccagtgcccagcagtgagggacctgacctcaggggcagagacaagagaggcaccaaggaggatccaagagctgactatgcctgcattgctgagaacaaacccacctgagcaccccagacaccttcctcaacccaggcgggtggacagggtccccctgtggtccagccagtaaaaaccatggtccccccacttctgtgtctcagtcctctcagtccatctcgagcctccgttcaaattgatcatcatcaaaacttatgtggctttttgacctttgaatagggaattttttaaattttttaaaaattaaaataaaaaaaacacatggctcacccttccaccc

SEQ ID NO: 16024 - DNA, 555 bp, Homo sapiens
  source 1..555: mol_type = unassigned DNA
atgaggaacttgaggcaagtcaccagcccctgatcatttcgcctaaaagagcaaggactagagttcctgacctccaggccagtccctgatccctgacctaatgttatcgcggaatgatgtaaagaggctggagaggagctggcaccttctgtcctggtcccaggcccagggctcctcagagcaggaactccactatgcatctctgcagaggctgccagtgcccagcagtgagggacctgacctcaggggcagagacaagagaggcaccaaggaggatccaagagctgactatgcctgcattgctgagaacaaacccacctgagcaccccagacaccttcctcaacccaggcgggtggacagggtccccctgtggtccagccagtaaaaaccatggtccccccacttctgtgtctcagtcctctcagtccatctcgagcctccgttcaaattgatcatcatcaaaacttatgtggctttttgacctttgaatagggaattttttaaattttttaaaaattaaaataaaaaaaacacatggctcacccttccaccca

SEQ ID NO: 16025 - DNA, 532 bp, Homo sapiens
  source 1..532: mol_type = unassigned DNA
atgaggaacttgaggcaagtcaccagcccctgatcatttcgcctaaaagagcaaggactagagttcctgacctccaggccagtccctgatccctgacctaatgttatcgcggaatgatgcaccttctgtcctggtcccaggcccagggctcctcagagcaggaactccactatgcatctctgcagaggctgccagtgcccagcagtgagggacctgacctcaggggcagagacaagagaggcaccaaggaggatccaagagctgactatgcctgcattgctgagaacaaacccacctgagcaccccagacaccttcctcaacccaggcgggtggacagggtccccctgtggtccagccagtaaaaaccatggtccccccacttctgtgtctcagtcctctcagtccatctcgagcctccgttcaaattgatcatcatcaaaacttatgtggctttttgacctttgaatagggaattttttaaattttttaaaaattaaaataaaaaaaacacatggctcacccttccaccca

SEQ ID NO: 16026 - DNA, 734 bp, Homo sapiens
  source 1..734: mol_type = unassigned DNA
acttcagccctagcagcatctgcctgtgggaagcagctctccacaccagccaagggggcccccacactcccgcgctgctctgcggctcagggagcagcccacctgctggatgaggaacttgaggcaagtcaccagcccctgatcatttcgcctaaaagagcaaggactagagttcctgacctccaggccagtccctgatccctgacctaatgttatcgcggaatgatgatatatgtatctacgggggcctggggctgggcgggctcctgcttctggcagtggtccttctgtccgcctgcctgtgttggctgcatcgaagagcaccttctgtcctggtcccaggcccagggctcctcagagcaggaactccactatgcatctctgcagaggctgccagtgcccagcagtgagggacctgacctcaggggcagagacaagagaggcaccaaggaggatccaagagctgactatgcctgcattgctgagaacaaacccacctgagcaccccagacaccttcctcaacccaggcgggtggacagggtccccctgtggtccagccagtaaaaaccatggtccccccacttctgtgtctcagtcctctcagtccatctcgagcctccgttcaaattgatcatcatcaaaacttatgtggctttttgacctttgaatagggaattttttaaattttttaaaaattaaaataaaaaaaacacatggctcacccttccaccca

SEQ ID NO: 16027 - DNA, 648 bp, Homo sapiens; identical to SEQ ID NO: 16018
  source 1..648: mol_type = unassigned DNA

SEQ ID NO: 16028 - DNA, 459 bp, Homo sapiens
  source 1..459: mol_type = unassigned DNA
atgttatcgcggaatgatgatatatgtatctacgggggcctggggctgggcgggctcctgcttctggcagtggtccttctgtccgcctgcctgtgttggctgcatcgaagagaggctgccagtgcccagcagtgagggacctgacctcaggggcagagacaagagaggcaccaaggaggatccaagagctgactatgcctgcattgctgagaacaaacccacctgagcaccccagacaccttcctcaacccaggcgggtggacagggtccccctgtggtccagccagtaaaaaccatggtccccccacttctgtgtctcagtcctctcagtccatctcgagcctccgttcaaattgatcatcatcaaaacttatgtggctttttgacctttgaatagggaattttttaaattttttaaaaattaaaataaaaaaaacacatggctcacccttccaccca

SEQ ID NO: 16029 - DNA, 382 bp, Homo sapiens
  source 1..382: mol_type = unassigned DNA
gaaagtgcccagctcagggttggcacataagggaggctccccagcctgggaacgattataacagagggcccctcacttcacagatgaggaacttgaggcaagtcaccagcccctgatcatttcgcctaaaagagcaaggactagagttcctgacctccaggccagtccctgatccctgacctaatgttatcgcggaatgatgatatatgtatctacgggggcctggggctgggcgggctcctgcttctggcagtggtccttctgtccgcctgcctgtgttggctgcatcgaagagtaaagaggctggagaggagctggaggctgccagtgcccagcagtgagggacctgacctcaggggcagagacaagagaggcaccaagg

SEQ ID NO: 16030 - DNA, 496 bp, Homo sapiens
  source 1..496: mol_type = unassigned DNA
ctttctgggatgggtgacctagtaaagtccaggcttgaatctcgggtctttacttgggcaacgggcaccatgataccctatgttctggggattagcagtgaggaatgatgaggaacttgaggcaagtcaccagcccctgatcatttcgcctaaaagagcaaggactagagttcctgacctccaggccagtccctgatccctgacctaatgttatcgcggaatgatgtaaagaggctggagaggagctgggcccagggctcctcagagcaggaactccactatgcatctctgcagaggctgccagtgcccagcagtgagggacctgacctcaggggcagagacaagagaggcaccaaggaggatccaagagctgactatgcctgcattgctgagaacaaacccacctgagcaccccagacaccttcctcaacccaggcgggtggacagggtccccctgtggtccagccagtaaaaaccatggtccccccacttctgt

SEQ ID NO: 16031 - DNA, 523 bp, Homo sapiens
  source 1..523: mol_type = unassigned DNA
taaagtccaggcttgaatctcgggtctttacttgggcaacgggcaccatgataccctatgttctggggattagcagtgaggaatgatgaggaacttgaggcaagtcaccagcccctgatcatttcgcctaaaagagcaaggactagagttcctgacctccaggccagtccctgatccctgacctaatgttatcgcggaatgatgatatatgtatctacgggggcctggggctgggcgggctcctgcttctggcagtggtccttctgtccgcctgcctgtgttggctgcatcgaagagtaaagaggctggagaggagctgggcccagggctcctcagagcaggaactccactatgcatctctgcagaggctgccagtgcccagcagtgagggacctgacctcaggggcagagacaagagaggcaccaaggaggatccaagagctgactatgcctgcattgctgagaacaaacccacctgagcaccccagacaccttcctcaacccaggcgggtggacagggtcc

SEQ ID NO: 16032 - DNA, 624 bp, Homo sapiens; identical to SEQ ID NO: 16013
  source 1..624: mol_type = unassigned DNA

SEQ ID NO: 16033 - DNA, 689 bp, Homo sapiens
  source 1..689: mol_type = unassigned DNA
ggtgacctagtaaagtccaggcttgaatctcgggtctttacttgggcaacgggcaccatgataccctatgttctggggattagcagtgaggaatggaaagtgcccagctcagggttggcacataagggaggctccccagcctgggaacgattataacagagggcccctcacttcacagatgaggaacttgaggcaagtcaccagcccctgatcatttcgcctaaaagagcaaggactagagttcctgacctccaggccagtccctgatccctgacctaatgttatcgcggaatgatggcccagggctcctcagagcaggaactccactatgcatctctgcagaggctgccagtgcccagcagtgagggacctgacctcaggggcagagacaagagaggcaccaaggaggatccaagagctgactatgcctgcattgctgagaacaaacccacctgagcaccccagacaccttcctcaacccaggcgggtggacagggtccccctgtggtccagccagtaaaaaccatggtccccccacttctgtgtctcagtcctctcagtccatctcgagcctccgttcaaattgatcatcatcaaaacttatgtggctttttgacctttgaatagggaattttttaaattttttaaaaattaaaataaaaaaaacacatggctcacccttccaccca

SEQ ID NO: 16034 - DNA, 619 bp, Homo sapiens
  source 1..619: mol_type = unassigned DNA
cctttctgggatgggtgacctagtaaagtccaggcttgaatctcgggtctttacttgggcaacgggcaccatgataccctatgttctggggattagcagtgaggaatgatgaggaacttgaggcaagtcaccagcccctgatcatttcgcctaaaagagcaaggactagagttcctgacctccaggccagtccctgatccctgacctaatgttatcgcggaatgatggcccagggctcctcagagcaggaactccactatgcatctctgcagaggctgccagtgcccagcagtgagggacctgacctcaggggcagagacaagagaggcaccaaggaggatccaagagctgactatgcctgcattgctgagaacaaacccacctgagcaccccagacaccttcctcaacccaggcgggtggacagggtccccctgtggtccagccagtaaaaaccatggtccccccacttctgtgtctcagtcctctcagtccatctcgagcctccgttcaaattgatcatcatcaaaacttatgtggctttttgacctttgaatagggaattttttaaattttttaaaaattaaaataaaaaaaacacatggctcacccttccaccca

SEQ ID NO: 16035 - DNA, 603 bp, Homo sapiens
  source 1..603: mol_type = unassigned DNA
cacccacccaggcccaggctccttcccctccatcatccccttaccagcacctagaaccatccagggctgaaaagtcccctccaaaccacgtgatgaggaacttgaggcaagtcaccagcccctgatcatttcgcctaaaagagcaaggactagagttcctgacctccaggccagtccctgatccctgacctaatgttatcgcggaatgatggcccagggctcctcagagcaggaactccactatgcatctctgcagaggctgccagtgcccagcagtgagggacctgacctcaggggcagagacaagagaggcaccaaggaggatccaagagctgactatgcctgcattgctgagaacaaacccacctgagcaccccagacaccttcctcaacccaggcgggtggacagggtccccctgtggtccagccagtaaaaaccatggtccccccacttctgtgtctcagtcctctcagtccatctcgagcctccgttcaaattgatcatcatcaaaacttatgtggctttttgacctttgaatagggaattttttaaattttttaaaaattaaaataaaaaaaacacatggctcacccttccaccca

SEQ ID NO: 16036 - DNA, 610 bp, Homo sapiens
  source 1..610: mol_type = unassigned DNA
agaggaggggcaggaatgtctgaggtggcaacacttctcttcagccagacagcactggccagtttggagtctgtccatcctgcaggccacaagctctggatgaggaacttgaggcaagtcaccagcccctgatcatttcgcctaaaagagcaaggactagagttcctgacctccaggccagtccctgatccctgacctaatgttatcgcggaatgatggcccagggctcctcagagcaggaactccactatgcatctctgcagaggctgccagtgcccagcagtgagggacctgacctcaggggcagagacaagagaggcaccaaggaggatccaagagctgactatgcctgcattgctgagaacaaacccacctgagcaccccagacaccttcctcaacccaggcgggtggacagggtccccctgtggtccagccagtaaaaaccatggtccccccacttctgtgtctcagtcctctcagtccatctcgagcctccgttcaaattgatcatcatcaaaacttatgtggctttttgacctttgaatagggaattttttaaattttttaaaaattaaaataaaaaaaacacatggctcacccttccaccca

SEQ ID NO: 16037 - DNA, 565 bp, Homo sapiens; identical to SEQ ID NO: 16019
  source 1..565: mol_type = unassigned DNA

SEQ ID NO: 16038 - DNA, 665 bp, Homo sapiens
  source 1..665: mol_type = unassigned DNA
gaaagtgcccagctcagggttggcacataagggaggctccccagcctgggaacgattataacagagggcccctcacttcacagatgaggaacttgaggcaagtcaccagcccctgatcatttcgcctaaaagagcaaggactagagttcctgacctccaggccagtccctgatccctgacctaatgttatcgcggaatgatgatatatgtatctacgggggcctggggctgggcgggctcctgcttctggcagtggtccttctgtccgcctgcctgtgttggctgcatcgaagagtaaagaggctggagaggagctggaggctgccagtgcccagcagtgagggacctgacctcaggggcagagacaagagaggcaccaaggaggatccaagagctgactatgcctgcattgctgagaacaaacccacctgagcaccccagacaccttcctcaacccaggcgggtggacagggtccccctgtggtccagccagtaaaaaccatggtccccccacttctgtgtctcagtcctctcagtccatctcgagcctccgttcaaattgatcatcatcaaaacttatgtggctttttgacctttgaatagggaattttttaaattttttaaaaattaaaataaaaaaaacacatggctcacccttccaccca

SEQ ID NO: 16039 - DNA, 571 bp, Homo sapiens
  source 1..571: mol_type = unassigned DNA
tgataccctatgttctggggattagcagtgaggaatgatgaggaacttgaggcaagtcaccagcccctgatcatttcgcctaaaagagcaaggactagagttcctgacctccaggccagtccctgatccctgacctaatgttatcgcggaatgatgtaaagaggctggagaggagctgggcccagggctcctcagagcaggaactccactatgcatctctgcagaggctgccagtgcccagcagtgagggacctgacctcaggggcagagacaagagaggcaccaaggaggatccaagagctgactatgcctgcattgctgagaacaaacccacctgagcaccccagacaccttcctcaacccaggcgggtggacagggtccccctgtggtccagccagtaaaaaccatggtccccccacttctgtgtctcagtcctctcagtccatctcgagcctccgttcaaattgatcatcatcaaaacttatgtggctttttgacctttgaatagggaattttttaaattttttaaaaattaaaataaaaaaaacacatggctcacccttccaccca

SEQ ID NO: 16040 - DNA, 668 bp, Homo sapiens
  source 1..668: mol_type = unassigned DNA
ggcaacgggcaccatgataccctatgttctggggattagcagtgaggaatggaaagtgcccagctcagggttggcacataagggaggctccccagcctgggaacgattataacagagggcccctcacttcacagatgaggaacttgaggcaagtcaccagcccctgatcatttcgcctaaaagagcaaggactagagttcctgacctccaggccagtccctgatccctgacctaatgttatcgcggaatgatgtaaagaggctggagaggagctgggcccagggctcctcagagcaggaactccactatgcatctctgcagaggctgccagtgcccagcagtgagggacctgacctcaggggcagagacaagagaggcaccaaggaggatccaagagctgactatgcctgcattgctgagaacaaacccacctgagcaccccagacaccttcctcaacccaggcgggtggacagggtccccctgtggtccagccagtaaaaaccatggtccccccacttctgtgtctcagtcctctcagtccatctcgagcctccgttcaaattgatcatcatcaaaacttatgtggctttttgacctttgaatagggaattttttaaattttttaaaaattaaaataaaaaaaacacatggctcacccttccaccca

SEQ ID NO: 16041 - DNA, 712 bp, Homo sapiens
  source 1..712: mol_type = unassigned DNA
taaagtccaggcttgaatctcgggtctttacttgggcaacgggcaccatgataccctatgttctggggattagcagtgaggaatgatgaggaacttgaggcaagtcaccagcccctgatcatttcgcctaaaagagcaaggactagagttcctgacctccaggccagtccctgatccctgacctaatgttatcgcggaatgatgatatatgtatctacgggggcctggggctgggcgggctcctgcttctggcagtggtccttctgtccgcctgcctgtgttggctgcatcgaagagtaaagaggctggagaggagctgggcccagggctcctcagagcaggaactccactatgcatctctgcagaggctgccagtgcccagcagtgagggacctgacctcaggggcagagacaagagaggcaccaaggaggatccaagagctgactatgcctgcattgctgagaacaaacccacctgagcaccccagacaccttcctcaacccaggcgggtggacagggtccccctgtggtccagccagtaaaaaccatggtccccccacttctgtgtctcagtcctctcagtccatctcgagcctccgttcaaattgatcatcatcaaaacttatgtggctttttgacctttgaatagggaattttttaaattttttaaaaattaaaataaaaaaaacacatggctcacccttccaccca

SEQ ID NO: 16042 - DNA, 585 bp, Homo sapiens
  source 1..585: mol_type = unassigned DNA
ggaggggcaggaatgtctgaggtggcaacacttctcttcagccagacagcactggccagtttggagtctgtccatcctgcaggccacaagctctggatgaggaacttgaggcaagtcaccagcccctgatcatttcgcctaaaagagcaaggactagagttcctgacctccaggccagtccctgatccctgacctaatgttatcgcggaatgatgtaaagaggctggagaggagctggaggctgccagtgcccagcagtgagggacctgacctcaggggcagagacaagagaggcaccaaggaggatccaagagctgactatgcctgcattgctgagaacaaacccacctgagcaccccagacaccttcctcaacccaggcgggtggacagggtccccctgtggtccagccagtaaaaaccatggtccccccacttctgtgtctcagtcctctcagtccatctcgagcctccgttcaaattgatcatcatcaaaacttatgtggctttttgacctttgaatagggaattttttaaattttttaaaaattaaaataaaaaaaacacatggctcacccttccaccca

SEQ ID NO: 16043 - DNA, 712 bp, Homo sapiens; identical to SEQ ID NO: 16041
  source 1..712: mol_type = unassigned DNA

SEQ ID NO: 16044 - DNA, 648 bp, Homo sapiens; identical to SEQ ID NO: 16018
  source 1..648: mol_type = unassigned DNA

SEQ ID NO: 16045 - DNA, 455 bp, Homo sapiens
  source 1..455: mol_type = unassigned DNA
tatcgcggaatgatgatatatgtatctacgggggcctggggctgggcgggctcctgcttctggcagtggtccttctgtccgcctgcctgtgttggctgcatcgaagagaggctgccagtgcccagcagtgagggacctgacctcaggggcagagacaagagaggcaccaaggaggatccaagagctgactatgcctgcattgctgagaacaaacccacctgagcaccccagacaccttcctcaacccaggcgggtggacagggtccccctgtggtccagccagtaaaaaccatggtccccccacttctgtgtctcagtcctctcagtccatctcgagcctccgttcaaattgatcatcatcaaaacttatgtggctttttgacctttgaatagggaattttttaaattttttaaaaattaaaataaaaaaaacacatggctcacccttccaccca

SEQ ID NO: 16046 - DNA, 254 bp, Homo sapiens
  source 1..254: mol_type = unassigned DNA
cacctagaaccatccagggctgaaaagtcccctccaaaccacgtgatgaggaacttgaggcaagtcaccagcccctgatcatttcgcctaaaagagcaaggactagagttcctgacctccaggccagtccctgatccctgacctaatgttatcgcggaatgatgatatatgtatctacgggggcctggggctgggcgggctcctgcttctggcagtggtccttctgtccgcctgcctgtgttggctgcatcgaa

SEQ ID NO: 16047 - DNA, 648 bp, Homo sapiens; identical to SEQ ID NO: 16018
  source 1..648: mol_type = unassigned DNA

SEQ ID NO: 16048 - DNA, 259 bp, Homo sapiens
  source 1..259: mol_type = unassigned DNA
cctatgttctggggattagcaatgaggaacttgaggcaagtcaccagcccctgatcatttcgcctaaaagagcaaggactagagttcctgacctccaggccagtccctgatccctgacctaatgttatcgcggaatgatgatatatgtatctacgggggcctggggctgggcgggctcctgcttctggcagtggtccttctgtccgcctgcctgtgttggctgcatcgaagagaacactgcctggccctggagccactg

SEQ ID NO: 16049 - DNA, 565 bp, Homo sapiens; identical to SEQ ID NO: 16019
  source 1..565: mol_type = unassigned DNA

SEQ ID NO: 16050 - DNA, 619 bp, Homo sapiens
  source 1..619: mol_type = unassigned DNA
cctttctgggatgggtgacctagtaaagtccaggcttgaatctcgggtctttacttgggcaacgggcaccatgataccctatgttctggggattagcagtgaggaatgatgaggaacttgaggcaagtcaccagcccctgatcatttcgcctaaaagagcaaggactagagttcctgacctccaggccagtccctgatccctgacctaatgttatcgcggaatgatggcccagggctcctcagagcaggaactccactatgcatctctgcagaggctgccagtgcccagcagtgagggacctgacctcaggggcagagacaagagaggcaccaaggaggatccaagagctgactatgcctgcattgctgagaacaaacccacctgagcaccccagacaccttcctcaacccaggcgggtggacagggtccccctgtggtccagccagtaaaaaccatggtccccccacttctgtgtctcagtcctctcagtccatctcgagcctccgttcaaaatgatcatcatcaaaacttatgtggctttttgacctttgaatagggaattttttaaattttttaaaaattaaaattaaaaaaacacatggctcacccttccaccca

SEQ ID NO: 16051 - DNA, 571 bp, Homo sapiens
  source 1..571: mol_type = unassigned DNA
tgataccctatgttctggggattagcagtgaggaatgatgaggaacttgaggcaagtcaccagcccctgatcatttcgcctaaaagagcaaggactagagttcctgacctccaggccagtccctgatccctgacctaatgttatcgcggaatgatgtaaagaggctggagaggagctgggcccagggctcctcagagcaggaactccactatgcatctctgcagaggctgccagtgcccagcagtgagggacctgacctcaggggcagagacaagagaggcaccaaggaggatccaagagctgactatgcctgcattgctgagaacaaacccacctgagcaccccagacaccttcctcaacccaggcgggtggacagggtccccctgtggtccagccagtaaaaaccatggtccccccacttctgtgtctcagtcctctcagtccatctcgagcctccgttcaaaatgatcatcatcaaaacttatgtggctttttgacctttgaatagggaattttttaaattttttaaaaattaaaattaaaaaaacacatggctcacccttccaccca

SEQ ID NO: 16052 - DNA, 689 bp, Homo sapiens; identical to SEQ ID NO: 16033
  source 1..689: mol_type = unassigned DNA

SEQ ID NO: 16053 - DNA, 610 bp, Homo sapiens; identical to SEQ ID NO: 16036
  source 1..610: mol_type = unassigned DNA

SEQ ID NO: 16054 - DNA, 455 bp, Homo sapiens
  source 1..455: mol_type = unassigned DNA
tatcgcggaatgatgatatatgtatctacgggggcctggggctgggcgggctcctgcttctggcagtggtccttctgtccgcctgcctgtgttggctgcatcgaagagaggctgccagtgcccagcagtgagggacctgacctcaggggcagagacaagagaggcaccaaggaggatccaagagctgactatgcctgcattgctgagaacaaacccacctgagcaccccagacaccttcctcaacccaggcgggtggacagggtccccctgtggtccagccagtaaaaaccatggtccccccacttctgtgtctcagtcctctcagtccatctcgagcctccgttcaaaatgatcatcatcaaaacttatgtggctttttgacctttgaatagggaattttttaaattttttaaaaattaaaataaaaaaaacacatggctcacccttccaccca

SEQ ID NO: 16055 - DNA, 585 bp, Homo sapiens; identical to SEQ ID NO: 16042
  source 1..585: mol_type = unassigned DNA

SEQ ID NO: 16056 - DNA, 532 bp, Homo sapiens
  source 1..532: mol_type = unassigned DNA
atgaggaacttgaggcaagtcaccagcccctgatcatttcgcctaaaagagcaaggactagagttcctgacctccaggccagtccctgatccctgacctaatgttatcgcggaatgatgcaccttctgtcctggtcccaggcccagggctcctcagagcaggaactccactatgcatctctgcagaggctgccagtgcccagcagtgagggacctgacctcaggggcagagacaagagaggcaccaaggaggatccaagagctgactatgcctgcattgctgagaacaaacccacctgagcaccccagacaccttcctcaacccaggcgggtggacagggtccccctgtggtccagccagtaaaaaccatggtccccccacttctgtgtctcagtcctctcagtccatctcgagcctccgttcaaaatgatcatcatcaaaacttatgtggctttttgacctttgaatagggaattttttaaattttttaaaaattaaaataaaaaaaacacatggctcacccttccaccca

SEQ ID NO: 16057 - DNA, 565 bp, Homo sapiens; identical to SEQ ID NO: 16019
  source 1..565: mol_type = unassigned DNA

SEQ ID NO: 16058 - DNA, 712 bp, Homo sapiens
  source 1..712: mol_type = unassigned DNA
taaagtccaggcttgaatctcgggtctttacttgggcaacgggcaccatgataccctatgttctggggattagcagtgaggaatgatgaggaacttgaggcaagtcaccagcccctgatcatttcgcctaaaagagcaaggactagagttcctgacctccaggccagtccctgatccctgacctaatgttatcgcggaatgatgatatatgtatctacgggggcctggggctgggcgggctcctgcttctggcagtggtccttctgtccgcctgcctgtgttggctgcatcgaagagtaaagaggctggagaggagctgggcccagggctcctcagagcaggaactccactatgcatctctgcagaggctgccagtgcccagcagtgagggacctgacctcaggggcagagacaagagaggcaccaaggaggatccaagagctgactatgcctgcattgctgagaacaaacccacctgagcaccccagacaccttcctcaacccaggcgggtggacagggtccccctgtggtccagccagtaaaaaccatggtccccccacttctgtgtctcagtcctctcagtccatctcgagcctccgttcaaaatgatcatcatcaaaacttatgtggctttttgacctttgaatagggaattttttaaattttttaaaaattaaaattaaaaaaacacatggctcacccttccaccca

SEQ ID NO: 16059 - DNA, 726 bp, Homo sapiens
  source 1..726: mol_type = unassigned DNA
gaaaagaaagatgttgtaaccctaaccctggagccgaacttcctctcctaacaatgctggggaggaacccaggctgggggagaagttaaagccagaggaggggcaggaatgtctgaggtggcaacacttctcttcagccagacagcactggccagtttggagtctgtccatcctgcaggccacaagctctggatgaggaacttgaggcaagtcaccagcccctgatcatttcgcctaaaagagcaaggactagagttcctgacctccaggccagtccctgatccctgacctaatgttatcgcggaatgatgtaaagaggctggagaggagctgggcccagggctcctcagagcaggaactccactatgcatctctgcagaggctgccagtgcccagcagtgagggacctgacctcaggggcagagacaagagaggcaccaaggaggatccaagagctgactatgcctgcattgctgagaacaaacccacctgagcaccccagacaccttcctcaacccaggcgggtggacagggtccccctgtggtccagccagtaaaaaccatggtccccccacttctgtgtctcagtcctctcagtccatctcgagcctccgttcaaattgatcatcatcaaaacttatgtggctttttgacctttgaatagggaattttttaaattttttaaaaattaaaataaaaaaaacacatggctcacccttccaccca

SEQ ID NO: 16060 - DNA, 259 bp, Homo sapiens; identical to SEQ ID NO: 16048
  source 1..259: mol_type = unassigned DNA

SEQ ID NO: 16061 - DNA, 455 bp, Homo sapiens; identical to SEQ ID NO: 16045
  source 1..455: mol_type = unassigned DNA

SEQ ID NO: 16062 - DNA, 259 bp, Homo sapiens; identical to SEQ ID NO: 16048
  source 1..259: mol_type = unassigned DNA

SEQ ID NO: 16063 - DNA, 603 bp, Homo sapiens
  source 1..603: mol_type = unassigned DNA
cacccacccaggcccaggctccttcccctccatcatccccttaccagcacctagaaccatccagggctgaaaagtcccctccaaaccacgtgatgaggaacttgaggcaagtcaccagcccctgatcatttcgcctaaaagagcaaggactagagttcctgacctccaggccagtccctgatccctgacctaatgttatcgcggaatgatggcccagggctcctcagagcaggaactccactatgcatctctgcagaggctgccagtgcccagcagtgagggacctgacctcaggggcagagacaagagaggcaccaaggaggatccaagagctgactatgcctgcattgctgagaacaaacccacctgagcaccccagacaccttcctcaacccaggcgggtggacagggtccccctgtggtccagccagtaaaaaccatggtccccccacttctgtgtctcagtcctctcagtccatctcgagcctccgttcaaaatgatcatcatcaaaacttatgtggctttttgacctttgaatagggaattttttaaattttttaaaaattaaaataaaaaaaacacatggctcacccttccaccca

SEQ ID NO: 16064 - DNA, 455 bp, Homo sapiens; identical to SEQ ID NO: 16045
  source 1..455: mol_type = unassigned DNA

SEQ ID NO: 16065 - DNA, 668 bp, Homo sapiens; identical to SEQ ID NO: 16040
  source 1..668: mol_type = unassigned DNA

SEQ ID NO: 16066 - DNA, 624 bp, Homo sapiens; identical to SEQ ID NO: 16013
  source 1..624: mol_type = unassigned DNA

SEQ ID NO: 16067 - DNA, 555 bp, Homo sapiens; identical to SEQ ID NO: 16024
  source 1..555: mol_type = unassigned DNA

SEQ ID NO: 16068 - DNA, 734 bp, Homo sapiens
  source 1..734: mol_type = unassigned DNA
acttcagccctagcagcatctgcctgtgggaagcagctctccacaccagccaagggggcccccacactcccgcgctgctctgcggctcagggagcagcccacctgctggatgaggaacttgaggcaagtcaccagcccctgatcatttcgcctaaaagagcaaggactagagttcctgacctccaggccagtccctgatccctgacctaatgttatcgcggaatgatgatatatgtatctacgggggcctggggctgggcgggctcctgcttctggcagtggtccttctgtccgcctgcctgtgttggctgcatcgaagagcaccttctgtcctggtcccaggcccagggctcctcagagcaggaactccactatgcatctctgcagaggctgccagtgcccagcagtgagggacctgacctcaggggcagagacaagagaggcaccaaggaggatccaagagctgactatgcctgcattgctgagaacaaacccacctgagcaccccagacaccttcctcaacccaggcgggtggacagggtccccctgtggtccagccagtaaaaaccatggtccccccacttctgtgtctcagtcctctcagtccatctcgagcctccgttcaaaatgatcatcatcaaaacttatgtggctttttgacctttgaatagggaattttttaaattttttaaaaattaaaataaaaaaaacacatggctcacccttccaccca

SEQ ID NO: 16069 - DNA, 571 bp, Homo sapiens; identical to SEQ ID NO: 16039
  source 1..571: mol_type = unassigned DNA

SEQ ID NO: 16070 - DNA, 689 bp, Homo sapiens; identical to SEQ ID NO: 16033
  source 1..689: mol_type = unassigned DNA

SEQ ID NO: 16071 - DNA, 665 bp, Homo sapiens; identical to SEQ ID NO: 16038
  source 1..665: mol_type = unassigned DNA

SEQ ID NO: 16072 - DNA, 585 bp, Homo sapiens; identical to SEQ ID NO: 16042
  source 1..585: mol_type = unassigned DNA

SEQ ID NO: 16073 - DNA, 624 bp, Homo sapiens; identical to SEQ ID NO: 16013
  source 1..624: mol_type = unassigned DNA

SEQ ID NO: 16074 - DNA, 726 bp, Homo sapiens
  source 1..726: mol_type = unassigned DNA
gaaaagaaagatgttgtaaccctaaccctggagccgaacttcctctcctaacaatgctggggaggaacccaggctgggggagaagttaaagccagaggaggggcaggaatgtctgaggtggcaacacttctcttcagccagacagcactggccagtttggagtctgtccatcctgcaggccacaagctctggatgaggaacttgaggcaagtcaccagcccctgatcatttcgcctaaaagagcaaggactagagttcctgacctccaggccagtccctgatccctgacctaatgttatcgcggaatgatgtaaagaggctggagaggagctgggcccagggctcctcagagcaggaactccactatgcatctctgcagaggctgccagtgcccagcagtgagggacctgacctcaggggcagagacaagagaggcaccaaggaggatccaagagctgactatgcctgcattgctgagaacaaacccacctgagcaccccagacaccttcctcaacccaggcgggtggacagggtccccctgtggtccagccagtaaaaaccatggtccccccacttctgtgtctcagtcctctcagtccatctcgagcctccgttcaaaatgatcatcatcaaaacttatgtggctttttgacctttgaatagggaattttttaaattttttaaaaattaaaataaaaaaaacacatggctcacccttccaccca

SEQ ID NO: 16075 - DNA, 585 bp, Homo sapiens
  source 1..585: mol_type = unassigned DNA
ggaggggcaggaatgtctgaggtggcaacacttctcttcagccagacagcactggccagtttggagtctgtccatcctgcaggccacaagctctggatgaggaacttgaggcaagtcaccagcccctgatcatttcgcctaaaagagcaaggactagagttcctgacctccaggccagtccctgatccctgacctaatgttatcgcggaatgatgtaaagaggctggagaggagctggaggctgccagtgcccagcagtgagggacctgacctcaggggcagagacaagagaggcaccaaggaggatccaagagctgactatgcctgcattgctgagaacaaacccacctgagcaccccagacaccttcctcaacccaggcgggtggacagggtccccctgtggtccagccagtaaaaaccatggtccccccacttctgtgtctcagtcctctcagtccatctcgagcctccgttcaaaatgatcatcatcaaaacttatgtggctttttgacctttgaatagggaattttttaaattttttaaaaattaaaattaaaaaaacacatggctcacccttccaccca

SEQ ID NO: 16076 - DNA, 665 bp, Homo sapiens; identical to SEQ ID NO: 16038
  source 1..665: mol_type = unassigned DNA

SEQ ID NO: 16077 - DNA, 259 bp, Homo sapiens; identical to SEQ ID NO: 16048
  source 1..259: mol_type = unassigned DNA

SEQ ID NO: 16078 - DNA, 532 bp, Homo sapiens; identical to SEQ ID NO: 16025
  source 1..532: mol_type = unassigned DNA

SEQ ID NO: 16079 - DNA, 665 bp, Homo sapiens; identical to SEQ ID NO: 16038
  source 1..665: mol_type = unassigned DNA

SEQ ID NO: 16080 - DNA, 689 bp, Homo sapiens
  source 1..689: mol_type = unassigned DNA
ggtgacctagtaaagtccaggcttgaatctcgggtctttacttgggcaacgggcaccatgataccctatgttctggggattagcagtgaggaatggaaagtgcccagctcagggttggcacataagggaggctccccagcctgggaacgattataacagagggcccctcacttcacagatgaggaacttgaggcaagtcaccagcccctgatcatttcgcctaaaagagcaaggactagagttcctgacctccaggccagtccctgatccctgacctaatgttatcgcggaatgatggcccagggctcctcagagcaggaactccactatgcatctctgcagaggctgccagtgcccagcagtgagggacctgacctcaggggcagagacaagagaggcaccaaggaggatccaagagctgactatgcctgcattgctgagaacaaacccacctgagcaccccagacaccttcctcaacccaggcgggtggacagggtccccctgtggtccagccagtaaaaaccatggtccccccacttctgtgtctcagtcctctcagtccatctcgagcctccgttcaaaatgatcatcatcaaaacttatgtggctttttgacctttgaatagggaattttttaaattttttaaaaattaaaattaaaaaaacacatggctcacccttccaccca

SEQ ID NO: 16081 - DNA, 712 bp, Homo sapiens
  source 1..712: mol_type = unassigned DNA
taaagtccaggcttgaatctcgggtctttacttgggcaacgggcaccatgataccctatgttctggggattagcagtgaggaatgatgaggaacttgaggcaagtcaccagcccctgatcatttcgcctaaaagagcaaggactagagttcctgacctccaggccagtccctgatccctgacctaatgttatcgcggaatgatgatatatgtatctacgggggcctggggctgggcgggctcctgcttctggcagtggtccttctgtccgcctgcctgtgttggctgcatcgaagagtaaagaggctggagaggagctgggcccagggctcctcagagcaggaactccactatgcatctctgcagaggctgccagtgcccagcagtgagggacctgacctcaggggcagagacaagagaggcaccaaggaggatccaagagctgactatgcctgcattgctgagaacaaacccacctgagcaccccagacaccttcctcaacccaggcgggtggacagggtccccctgtggtccagccagtaaaaaccatggtccccccacttctgtgtctcagtcctctcagtccatctcgagcctccgttcaaaatgatcatcatcaaaacttatgtggctttttgacctttgaatagggaattttttaaattttttaaaaattaaaataaaaaaaacacatggctcacccttccaccca

SEQ ID NO: 16082 - DNA, 689 bp, Homo sapiens; identical to SEQ ID NO: 16033
  source 1..689: mol_type = unassigned DNA

SEQ ID NO: 16083 - DNA, 532 bp, Homo sapiens; identical to SEQ ID NO: 16025
  source 1..532: mol_type = unassigned DNA

SEQ ID NO: 16084 - DNA, 764 bp, Homo sapiens
  source 1..764: mol_type = unassigned DNA
gctggggaggaacccaggctgggggagaagttaaagccagaggaggggcaggaatgtctgaggtggcaacacttctcttcagccagacagcactggccagtttggagtctgtccatcctgcaggccacaagctctggatgaggaacttgaggcaagtcaccagcccctgatcatttcgcctaaaagagcaaggactagagttcctgacctccaggccagtccctgatccctgacctaatgttatcgcggaatgatgatatatgtatctacgggggcctggggctgggcgggctcctgcttctggcagtggtccttctgtccgcctgcctgtgttggctgcatcgaagagtaaagaggctggagaggagctgggcccagggctcctcagagcaggaactccactatgcatctctgcagaggctgccagtgcccagcagtgagggacctgacctcaggggcagagacaagagaggcaccaaggaggatccaagagctgactatgcctgcattgctgagaacaaacccacctgagcaccccagacaccttcctcaacccaggcgggtggacagggtccccctgtggtccagccagtaaaaaccatggtccccccacttctgtgtctcagtcctctcagtccatctcgagcctccgttcaaaatgatcatcatcaaaacttatgtggctttttgacctttgaatagggaattttttaaattttttaaaaattaaaattaaaaaaacacatggctcacccttccaccca

SEQ ID NO: 16085 - DNA, 571 bp, Homo sapiens
  source 1..571: mol_type = unassigned DNA
tgataccctatgttctggggattagcagtgaggaatgatgaggaacttgaggcaagtcaccagcccctgatcatttcgcctaaaagagcaaggactagagttcctgacctccaggccagtccctgatccctgacctaatgttatcgcggaatgatgtaaagaggctggagaggagctgggcccagggctcctcagagcaggaactccactatgcatctctgcagaggctgccagtgcccagcagtgagggacctgacctcaggggcagagacaagagaggcaccaaggaggatccaagagctgactatgcctgcattgctgagaacaaacccacctgagcaccccagacaccttcctcaacccaggcgggtggacagggtccccctgtggtccagccagtaaaaaccatggtccccccacttctgtgtctcagtcctctcagtccatctcgagcctccgttcaaaatgatcatcatcaaaacttatgtggctttttgacctttgaatagggaattttttaaattttttaaaaattaaaataaaaaaaacacatggctcacccttccaccca

SEQ ID NO: 16086 - DNA, 571 bp, Homo sapiens; identical to SEQ ID NO: 16039
  source 1..571: mol_type = unassigned DNA

SEQ ID NO: 16087 - DNA, 565 bp, Homo sapiens; identical to SEQ ID NO: 16019
  source 1..565: mol_type = unassigned DNA

SEQ ID NO: 16088 - DNA, 619 bp, Homo sapiens; identical to SEQ ID NO: 16034
  source 1..619: mol_type = unassigned DNA

SEQ ID NO: 16089 - DNA, 254 bp, Homo sapiens; identical to SEQ ID NO: 16046
  source 1..254: mol_type = unassigned DNA

SEQ ID NO: 16090 - DNA, 712 bp, Homo sapiens; identical to SEQ ID NO: 16041
  source 1..712: mol_type = unassigned DNA

SEQ ID NO: 16091 - DNA, 624 bp, Homo sapiens
  source 1..624: mol_type = unassigned DNA
gggattagcagtgaggaatgatgaggaacttgaggcaagtcaccagcccctgatcatttcgcctaaaagagcaaggactagagttcctgacctccaggccagtccctgatccctgacctaatgttatcgcggaatgatgatatatgtatctacgggggcctggggctgggcgggctcctgcttctggcagtggtccttctgtccgcctgcctgtgttggctgcatcgaagaggcccagggctcctcagagcaggaactccactatgcatctctgcagaggctgccagtgcccagcagtgagggacctgacctcaggggcagagacaagagaggcaccaaggaggatccaagagctgactatgcctgcattgctgagaacaaacccacctgagcaccccagacaccttcctcaacccaggcgggtggacagggtccccctgtggtccagccagtaaaaaccatggtccccccacttctgtgtctcagtcctctcagtccatctcgagcctccgttcaaaatgatcatcatcaaaacttatgtggctttttgacctttgaatagggaattttttaaattttttaaaaattaaaattaaaaaaacacatggctcacccttccaccca

SEQ ID NO: 16092 - DNA, 712 bp, Homo sapiens; identical to SEQ ID NO: 16041
  source 1..712: mol_type = unassigned DNA

SEQ ID NO: 16093 - DNA, 734 bp, Homo sapiens; identical to SEQ ID NO: 16026
  source 1..734: mol_type = unassigned DNA

SEQ ID NO: 16094 - DNA, 619 bp, Homo sapiens
  source 1..619: mol_type = unassigned DNA
cctttctgggatgggtgacctagtaaagtccaggcttgaatctcgggtctttacttgggcaacgggcaccatgataccctatgttctggggattagcagtgaggaatgatgaggaacttgaggcaagtcaccagcccctgatcatttcgcctaaaagagcaaggactagagttcctgacctccaggccagtccctgatccctgacctaatgttatcgcggaatgatggcccagggctcctcagagcaggaactccactatgcatctctgcagaggctgccagtgcccagcagtgagggacctgacctcaggggcagagacaagagaggcaccaaggaggatccaagagctgactatgcctgcattgctgagaacaaacccacctgagcaccccagacaccttcctcaacccaggcgggtggacagggtccccctgtggtccagccagtaaaaaccatggtccccccacttctgtgtctcagtcctctcagtccatctcgagcctccgttcaaaatgatcatcatcaaaacttatgtggctttttgacctttgaatagggaattttttaaattttttaaaaattaaaataaaaaaaacacatggctcacccttccaccca

SEQ ID NO: 16095 - DNA, 624 bp, Homo sapiens; identical to SEQ ID NO: 16013
  source 1..624: mol_type = unassigned DNA

SEQ ID NO: 16096 - DNA, 726 bp, Homo sapiens; identical to SEQ ID NO: 16059
  source 1..726: mol_type = unassigned DNA

SEQ ID NO: 16097 - DNA, 532 bp, Homo sapiens
  source 1..532: mol_type = unassigned DNA
atgaggaacttgaggcaagtcaccagcccctgatcatttcgcctaaaagagcaaggactagagttcctgacctccaggccagtccctgatccctgacctaatgttatcgcggaatgatgcaccttctgtcctggtcccaggcccagggctcctcagagcaggaactccactatgcatctctgcagaggctgccagtgcccagcagtgagggacctgacctcaggggcagagacaagagaggcaccaaggaggatccaagagctgactatgcctgcattgctgagaacaaacccacctgagcaccccagacaccttcctcaacccaggcgggtggacagggtccccctgtggtccagccagtaaaaaccatggtccccccacttctgtgtctcagtcctctcagtccatctcgagcctccgttcaaaatgatcatcatcaaaacttatgtggctttttgacctttgaatagggaattttttaaattttttaaaaattaaaattaaaaaaacacatggctcacccttccaccca

SEQ ID NO: 16098 - DNA, 571 bp, Homo sapiens; identical to SEQ ID NO: 16039
  source 1..571: mol_type = unassigned DNA

SEQ ID NO: 16099 - DNA, 603 bp, Homo sapiens; identical to SEQ ID NO: 16035
  source 1..603: mol_type = unassigned DNA

SEQ ID NO: 16100 - DNA, 532 bp, Homo sapiens; identical to SEQ ID NO: 16025
  source 1..532: mol_type = unassigned DNA

SEQ ID NO: 16101 - DNA, 455 bp, Homo sapiens
  source 1..455: mol_type = unassigned DNA
tatcgcggaatgatgatatatgtatctacgggggcctggggctgggcgggctcctgcttctggcagtggtccttctgtccgcctgcctgtgttggctgcatcgaagagaggctgccagtgcccagcagtgagggacctgacctcaggggcagagacaagagaggcaccaaggaggatccaagagctgactatgcctgcattgctgagaacaaacccacctgagcaccccagacaccttcctcaacccaggcgggtggacagggtccccctgtggtccagccagtaaaaaccatggtccccccacttctgtgtctcagtcctctcagtccatctcgagcctccgttcaaaatgatcatcatcaaaacttatgtggctttttgacctttgaatagggaattttttaaattttttaaaaattaaaattaaaaaaacacatggctcacccttccaccca

SEQ ID NO: 16102 - DNA, 254 bp, Homo sapiens; identical to SEQ ID NO: 16046
  source 1..254: mol_type = unassigned DNA

SEQ ID NO: 16103 - DNA, 254 bp, Homo sapiens; identical to SEQ ID NO: 16046
  source 1..254: mol_type = unassigned DNA

SEQ ID NO: 16104 - DNA, 726 bp, Homo sapiens; identical to SEQ ID NO: 16059
  source 1..726: mol_type = unassigned DNA

SEQ ID NO: 16105 - DNA, 764 bp, Homo sapiens
  source 1..764: mol_type = unassigned DNA
gctggggaggaacccaggctgggggagaagttaaagccagaggaggggcaggaatgtctgaggtggcaacacttctcttcagccagacagcactggccagtttggagtctgtccatcctgcaggccacaagctctggatgaggaacttgaggcaagtcaccagcccctgatcatttcgcctaaaagagcaaggactagagttcctgacctccaggccagtccctgatccctgacctaatgttatcgcggaatgatgatatatgtatctacgggggcctggggctgggcgggctcctgcttctggcagtggtccttctgtccgcctgcctgtgttggctgcatcgaagagtaaagaggctggagaggagctgggcccagggctcctcagagcaggaactccactatgcatctctgcagaggctgccagtgcccagcagtgagggacctgacctcaggggcagagacaagagaggcaccaaggaggatccaagagctgactatgcctgcattgctgagaacaaacccacctgagcaccccagacaccttcctcaacccaggcgggtggacagggtccccctgtggtccagccagtaaaaaccatggtccccccacttctgtgtctcagtcctctcagtccatctcgagcctccgttcaaattgatcatcatcaaaacttatgtggctttttgacctttgaatagggaattttttaaattttttaaaaattaaaataaaaaaaacacatggctcacccttccaccca

SEQ ID NO: 16106 - DNA, 603 bp, Homo sapiens; identical to SEQ ID NO: 16035
  source 1..603: mol_type = unassigned DNA

SEQ ID NO: 16107 - DNA, 648 bp, Homo sapiens
  source 1..648: mol_type = unassigned DNA
atgaggaacttgaggcaagtcaccagcccctgatcatttcgcctaaaagagcaaggactagagttcctgacctccaggccagtccctgatccctgacctaatgttatcgcggaatgatgatatatgtatctacgggggcctggggctgggcgggctcctgcttctggcagtggtccttctgtccgcctgcctgtgttggctgcatcgaagagtaaagaggctggagaggagctggcaccttctgtcctggtcccaggcccagggctcctcagagcaggaactccactatgcatctctgcagaggctgccagtgcccagcagtgagggacctgacctcaggggcagagacaagagaggcaccaaggaggatccaagagctgactatgcctgcattgctgagaacaaacccacctgagcaccccagacaccttcctcaacccaggcgggtggacagggtccccctgtggtccagccagtaaaaaccatggtccccccacttctgtgtctcagtcctctcagtccatctcgagcctccgttcaaaatgatcatcatcaaaacttatgtggctttttgacctttgaatagggaattttttaaattttttaaaaattaaaataaaaaaaacacatggctcacccttccaccca

SEQ ID NO: 16108 - DNA, 668 bp, Homo sapiens; identical to SEQ ID NO: 16040
  source 1..668: mol_type = unassigned DNA

SEQ ID NO: 16109 - DNA, 254 bp, Homo sapiens; identical to SEQ ID NO: 16046
  source 1..254: mol_type = unassigned DNA

SEQ ID NO: 16110 - DNA, 764 bp, Homo sapiens; identical to SEQ ID NO: 16105
  source 1..764: mol_type = unassigned DNA

SEQ ID NO: 16111 - DNA, 585 bp, Homo sapiens; identical to SEQ ID NO: 16042
  source 1..585: mol_type = unassigned DNA

SEQ ID NO: 16112 - DNA, 648 bp, Homo sapiens
  source 1..648: mol_type = unassigned DNA
atgaggaacttgaggcaagtcaccagcccctgatcatttcgcctaaaagagcaaggactagagttcctgacctccaggccagtccctgatccctgacctaatgttatcgcggaatgatgatatatgtatctacgggggcctggggctgggcgggctcctgcttctggcagtggtccttctgtccgcctgcctgtgttggctgcatcgaagagtaaagaggctggagaggagctggcaccttctgtcctggtcccaggcccagggctcctcagagcaggaactccactatgcatctctgcagaggctgccagtgcccagcagtgagggacctgacctcaggggcagagacaagagaggcaccaaggaggatccaagagctgactatgcctgcattgctgagaacaaacccacctgagcaccccagacaccttcctcaacccaggcgggtggacagggtccccctgtggtccagccagtaaaaaccatggtccccccacttctgtgtctcagtcctctcagtccatctcgagcctccgttcaaaatgatcatcatcaaaacttatgtggctttttgacctttgaatagggaattttttaaattttttaaaaattaaaattaaaaaaacacatggctcacccttccaccca

SEQ ID NO: 16113 - DNA, 764 bp, Homo sapiens; identical to SEQ ID NO: 16105
  source 1..764: mol_type = unassigned DNA

SEQ ID NO: 16114 - DNA, 648 bp, Homo sapiens; identical to SEQ ID NO: 16018
  source 1..648: mol_type = unassigned DNA

SEQ ID NO: 16115 - DNA, 585 bp, Homo sapiens
  source 1..585: mol_type = unassigned DNA
ggaggggcaggaatgtctgaggtggcaacacttctcttcagccagacagcactggccagtttggagtctgtccatcctgcaggccacaagctctggatgaggaacttgaggcaagtcaccagcccctgatcatttcgcctaaaagagcaaggactagagttcctgacctccaggccagtccctgatccctgacctaatgttatcgcggaatgatgtaaagaggctggagaggagctggaggctgccagtgcccagcagtgagggacctgacctcaggggcagagacaagagaggcaccaaggaggatccaagagctgactatgcctgcattgctgagaacaaacccacctgagcaccccagacaccttcctcaacccaggcgggtggacagggtccccctgtggtccagccagtaaaaaccatggtccccccacttctgtgtctcagtcctctcagtccatctcgagcctccgttcaaaatgatcatcatcaaaacttatgtggctttttgacctttgaatagggaattttttaaattttttaaaaattaaaataaaaaaaacacatggctcacccttccaccca

SEQ ID NO: 16116 - DNA, 734 bp, Homo sapiens; identical to SEQ ID NO: 16026
  source 1..734: mol_type = unassigned DNA

SEQ ID NO: 16117 - DNA, 254 bp, Homo sapiens; identical to SEQ ID NO: 16046
  source 1..254: mol_type = unassigned DNA

SEQ ID NO: 16118 - DNA, 555 bp, Homo sapiens
  source 1..555: mol_type = unassigned DNA
atgaggaacttgaggcaagtcaccagcccctgatcatttcgcctaaaagagcaaggactagagttcctgacctccaggccagtccctgatccctgacctaatgttatcgcggaatgatgtaaagaggctggagaggagctggcaccttctgtcctggtcccaggcccagggctcctcagagcaggaactccactatgcatctctgcagaggctgccagtgcccagcagtgagggacctgacctcaggggcagagacaagagaggcaccaaggaggatccaagagctgactatgcctgcattgctgagaacaaacccacctgagcaccccagacaccttcctcaacccaggcgggtggacagggtccccctgtggtccagccagtaaaaaccatggtccccccacttctgtgtctcagtcctctcagtccatctcgagcctccgttcaaaatgatcatcatcaaaacttatgtggctttttgacctttgaatagggaattttttaaattttttaaaaattaaaattaaaaaaacacatggctcacccttccaccca

SEQ ID NO: 16119 - DNA, 668 bp, Homo sapiens
  source 1..668: mol_type = unassigned DNA
ggcaacgggcaccatgataccctatgttctggggattagcagtgaggaatggaaagtgcccagctcagggttggcacataagggaggctccccagcctgggaacgattataacagagggcccctcacttcacagatgaggaacttgaggcaagtcaccagcccctgatcatttcgcctaaaagagcaaggactagagttcctgacctccaggccagtccctgatccctgacctaatgttatcgcggaatgatgtaaagaggctggagaggagctgggcccagggctcctcagagcaggaactccactatgcatctctgcagaggctgccagtgcccagcagtgagggacctgacctcaggggcagagacaagagaggcaccaaggaggatccaagagctgactatgcctgcattgctgagaacaaacccacctgagcaccccagacaccttcctcaacccaggcgggtggacagggtccccctgtggtccagccagtaaaaaccatggtccccccacttctgtgtctcagtcctctcagtccatctcgagcctccgttcaaaatgatcatcatcaaaacttatgtggctttttgacctttgaatagggaattttttaaattttttaaaaattaaaattaaaaaaacacatggctcacccttccaccca

SEQ ID NO: 16120 - DNA, 668 bp, Homo sapiens; identical to SEQ ID NO: 16040
  source 1..668: mol_type = unassigned DNA

SEQ ID NO: 16121 - DNA, 532 bp, Homo sapiens; identical to SEQ ID NO: 16025
  source 1..532: mol_type = unassigned DNA

SEQ ID NO: 16122 - DNA, 610 bp, Homo sapiens; identical to SEQ ID NO: 16036
  source 1..610: mol_type = unassigned DNA

SEQ ID NO: 16123 - DNA, 259 bp, Homo sapiens; identical to SEQ ID NO: 16048
  source 1..259: mol_type = unassigned DNA

SEQ ID NO: 16124 - DNA, 259 bp, Homo sapiens; identical to SEQ ID NO: 16048
  source 1..259: mol_type = unassigned DNA

SEQ ID NO: 16125 - DNA, 734 bp, Homo sapiens; identical to SEQ ID NO: 16026
  source 1..734: mol_type = unassigned DNA

SEQ ID NO: 16126 - DNA, 259 bp, Homo sapiens; identical to SEQ ID NO: 16048
  source 1..259: mol_type = unassigned DNA

SEQ ID NO: 16127 - DNA, 610 bp, Homo sapiens
  source 1..610: mol_type = unassigned DNA
agaggaggggcaggaatgtctgaggtggcaacacttctcttcagccagacagcactggccagtttggagtctgtccatcctgcaggccacaagctctggatgaggaacttgaggcaagtcaccagcccctgatcatttcgcctaaaagagcaaggactagagttcctgacctccaggccagtccctgatccctgacctaatgttatcgcggaatgatggcccagggctcctcagagcaggaactccactatgcatctctgcagaggctgccagtgcccagcagtgagggacctgacctcaggggcagagacaagagaggcaccaaggaggatccaagagctgactatgcctgcattgctgagaacaaacccacctgagcaccccagacaccttcctcaacccaggcgggtggacagggtccccctgtggtccagccagtaaaaaccatggtccccccacttctgtgtctcagtcctctcagtccatctcgagcctccgttcaaaatgatcatcatcaaaacttatgtggctttttgacctttgaatagggaattttttaaattttttaaaaattaaaattaaaaaaacacatggctcacccttccaccca

SEQ ID NO: 16128 - DNA, 764 bp, Homo sapiens; identical to SEQ ID NO: 16105
  source 1..764: mol_type = unassigned DNA

SEQ ID NO: 16129 - DNA, 624 bp, Homo sapiens; identical to SEQ ID NO: 16013
  source 1..624: mol_type = unassigned DNA

SEQ ID NO: 16130 - DNA, 764 bp, Homo sapiens; identical to SEQ ID NO: 16105
  source 1..764: mol_type = unassigned DNA

SEQ ID NO: 16131 - DNA, 619 bp, Homo sapiens; identical to SEQ ID NO: 16034
  source 1..619: mol_type = unassigned DNA

SEQ ID NO: 16132 - DNA, 254 bp, Homo sapiens; identical to SEQ ID NO: 16046
  source 1..254: mol_type = unassigned DNA

SEQ ID NO: 16133 - DNA, 585 bp, Homo sapiens; identical to SEQ ID NO: 16042
  source 1..585: mol_type = unassigned DNA

SEQ ID NO: 16134 - DNA, 565 bp, Homo sapiens; identical to SEQ ID NO: 16019
  source 1..565: mol_type = unassigned DNA

SEQ ID NO: 16135 - DNA, 668 bp, Homo sapiens; identical to SEQ ID NO: 16040
  source 1..668: mol_type = unassigned DNA

SEQ ID NO: 16136 - DNA, 610 bp, Homo sapiens; identical to SEQ ID NO: 16036
  source 1..610: mol_type = unassigned DNA

SEQ ID NO: 16137 - DNA, 648 bp, Homo sapiens; identical to SEQ ID NO: 16018
  source 1..648: mol_type = unassigned DNA

SEQ ID NO: 16138 - DNA, 665 bp, Homo sapiens; identical to SEQ ID NO: 16038
  source 1..665: mol_type = unassigned DNA

SEQ ID NO: 16139 - DNA, 726 bp, Homo sapiens; identical to SEQ ID NO: 16059
  source 1..726: mol_type = unassigned DNA

SEQ ID NO: 16140 - DNA, 619 bp, Homo sapiens; identical to SEQ ID NO: 16034
  source 1..619: mol_type = unassigned DNA

SEQ ID NO: 16141 - DNA, 455 bp, Homo sapiens; identical to SEQ ID NO: 16045
  source 1..455: mol_type = unassigned DNA

SEQ ID NO: 16142 - DNA, 665 bp, Homo sapiens
  source 1..665: mol_type = unassigned DNA
gaaagtgcccagctcagggttggcacataagggaggctccccagcctgggaacgattataacagagggcccctcacttcacagatgaggaacttgaggcaagtcaccagcccctgatcatttcgcctaaaagagcaaggactagagttcctgacctccaggccagtccctgatccctgacctaatgttatcgcggaatgatgatatatgtatctacgggggcctggggctgggcgggctcctgcttctggcagtggtccttctgtccgcctgcctgtgttggctgcatcgaagagtaaagaggctggagaggagctggaggctgccagtgcccagcagtgagggacctgacctcaggggcagagacaagagaggcaccaaggaggatccaagagctgactatgcctgcattgctgagaacaaacccacctgagcaccccagacaccttcctcaacccaggcgggtggacagggtccccctgtggtccagccagtaaaaaccatggtccccccacttctgtgtctcagtcctctcagtccatctcgagcctccgttcaaaatgatcatcatcaaaacttatgtggctttttgacctttgaatagggaattttttaaattttttaaaaattaaaattaaaaaaacacatggctcacccttccaccca

SEQ ID NO: 16143 - DNA, 571 bp, Homo sapiens; identical to SEQ ID NO: 16039
  source 1..571: mol_type = unassigned DNA

SEQ ID NO: 16144 - DNA, 624 bp, Homo sapiens
  source 1..624: mol_type = unassigned DNA
gggattagcagtgaggaatgatgaggaacttgaggcaagtcaccagcccctgatcatttcgcctaaaagagcaaggactagagttcctgacctccaggccagtccctgatccctgacctaatgttatcgcggaatgatgatatatgtatctacgggggcctggggctgggcgggctcctgcttctggcagtggtccttctgtccgcctgcctgtgttggctgcatcgaagaggcccagggctcctcagagcaggaactccactatgcatctctgcagaggctgccagtgcccagcagtgagggacctgacctcaggggcagagacaagagaggcaccaaggaggatccaagagctgactatgcctgcattgctgagaacaaacccacctgagcaccccagacaccttcctcaacccaggcgggtggacagggtccccctgtggtccagccagtaaaaaccatggtccccccacttctgtgtctcagtcctctcagtccatctcgagcctccgttcaaaatgatcatcatcaaaacttatgtggctttttgacctttgaatagggaattttttaaattttttaaaaattaaaataaaaaaaacacatggctcacccttccaccca

SEQ ID NO: 16145 - DNA, 610 bp, Homo sapiens; identical to SEQ ID NO: 16036
  source 1..610: mol_type = unassigned DNA

SEQ ID NO: 16146 - DNA, 665 bp, Homo sapiens
  source 1..665: mol_type = unassigned DNA
gaaagtgcccagctcagggttggcacataagggaggctccccagcctgggaacgattataacagagggcccctcacttcacagatgaggaacttgaggcaagtcaccagcccctgatcatttcgcctaaaagagcaaggactagagttcctgacctccaggccagtccctgatccctgacctaatgttatcgcggaatgatgatatatgtatctacgggggcctggggctgggcgggctcctgcttctggcagtggtccttctgtccgcctgcctgtgttggctgcatcgaagagtaaagaggctggagaggagctggaggctgccagtgcccagcagtgagggacctgacctcaggggcagagacaagagaggcaccaaggaggatccaagagctgactatgcctgcattgctgagaacaaacccacctgagcaccccagacaccttcctcaacccaggcgggtggacagggtccccctgtggtccagccagtaaaaaccatggtccccccacttctgtgtctcagtcctctcagtccatctcgagcctccgttcaaaatgatcatcatcaaaacttatgtggctttttgacctttgaatagggaattttttaaattttttaaaaattaaaataaaaaaaacacatggctcacccttccaccca

SEQ ID NO: 16147 - DNA, 254 bp, Homo sapiens; identical to SEQ ID NO: 16046
  source 1..254: mol_type = unassigned DNA

SEQ ID NO: 16148 - DNA, 555 bp, Homo sapiens; identical to SEQ ID NO: 16024
  source 1..555: mol_type = unassigned DNA

SEQ ID NO: 16149 - DNA, 726 bp, Homo sapiens
  source 1..726: mol_type = unassigned DNA
gaaaagaaagatgttgtaaccctaaccctggagccgaacttcctctcctaacaatgctggggaggaacccaggctgggggagaagttaaagccagaggaggggcaggaatgtctgaggtggcaacacttctcttcagccagacagcactggccagtttggagtctgtccatcctgcaggccacaagctctggatgaggaacttgaggcaagtcaccagcccctgatcatttcgcctaaaagagcaaggactagagttcctgacctccaggccagtccctgatccctgacctaatgttatcgcggaatgatgtaaagaggctggagaggagctgggcccagggctcctcagagcaggaactccactatgcatctctgcagaggctgccagtgcccagcagtgagggacctgacctcaggggcagagacaagagaggcaccaaggaggatccaagagctgactatgcctgcattgctgagaacaaacccacctgagcaccccagacaccttcctcaacccaggcgggtggacagggtccccctgtggtccagccagtaaaaaccatggtccccccacttctgtgtctcagtcctctcagtccatctcgagcctccgttcaaaatgatcatcatcaaaacttatgtggctttttgacctttgaatagggaattttttaaattttttaaaaattaaaattaaaaaaacacatggctcacccttccaccca

SEQ ID NO: 16150 - DNA, 689 bp, Homo sapiens; identical to SEQ ID NO: 16033
  source 1..689: mol_type = unassigned DNA

SEQ ID NO: 16151 - DNA, 734 bp, Homo sapiens
  source 1..734: mol_type = unassigned DNA
acttcagccctagcagcatctgcctgtgggaagcagctctccacaccagccaagggggcccccacactcccgcgctgctctgcggctcagggagcagcccacctgctggatgaggaacttgaggcaagtcaccagcccctgatcatttcgcctaaaagagcaaggactagagttcctgacctccaggccagtccctgatccctgacctaatgttatcgcggaatgatgatatatgtatctacgggggcctggggctgggcgggctcctgcttctggcagtggtccttctgtccgcctgcctgtgttggctgcatcgaagagcaccttctgtcctggtcccaggcccagggctcctcagagcaggaactccactatgcatctctgcagaggctgccagtgcccagcagtgagggacctgacctcaggggcagagacaagagaggcaccaaggaggatccaagagctgactatgcctgcattgctgagaacaaacccacctgagcaccccagacaccttcctcaacccaggcgggtggacagggtccccctgtggtccagccagtaaaaaccatggtccccccacttctgtgtctcagtcctctcagtccatctcgagcctccgttcaaaatgatcatcatcaaaacttatgtggctttttgacctttgaatagggaattttttaaattttttaaaaattaaaattaaaaaaacacatggctcacccttccaccca

SEQ ID NO: 16152 - DNA, 555 bp, Homo sapiens; identical to SEQ ID NO: 16024
  source 1..555: mol_type = unassigned DNA

SEQ ID NO: 16153 - DNA, 734 bp, Homo sapiens; identical to SEQ ID NO: 16026
  source 1..734: mol_type = unassigned DNA

SEQ ID NO: 16154 - DNA, 619 bp, Homo sapiens; identical to SEQ ID NO: 16034
  source 1..619: mol_type = unassigned DNA

SEQ ID NO: 16155 - DNA, 610 bp, Homo sapiens
  source 1..610: mol_type = unassigned DNA
agaggaggggcaggaatgtctgaggtggcaacacttctcttcagccagacagcactggccagtttggagtctgtccatcctgcaggccacaagctctggatgaggaacttgaggcaagtcaccagcccctgatcatttcgcctaaaagagcaaggactagagttcctgacctccaggccagtccctgatccctgacctaatgttatcgcggaatgatggcccagggctcctcagagcaggaactccactatgcatctctgcagaggctgccagtgcccagcagtgagggacctgacctcaggggcagagacaagagaggcaccaaggaggatccaagagctgactatgcctgcattgctgagaacaaacccacctgagcaccccagacaccttcctcaacccaggcgggtggacagggtccccctgtggtccagccagtaaaaaccatggtccccccacttctgtgtctcagtcctctcagtccatctcgagcctccgttcaaaatgatcatcatcaaaacttatgtggctttttgacctttgaatagggaattttttaaattttttaaaaattaaaataaaaaaaacacatggctcacccttccaccca

SEQ ID NO: 16156 - DNA, 603 bp, Homo sapiens; identical to SEQ ID NO: 16035
  source 1..603: mol_type = unassigned DNA

SEQ ID NO: 16157 - DNA, 689 bp, Homo sapiens
  source 1..689: mol_type = unassigned DNA
ggtgacctagtaaagtccaggcttgaatctcgggtctttacttgggcaacgggcaccatgataccctatgttctggggattagcagtgaggaatggaaagtgcccagctcagggttggcacataagggaggctccccagcctgggaacgattataacagagggcccctcacttcacagatgaggaacttgaggcaagtcaccagcccctgatcatttcgcctaaaagagcaaggactagagttcctgacctccaggccagtccctgatccctgacctaatgttatcgcggaatgatggcccagggctcctcagagcaggaactccactatgcatctctgcagaggctgccagtgcccagcagtgagggacctgacctcaggggcagagacaagagaggcaccaaggaggatccaagagctgactatgcctgcattgctgagaacaaacccacctgagcaccccagacaccttcctcaacccaggcgggtggacagggtccccctgtggtccagccagtaaaaaccatggtccccccacttctgtgtctcagtcctctcagtccatctcgagcctccgttcaaaatgatcatcatcaaaacttatgtggctttttgacctttgaatagggaattttttaaattttttaaaaattaaaataaaaaaaacacatggctcacccttccaccca

SEQ ID NO: 16158 - DNA, 764 bp, Homo sapiens; identical to SEQ ID NO: 16105
  source 1..764: mol_type = unassigned DNA

SEQ ID NO: 16159 - DNA, 555 bp, Homo sapiens
  source 1..555: mol_type = unassigned DNA
atgaggaacttgaggcaagtcaccagcccctgatcatttcgcctaaaagagcaaggactagagttcctgacctccaggccagtccctgatccctgacctaatgttatcgcggaatgatgtaaagaggctggagaggagctggcaccttctgtcctggtcccaggcccagggctcctcagagcaggaactccactatgcatctctgcagaggctgccagtgcccagcagtgagggacctgacctcaggggcagagacaagagaggcaccaaggaggatccaagagctgactatgcctgcattgctgagaacaaacccacctgagcaccccagacaccttcctcaacccaggcgggtggacagggtccccctgtggtccagccagtaaaaaccatggtccccccacttctgtgtctcagtcctctcagtccatctcgagcctccgttcaaaatgatcatcatcaaaacttatgtggctttttgacctttgaatagggaattttttaaattttttaaaaattaaaataaaaaaaacacatggctcacccttccaccca

SEQ ID NO: 16160 - DNA, 603 bp, Homo sapiens; identical to SEQ ID NO: 16035
  source 1..603: mol_type = unassigned DNA

SEQ ID NO: 16161 - DNA, 712 bp, Homo sapiens; identical to SEQ ID NO: 16041
  source 1..712: mol_type = unassigned DNA

SEQ ID NO: 16162 - DNA, 668 bp, Homo sapiens
  source 1..668: mol_type = unassigned DNA
ggcaacgggcaccatgataccctatgttctggggattagcagtgaggaatggaaagtgcccagctcagggttggcacataagggaggctccccagcctgggaacgattataacagagggcccctcacttcacagatgaggaacttgaggcaagtcaccagcccctgatcatttcgcctaaaagagcaaggactagagttcctgacctccaggccagtccctgatccctgacctaatgttatcgcggaatgatgtaaagaggctggagaggagctgggcccagggctcctcagagcaggaactccactatgcatctctgcagaggctgccagtgcccagcagtgagggacctgacctcaggggcagagacaagagaggcaccaaggaggatccaagagctgactatgcctgcattgctgagaacaaacccacctgagcaccccagacaccttcctcaacccaggcgggtggacagggtccccctgtggtccagccagtaaaaaccatggtccccccacttctgtgtctcagtcctctcagtccatctcgagcctccgttcaaaatgatcatcatcaaaacttatgtggctttttgacctttgaatagggaattttttaaattttttaaaaattaaaataaaaaaaacacatggctcacccttccaccca

SEQ ID NO: 16163 - DNA, 603 bp, Homo sapiens
  source 1..603: mol_type = unassigned DNA
cacccacccaggcccaggctccttcccctccatcatccccttaccagcacctagaaccatccagggctgaaaagtcccctccaaaccacgtgatgaggaacttgaggcaagtcaccagcccctgatcatttcgcctaaaagagcaaggactagagttcctgacctccaggccagtccctgatccctgacctaatgttatcgcggaatgatggcccagggctcctcagagcaggaactccactatgcatctctgcagaggctgccagtgcccagcagtgagggacctgacctcaggggcagagacaagagaggcaccaaggaggatccaagagctgactatgcctgcattgctgagaacaaacccacctgagcaccccagacaccttcctcaacccaggcgggtggacagggtccccctgtggtccagccagtaaaaaccatggtccccccacttctgtgtctcagtcctctcagtccatctcgagcctccgttcaaaatgatcatcatcaaaacttatgtggctttttgacctttgaatagggaattttttaaattttttaaaaattaaaattaaaaaaacacatggctcacccttccaccca

SEQ ID NO: 16164 - DNA, 726 bp, Homo sapiens; identical to SEQ ID NO: 16059
  source 1..726: mol_type = unassigned DNA

SEQ ID NO: 16165 - DNA, 565 bp, Homo sapiens
  source 1..565: mol_type = unassigned DNA
agaggaggggcaggaatgtctgaggtggcaacacttctcttcagccagacagcactggccagtttggagtctgtccatcctgcaggccacaagctctggatgaggaacttgaggcaagtcaccagcccctgatcatttcgcctaaaagagcaaggactagagttcctgacctccaggccagtccctgatccctgacctaatgttatcgcggaatgatgaggctgccagtgcccagcagtgagggacctgacctcaggggcagagacaagagaggcaccaaggaggatccaagagctgactatgcctgcattgctgagaacaaacccacctgagcaccccagacaccttcctcaacccaggcgggtggacagggtccccctgtggtccagccagtaaaaaccatggtccccccacttctgtgtctcagtcctctcagtccatctcgagcctccgttcaaaatgatcatcatcaaaacttatgtggctttttgacctttgaatagggaattttttaaattttttaaaaattaaaattaaaaaaacacatggctcacccttccaccca

SEQ ID NO: 16166 - DNA, 455 bp, Homo sapiens; identical to SEQ ID NO: 16045
  source 1..455: mol_type = unassigned DNA

SEQ ID NO: 16167 - DNA, 726 bp, Homo sapiens; identical to SEQ ID NO: 16059
  source 1..726: mol_type = unassigned DNA

SEQ ID NO: 16168 - DNA, 764 bp, Homo sapiens
  source 1..764: mol_type = unassigned DNA
gctggggaggaacccaggctgggggagaagttaaagccagaggaggggcaggaatgtctgaggtggcaacacttctcttcagccagacagcactggccagtttggagtctgtccatcctgcaggccacaagctctggatgaggaacttgaggcaagtcaccagcccctgatcatttcgcctaaaagagcaaggactagagttcctgacctccaggccagtccctgatccctgacctaatgttatcgcggaatgatgatatatgtatctacgggggcctggggctgggcgggctcctgcttctggcagtggtccttctgtccgcctgcctgtgttggctgcatcgaagagtaaagaggctggagaggagctgggcccagggctcctcagagcaggaactccactatgcatctctgcagaggctgccagtgcccagcagtgagggacctgacctcaggggcagagacaagagaggcaccaaggaggatccaagagctgactatgcctgcattgctgagaacaaacccacctgagcaccccagacaccttcctcaacccaggcgggtggacagggtccccctgtggtccagccagtaaaaaccatggtccccccacttctgtgtctcagtcctctcagtccatctcgagcctccgttcaaaatgatcatcatcaaaacttatgtggctttttgacctttgaatagggaattttttaaattttttaaaaattaaaataaaaaaaacacatggctcacccttccaccca

SEQ ID NO: 16169 - DNA, 555 bp, Homo sapiens; identical to SEQ ID NO: 16024
  source 1..555: mol_type = unassigned DNA

SEQ ID NO: 16170 - DNA, 565 bp, Homo sapiens
  source 1..565: mol_type = unassigned DNA
agaggaggggcaggaatgtctgaggtggcaacacttctcttcagccagacagcactggccagtttggagtctgtccatcctgcaggccacaagctctggatgaggaacttgaggcaagtcaccagcccctgatcatttcgcctaaaagagcaaggactagagttcctgacctccaggccagtccctgatccctgacctaatgttatcgcggaatgatgaggctgccagtgcccagcagtgagggacctgacctcaggggcagagacaagagaggcaccaaggaggatccaagagctgactatgcctgcattgctgagaacaaacccacctgagcaccccagacaccttcctcaacccaggcgggtggacagggtccccctgtggtccagccagtaaaaaccatggtccccccacttctgtgtctcagtcctctcagtccatctcgagcctccgttcaaaatgatcatcatcaaaacttatgtggctttttgacctttgaatagggaattttttaaattttttaaaaattaaaataaaaaaaacacatggctcacccttccaccca

SEQ ID NO: 16171 - DNA, 624 bp, Homo sapiens; identical to SEQ ID NO: 16021
  source 1..624: mol_type = unassigned DNA

SEQ ID NO: 16172 - DNA, 624 bp, Homo sapiens
  source 1..624: mol_type = unassigned DNA
atgaggaacttgaggcaagtcaccagcccctgatcatttcgcctaaaagagcaaggactagagttcctgacctccaggccagtccctgatccctgacctaatgttatcgcggaatgatgatatatgtatctacgggggcctggggctgggcgggctcctgcttctggcagtggtccttctgtccgcctgcctgtgttggctgcatcgaagagcaccttctgtcctggtcccaggcccagggctcctcagagcaggaactccactatgcatctctgcagaggctgccagtgcccagcagtgagggacctgacctcaggggcagagacaagagaggcaccaaggaggatccaagagctgactatgcctgcattgctgagaacaaacccacctgagcaccccagacaccttcctcaacccaggcgggtggacagggtccccctgtggtccagccagtaaaaaccatggtccccccacttctgtgtctcagtcctctcagtccatctcgagcctccgttcaaaatgatcatcatcaaaacttatgtggctttttgacctttgaatagggaattttttaaattttttaaaaattaaaataaaaaaaacacatggctcacccttccaccc

SEQ ID NO: 16173 - DNA, 624 bp, Homo sapiens
  source 1..624: mol_type = unassigned DNA
atgaggaacttgaggcaagtcaccagcccctgatcatttcgcctaaaagagcaaggactagagttcctgacctccaggccagtccctgatccctgacctaatgttatcgcggaatgatgatatatgtatctacgggggcctggggctgggcgggctcctgcttctggcagtggtccttctgtccgcctgcctgtgttggctgcatcgaagagcaccttctgtcctggtcccaggcccagggctcctcagagcaggaactccactatgcatctctgcagaggctgccagtgcccagcagtgagggacctgacctcaggggcagagacaagagaggcaccaaggaggatccaagagctgactatgcctgcattgctgagaacaaacccacctgagcaccccagacaccttcctcaacccaggcgggtggacagggtccccctgtggtccagccagtaaaaaccatggtccccccacttctgtgtctcagtcctctcagtccatctcgagcctccgttcaaaatgatcatcatcaaaacttatgtggctttttgacctttgaatagggaattttttaaattttttaaaaattaaaattaaaaaaacacatggctcacccttccaccc

SEQ ID NO: 16174 - DNA, 345 bp, Homo sapiens; identical to SEQ ID NO: 16020
  source 1..345: mol_type = unassigned DNA

SEQ ID NO: 16175 - DNA, 624 bp, Homo sapiens; identical to SEQ ID NO: 16021
  source 1..624: mol_type = unassigned DNA

SEQ ID NO: 16176 - DNA, 345 bp, Homo sapiens; identical to SEQ ID NO: 16020
  source 1..345: mol_type = unassigned DNA

SEQ ID NO: 16177 - DNA, 345 bp, Homo sapiens; identical to SEQ ID NO: 16020
  source 1..345: mol_type = unassigned DNA

SEQ ID NO: 16178 - DNA, 624 bp, Homo sapiens; identical to SEQ ID NO: 16021
  source 1..624: mol_type = unassigned DNA

SEQ ID NO: 16179 - DNA, 624 bp, Homo sapiens; identical to SEQ ID NO: 16021
  source 1..624: mol_type = unassigned DNA

SEQ ID NO: 16180 - DNA, 345 bp, Homo sapiens; identical to SEQ ID NO: 16020
  source 1..345: mol_type = unassigned DNA

SEQ ID NO: 16181 - DNA, 345 bp, Homo sapiens; identical to SEQ ID NO: 16020
  source 1..345: mol_type = unassigned DNA

SEQ ID NO: 16182 - DNA, 345 bp, Homo sapiens; identical to SEQ ID NO: 16020
  source 1..345: mol_type = unassigned DNA

SEQ ID NO: 16183 - DNA, 345 bp, Homo sapiens; identical to SEQ ID NO: 16020
  source 1..345: mol_type = unassigned DNA

SEQ ID NO: 16184 - DNA, 624 bp, Homo sapiens; identical to SEQ ID NO: 16021
  source 1..624: mol_type = unassigned DNA

SEQ ID NO: 16185 - DNA, 1511 bp, Homo sapiens
  source 1..1511: mol_type = unassigned DNA
ccacagcgcaggctggaggtggcagcccgtggaaagccaagttcatccaccatcggagcccaggccaggctgccaaggctaatattcaggacaaagccaggcacaggtcgggaatcctatgaagatgatcatcgtcctgaggtcttccttccagggttgcatccgcgacagaagatggaaagagaaatggtgctctgcctggcccagaccatccacacgcaggaggatctgcccagaccctccatctcggctgagccaggcaccgtgatccccctggggagccatgtgactttcgtgtgccggggcccggttggggttcaaacattccgcctggagagggagagtagatccacatacaatgatactgaagatgtgtctcaagctagtccatctgagtcagaggccagattccgcattgactcagtaagtgaaggaaatgccgggccttatcgctgcatctattataagccccctaaatggtctgagcagagtgactacctggagctgctggtgaaagaaacctctggaggcccggactccccggacacagagcccggctcctcagctggacccacgcagaggccgtcggacaacagtcacaatgagcatgcacctgcttcccaaggcctgaaagctgagcatctgtatattctcatcggggtctcagtggtcttcctcttctgtctcctcctcctggtcctcttctgcctccatcgccagaatcagataaagcaggggccccccagaagcaaggacgaggagcagaagccacagcagaggcctgacctggctgttgatgttctagagaggacagcagacaaggccacagtcaatggacttcctgagaaggacagagagacggacacctcggccctggctgcagggagttcccaggaggtgacgtatgctcagctggaccactgggccctcacacagaggacagcccgggctgtgtccccacagtccacaaagcccatggccgagtccatcacgtatgcagccgttgccagacactgaccccatacccacctggcctctgcacctgagggtagaaagtcactctaggaaaagcctgaagcagccatttggaaggcttcctgttggattcctcttcatctagaaagccagccaggcagctgtcctggagacaagagctggagactggaggtttctaaccagcatccagaaggttcgttagccaggtggtcccttctacaatcgagcagctccttggacagactgtttctcagttatttccagagacccagctacagttccctggctgtttctagagacccagctttattcacctgactgtttccagagacccagctaaagtcacctgcctgttctaaaggcccagctacagccaatcagccgatttcctgagcagtgatgccacctccaagcttgtcctaggtgtctgctgtgaacctccagtgaccccagagactttgctgtaattatctgccctgctgaccctaaagaccttcctagaagtcaagagctag

SEQ ID NO: 16186 - DNA, 1467 bp, Homo sapiens
  source 1..1467: mol_type = unassigned DNA
gcagagttctgtccttgcattggtgcgcctcaggccaggctgcactgctgggacctgggccatgtctccccaccccaccgccctcctgggcctagtgctctgcctggcccagaccatccacacgcaggaggaagatctgcccagaccctccatctcggctgagccaggcaccgtgatccccctggggagccatgtgactttcgtgtgccggggcccggttggggttcaaacattccgcctggagagggagagtagatccacatacaatgatactgaagatgtgtctcaagctagtccatctgagtcagaggccagattccgcattgactcagtaagtgaaggaaatgccgggccttatcgctgcatctattataagccccctaaatggtctgagcagagtgactacctggagctgctggtgaaaggacccacgcagaggccgtcggacaacagtcacaatgagcatgcacctgcttcccaaggcctgaaagctgagcatctgtatattctcatcggggtctcagtggtcttcctcttctgtctcctcctcctggtcctcttctgcctccatcgccagaatcagataaagcaggggccccccagaagcaaggacgaggagcagaagccacagcagaggcctgacctggctgttgatgttctagagaggacagcagacaaggccacagtcaatggacttcctgagaaggacagagagacggacacctcggccctggctgcagggagttcccaggaggtgacgtatgctcagctggaccactgggccctcacacagaggacagcccgggctgtgtccccacagtccacaaagcccatggccgagtccatcacgtatgcagccgttgccagacactgaccccatacccacctggcctctgcacctgagggtagaaagtcactctaggaaaagcctgaagcagccatttggaaggcttcctgttggattcctcttcatctagaaagccagccaggcagctgtcctggagacaagagctggagactggaggtttctaaccagcatccagaaggttcgttagccaggtggtcccttctacaatcgagcagctccttggacagactgtttctcagttatttccagagacccagctacagttccctggctgtttctagagacccagctttattcacctgactgtttccagagacccagctaaagtcacctgcctgttctaaaggcccagctacagccaatcagccgatttcctgagcagtgatgccacctccaagcttgtcctaggtgtctgctgtgaacctccagtgaccccagagactttgctgtaattatctgccctgctgaccctaaagaccttcctagaagtcaagagctagccttgagactgtgctatacacacacagctgagagccaagcccagttctctgggttgtgctttactccacgcatcaataaataattttgaaggcctcaca

SEQ ID NO: 16187 - DNA, 1610 bp, Homo sapiens
  source 1..1610: mol_type = unassigned DNA
agaaagctcttcctcttgtgtgaggcagttgctgtggaagccccataggcaggaggcccccgggcagcacatcctgtctgcttgtgtctgctgcagagttctgtccttgcattggtgcgcctcaggccaggctgcactgctgggacctgggccatgtctccccaccccaccgccctcctgggcctagtgctctgcctggcccagaccatccacacgcaggaggaagatctgcccagaccctccatctcggctgagccaggcaccgtgatccccctggggagccatgtgactttcgtgtgccggggcccggttggggttcaaacattccgcctggagagggagagtagatccacatacaatgatactgaagatgtgtctcaagctagtccatctgagtcagaggccagattccgcattgactcagtaagtgaaggaaatgccgggccttatcgctgcatctattataagccccctaaatggtctgagcagagtgactacctggagctgctggtgaaagaaacctctggaggcccggactccccggacacagagcccggctcctcagctggacccacgcagaggccgtcggacaacagtcacaatgagcatgcacctgcttcccaaggcctgaaagctgagcatctgtatattctcatcggggtctcagtggtcttcctcttctgtctcctcctcctggtcctcttctgcctccatcgccagaatcagataaagcaggggccccccagaagcaaggacgaggagcagaagccacagcagaggcctgacctggctgttgatgttctagagaggacagcagacaaggccacagtcaatggacttcctgagaaggacagagagacggacacctcggccctggctgcagggagttcccaggaggtgacgtatgctcagctggaccactgggccctcacacagaggacagcccgggctgtgtccccacagtccacaaagcccatggccgagtccatcacgtatgcagccgttgccagacactgaccccatacccacctggcctctgcacctgagggtagaaagtcactctaggaaaagcctgaagcagccatttggaaggcttcctgttggattcctcttcatctagaaagccagccaggcagctgtcctggagacaagagctggagactggaggtttctaaccagcatccagaaggttcgttagccaggtggtcccttctacaatcgagcagctccttggacagactgtttctcagttatttccagagacccagctacagttccctggctgtttctagagacccagctttattcacctgactgtttccagagacccagctaaagtcacctgcctgttctaaaggcccagctacagccaatcagccgatttcctgagcagtgatgccacctccaagcttgtcctaggtgtctgctgtgaacctccagtgaccccagagactttgctgtaattatctgccctgctgaccctaaagaccttcctagaagtcaagagctagccttgagactgtgctatacacacacagctgagagccaagcccagttctctgggttgtgctttactccacgcatcaataaataattttgaaggcctcaca

SEQ ID NO: 16188 - DNA, 2139 bp, Homo sapiens
  source 1..2139: mol_type = unassigned DNA
aagaaacttcctttcccggcgtgcaccgcgaatccctcctcctcttctttacctctctccctcctcctcaggttctctatcgacgagtctggtagctgagcgttgggctgtaggtcgctgtgctgtgtgatcccccagagccatgcccgagatagtggatacctgttcgttggcctctccggcttccgtctgccggaccaagcacctgcacctgcgctgcagcgtcgactttactcgccggacgctgaccgggactgctgctctcacggtccagtctcaggaggacaatctgcgcagcctggttttggatacaaaggaccttacaatagaaaaagtagtgatcaatggacaagaagtcaaatatgctcttggagaaagacaaagttacaagggatcgccaatggaaatctctcttcctatcgctttgagcaaaaatcaagaaattgttatagaaatttcttttgagacctctccaaaatcttctgctctccagtggctcactcctgaacagacttctgggaaggaacacccatatctctttagtcagtgccaggccatccactgcagagcaatccttccttgtcaggacactccttctgtgaaattaacctatactgcagaggtgtctgtccctaaagaactggtggcacttatgagtgctattcgtgatggagaaacacctgacccagaagacccaagcaggaaaatatacaaattcatccaaaaagttccaataccctgctacctgattgctttagttgttggagctttagaaagcaggcaaattggcccaagaactttggtgtggtctgagaaagagcaggtggaaaagtctgcttatgagttttctgagactgaatctatgcttaaaatagcagaagatctgggaggaccgtatgtatggggacagtatgacctattggtcctgccaccatccttcccttatggtggcatggagaatccttgccttacttttgtaactcctactctactggcaggcgacaagtcactctccaatgtcattgcacatgaaatatctcatagctggacagggaatctagtgaccaacaaaacttgggatcacttttggttaaatgagggacatactgtgtacttggaacgccacatttgcggacgattgtttggtgaaaagttcagacattttaatgctctgggaggatggggagaactacagaattcggtaaagacatttggggagacacatcctttcaccaaacttgtggttgatctgacagatatagaccctgatgtagcttattcttcagttccctatgagaagggctttgctttacttttttaccttgaacaactgcttggaggaccagagattttcctaggattcttaaaagcttatgttgagaagttttcctataagagcataactactgatgactggaaggatttcctgtattcctattttaaagataaggttgatgttctcaatcaagttgattggaatgcctggctctactctcctggactgcctcccataaagcccaattatgatatgactctgacaaatgcttgtattgccttaagtcaaagatggattactgccaaagaagatgatttaaattcattcaatgccacagacctgaaggatctctcttctcatcaattgaatgagtttttagcacagacgctccagagggcacctcttccattggggcacataaagcgaatgcaagaggtgtacaacttcaatgccattaacaattctgaaatacgattcagatggctgcggctctgcattcaatccaagtgggaggacgcaattcctttggcgctaaagatggcaactgaacaaggaagaatgaagtttacccggcccttattcaaggatcttgctgcctttgacaaatcccatgatcaagctgtccgaacctaccaagagcacaaagcaagcatgcatcccgtgactgcaatgctggtggggaaagacttaaaagtggattaaagacctgcgtattgatgattttagagatttctcttttttaaatggaattcgtaaagaaatataaaacttcagctcacaattaaaactgtctttttagttttggctttttattgttttgttggtgattttactgaaataaagttgagctacttcttcttata

SEQ ID NO: 16189 - DNA, 1908 bp, Homo sapiens
  source 1..1908: mol_type = unassigned DNA
attctcctgcctcagcctcccgagtagctgggactacaggcgcatgtttgtcttttaaagcaacaagggaagagggcaagaggatgcatgggcttgggagtttattttctctcctcctgtctacacctcctctaatctgtctcccatgctgccacagagaaatctttctaaaagacaagtaccgaccatgcatatcccagttaagactcgtcgacttcttgcagccttaaaggttttggatacaaaggaccttacaatagaaaaagtagtgatcaatggacaagaagtcaaatatgctcttggagaaagacaaagttacaagggatcgccaatggaaatctctcttcctatcgctttgagcaaaaatcaagaaattgttatagaaatttcttttgagacctctccaaaatcttctgctctccagtggctcactcctgaacagacttctgggaaggaacacccatatctctttagtcagtgccaggccatccactgcagagcaatccttccttgtcaggacactccttctgtgaaattaacctatactgcagaggtgtctgtccctaaagaactggtggcacttatgagtgctattcgtgatggagaaacacctgacccagaagacccaagcaggaaaatatacaaattcatccaaaaagttccaataccctgctacctgattgctttagttgttggagctttagaaagcaggcaaattggcccaagaactttggtgtggtctgagaaagagcaggtggaaaagtctgcttatgagttttctgagactgaatctatgcttaaaatagcagaagatctgggaggaccgtatgtatggggacagtatgacctattggtcctgccaccatccttcccttatggtggcatggagaatccttgccttacttttgtaactcctactctactggcaggcgacaagtcactctccaatgtcattgcacatgaaatatctcatagctggacagggaatctagtgaccaacaaaacttgggatcacttttggttaaatgagggacatactgtgtacttggaacgccacatttgcggacgattgtttggtgaaaagttcagacattttaatgctctgggaggatggggagaactacagaattcggtaaagacatttggggagacacatcctttcaccaaacttgtggttgatctgacagatatagaccctgatgtagcttattcttcagttccctatgagaagggctttgctttacttttttaccttgaacaactgcttggaggaccagagattttcctaggattcttaaaagcttatgttgagaagttttcctataagagcataactactgatgactggaaggatttcctgtattcctattttaaagataaggttgatgttctcaatcaagttgattggaatgcctggctctactctcctggactgcctcccataaagcccaattatgatatgactctgacaaatgcttgtattgccttaagtcaaagatggattactgccaaagaagatgatttaaattcattcaatgccacagacctgaaggatctctcttctcatcaattgaatgagtttttagcacagacgctccagaggatggctgcggctctgcattcaatccaagtgggaggacgcaattcctttggcgctaaagatggcaactgaacaaggaagaatgaagtttacccggcccttattcaaggatcttgctgcctttgacaaatcccatgatcaagctgtccgaacctaccaagagcacaaagcaagcatgcatcccgtgactgcaatgctggtggggaaagacttaaaagtggattaaagacctgcgtattgatgattttagagatttctcttttttaaatggaattcgtaaagaaatataaaacttcagctcacaatta

SEQ ID NO: 16190 - DNA, 2025 bp, Homo sapiens
  source 1..2025: mol_type = unassigned DNA
atgtttgtcttttaaagcaacaagggaagagggcaagaggatgcatgggcttgggagtttattttctctcctcctgtctacacctcctctaatctgtctcccatgctgccacagagaaatctttctaaaagacaagtaccgaccatgcatatcccagttaagactcgtcgacttcttgcagccttaaaggttttggatacaaaggaccttacaatagaaaaagtagtgatcaatggacaagaagtcaaatatgctcttggagaaagacaaagttacaagggatcgccaatggaaatctctcttcctatcgctttgagcaaaaatcaagaaattgttatagaaatttcttttgagacctctccaaaatcttctgctctccagtggctcactcctgaacagacttctgggaaggaacacccatatctctttagtcagtgccaggccatccactgcagagcaatccttccttgtcaggacactccttctgtgaaattaacctatactgcagaggtgtctgtccctaaagaactggtggcacttatgagtgctattcgtgatggagaaacacctgacccagaagacccaagcaggaaaatatacaaattcatccaaaaagttccaataccctgctacctgattgctttagttgttggagctttagaaagcaggcaaattggcccaagaactttggtgtggtctgagaaagagcaggtggaaaagtctgcttatgagttttctgagactgaatctatgcttaaaatagcagaagatctgggaggaccgtatgtatggggacagtatgacctattggtcctgccaccatccttcccttatggtggcatggagaatccttgccttacttttgtaactcctactctactggcaggcgacaagtcactctccaatgtcattgcacatgaaatatctcatagctggacagggaatctagtgaccaacaaaacttgggatcacttttggttaaatgagggacatactgtgtacttggaacgccacatttgcggacgattgtttggtgaaaagttcagacattttaatgctctgggaggatggggagaactacagaattcggtaaagacatttggggagacacatcctttcaccaaacttgtggttgatctgacagatatagaccctgatgtagcttattcttcagttccctatgagaagggctttgctttacttttttaccttgaacaactgcttggaggaccagagattttcctaggattcttaaaagcttatgttgagaagttttcctataagagcataactactgatgactggaaggatttcctgtattcctattttaaagataaggttgatgttctcaatcaagttgattggaatgcctggctctactctcctggactgcctcccataaagcccaattatgatatgactctgacaaatgcttgtattgccttaagtcaaagatggattactgccaaagaagatgatttaaattcattcaatgccacagacctgaaggatctctcttctcatcaattgaatgagtttttagcacagacgctccagagggcacctcttccattggggcacataaagcgaatgcaagaggtgtacaacttcaatgccattaacaattctgaaatacgattcagatggctgcggctctgcattcaatccaagtgggaggacgcaattcctttggcgctaaagatggcaactgaacaaggaagaatgaagtttacccggcccttattcaaggatcttgctgcctttgacaaatcccatgatcaagctgtccgaacctaccaagagcacaaagcaagcatgcatcccgtgactgcaatgctggtggggaaagacttaaaagtggattaaagacctgcgtattgatgattttagagatttctcttttttaaatggaattcgtaaagaaatataaaacttcagctcacaattaaaactgtctttttagttttggctttttattgttttgttggtgattttactgaaataaagttgagctacttcttctta

SEQ ID NO: 16191 - DNA, 1616 bp, Homo sapiens
  source 1..1616: mol_type = unassigned DNA
ttcagttctagcgtcaacccggtgctctacgtcttcaccgctggagatctgctgccccgggcaggtccccgtttcctcacgcggctcttcgaaggctctggggaggcccgagggggcggccgctctagggaagggaccatggagctccgaactacccctcagctgaaagtggtggggcagggccgcggcaatggagacccggggggtgggatggagaaggacggtccggaatgggacctttgacagcagaccctacaacctgctgcccttccctgtccctttccaccccccacccaccctccagaggtcctcccgacggccatgaacactacatcttctgcagcacccccctcactaggtgtagagttcatctctctgctggctatcatcctgctgtcagtggcgctggctgtggggcttcccggcaacagctttgtggtgtggagtatcctgaaaaggatgcagaagcgctctgtcactgccctgatggtgctgaacctggccctggccgacctggccgtattgctcactgctccctttttccttcacttcctggcccaaggcacctggagttttggactggctggttgccgcctgtgtcactatgtctgcggagtcagcatgtacgccagcgtcctgcttatcacggccatgagtctagaccgctcactggcggtggcccgcccctttgtgtcccagaagctacgcaccaaggcgatggcccggcgggtgctggcaggcatctgggtgttgtcctttctgctggccacacccgtcctcgcgtaccgcacagtagtgccctggaaaacgaacatgagcctgtgcttcccgcggtaccccagcgaagggcaccgggccttccatctaatcttcgaggctgtcacgggcttcctgctgcccttcctggctgtggtggccagctactcggacatagggcgtcggctacaggcccggcgcttccgccgcagccgccgcaccggccgcctggtggtgctcatcatcctgaccttcgccgccttctggctgccctaccacgtggtgaacctggctgaggcgggccgcgcgctggccggccaggccgccgggttagggctcgtggggaagcggctgagcctggcccgcaacgtgctcatcgcactcgccttcctgagcagcagcgtgaaccccgtgctgtacgcgtgcgccggcggcggcctgctgcgctcggcgggcgtgggcttcgtcgccaagctgctggagggcacgggctccgaggcgtccagcacgcgccgcgggggcagcctgggccagaccgctaggagcggccccgccgctctggagcccggcccttccgagagcctcactgcctccagccctctcaagttaaacgaactgaactaggcctggtggaaggaggcgcactttcctcctggcagaatgctagctctgagccagttcagtacctggaggaggagcaggggcgtggagggcgtggagggcgtgggagcgtgggaggcgggagtggagtggaagaagagggagaggtggagcaaagtgagggccgagtgagagcgtgctccagcctggctcccacaggcagctttaaccattaaaactgaagtctgaaatttggtcaa

SEQ ID NO: 16192 - DNA, 1627 bp, Homo sapiens
  source 1..1627: mol_type = unassigned DNA
ctctctcactgctccttcctggtctcttctcatctggccccacctctaaggagtcctcctgccttctgggttgccctggaaaacagactatcccccctcctagtgaagggagtgggtaggggtttcagccccaccctcaggaagatgcgtcttccctgtcctctgctctgtggtacttcctctctggctgatttagcaaacagcacctagacctggggccaggcctttggcagtgggacagatccagggataggctacaccaccctgccctgaccctgggattggcatcagcttccaaccagttcctgccaaagcttgtcctcccgacggccatgaacactacatcttctgcagcacccccctcactaggtgtagagttcatctctctgctggctatcatcctgctgtcagtggcgctggctgtggggcttcccggcaacagctttgtggtgtggagtatcctgaaaaggatgcagaagcgctctgtcactgccctgatggtgctgaacctggccctggccgacctggccgtattgctcactgctccctttttccttcacttcctggcccaaggcacctggagttttggactggctggttgccgcctgtgtcactatgtctgcggagtcagcatgtacgccagcgtcctgcttatcacggccatgagtctagaccgctcactggcggtggcccgcccctttgtgtcccagaagctacgcaccaaggcgatggcccggcgggtgctggcaggcatctgggtgttgtcctttctgctggccacacccgtcctcgcgtaccgcacagtagtgccctggaaaacgaacatgagcctgtgcttcccgcggtaccccagcgaagggcaccgggccttccatctaatcttcgaggctgtcacgggcttcctgctgcccttcctggctgtggtggccagctactcggacatagggcgtcggctacaggcccggcgcttccgccgcagccgccgcaccggccgcctggtggtgctcatcatcctgaccttcgccgccttctggctgccctaccacgtggtgaacctggctgaggcgggccgcgcgctggccggccaggccgccgggttagggctcgtggggaagcggctgagcctggcccgcaacgtgctcatcgcactcgccttcctgagcagcagcgtgaaccccgtgctgtacgcgtgcgccggcggcggcctgctgcgctcggcgggcgtgggcttcgtcgccaagctgctggagggcacgggctccgaggcgtccagcacgcgccgcgggggcagcctgggccagaccgctaggagcggccccgccgctctggagcccggcccttccgagagcctcactgcctccagccctctcaagttaaacgaactgaactaggcctggtggaaggaggcgcactttcctcctggcagaatgctagctctgagccagttcagtacctggaggaggagcaggggcgtggagggcgtggagggcgtgggagcgtgggaggcgggagtggagtggaagaagagggagaggtggagcaaagtgagggccgagtgagagcgtgctccagcctggctcccacaggcagctttaaccattaaaactgaagtctgaaatttggtcaa

SEQ ID NO: 16193 - DNA, 4110 bp, Homo sapiens
  source 1..4110: mol_type = unassigned DNA
gccattctctcacatcccgtgcggtcaggaagcccttcctgaactctgacttcagttcttgctgcggtttctgcccatttttttcatatcctctgacagctgcgaggtcatctctgctctggcttttctccaagcagaacaagtgggggctctggaaaggttaagggacctcagtggccaccattatactttgcatctttcctgagaagtgagagttgaaagggaagcaggaaggcccatggtcagattgaaggaaggactttttagtttcttttttttttttttttttttttgagatggagtctcgctctgtcattcaggctggagtgcagtggtgcgatctcagctcactgcagcctccacttcctgggttcacatgattctcctgcctcagcctcccaagtagctgagactacaggcacatgccactacacccagctatcttttgtatttttagtagagacggggtttcaccatgttggccaggctggtctcaaactgctaacatcaagtgatctgctcccctcagcctcccaaagtgctgggattaccggtatgaaccaccacaacctgccaggaatttttagtttttagcttttgcaggagacttcaaggaaaggagacattcctctgtccaggaaacgggtaaggggaccatttctgcattgctggtttcccctcttggcagggtgggcatgaggcatcactgttcctgctccctcactcctgctcctcatgctcagcctgccagctcggcctcaactttgtgtgtctaaagtggaactgaatagtaggctgtgagaagataggaaagaggtagtgccaatctccttgcccagatcataaatccagactcagcagggtaaccacatgggcaagcacaaggtaggtgcttggggaaaggggaagtaattggcattctgtgtgataccaaggagaccatttggattttggcttctaccaaagagaatggagaattggttgacctaaatggaaccagtccctttaagtaaggggaggaaagggggtgctggaagatggccctcttcccaccacctagatcatagcttgaactgaagccaaggacagagtgctgcccccttcggcatttactgatgtgccctctttaaatcatgatgttatctaacccaaacccagacccaggacctagtcacagctccaacctacacttcctattaatcttaaaacaaagcaaaacaaaacaaaaagatatcagcattgtagcctccaatctgagcccatttcccttctctggctaccatacctccttctcctatatgataccattcactactttgttcaattatccagtctagacctgcatcttgaggccacacccagccttctcactccccacacccctctttcctctctcactgctccttcctggtctcttctcatctggccccacctctaaggagtcctcctgccttctgggttgccctggaaaacagactatcccccctcctagtgaagggagtgggtaggggtttcagccccaccctcaggaagatgcgtcttccctgtcctctgctctgtggtacttcctctctggctgatttagcaaacagcacctagacctggggccaggcctttggcagtgggacagatccagggataggctacaccaccctgccctgaccctgggattggcatcagcttccaaccagttcctgccaaagcttgtaagtcctcccgacggccatgaacactacatcttctgcagcacccccctcactaggtgtagagttcatctctctgctggctatcatcctgctgtcagtggcgctggctgtggggcttcccggcaacagctttgtggtgtggagtatcctgaaaaggatgcagaagcgctctgtcactgccctgatggtgctgaacctggccctggccgacctggccgtattgctcactgctccctttttccttcacttcctggcccaaggcacctggagttttggactggctggttgccgcctgtgtcactatgtctgcggagtcagcatgtacgccagcgtcctgcttatcacggccatgagtctagaccgctcactggcggtggcccgcccctttgtgtcccagaagctacgcaccaaggcgatggcccggcgggtgctggcaggcatctgggtgttgtcctttctgctggccacacccgtcctcgcgtaccgcacagtagtgccctggaaaacgaacatgagcctgtgcttcccgcggtaccccagcgaagggcaccgggccttccatctaatcttcgaggctgtcacgggcttcctgctgcccttcctggctgtggtggccagctactcggacatagggcgtcggctacaggcccggcgcttccgccgcagccgccgcaccggccgcctggtggtgctcatcatcctgaccttcgccgccttctggctgccctaccacgtggtgaacctggctgaggcgggccgcgcgctggccggccaggccgccgggttagggctcgtggggaagcggctgagcctggcccgcaacgtgctcatcgcactcgccttcctgagcagcagcgtgaaccccgtgctgtacgcgtgcgccggcggcggcctgctgcgctcggcgggcgtgggcttcgtcgccaagctgctggagggcacgggctccgaggcgtccagcacgcgccgcgggggcagcctgggccagaccgctaggagcggccccgccgctctggagcccggcccttccgagagcctcactgcctccagccctctcaagttaaacgaactgaactaggcctggtggaaggaggcgcactttcctcctggcagaatgctagctctgagccagttcagtacctggaggaggagcaggggcgtggagggcgtggagggcgtgggagcgtgggaggcgggagtggagtggaagaagagggagaggtggagcaaagtgagggccgagtgagagcgtgctccagcctggctcccacaggcagctttaaccattaaaactgaagtctgaaatttggtcaaccttgtgagtggggtacatgtgctgtgggtatcggggtgctcgtgggcgccctggtggggcccctctcggtagttgagagtcacgtcctttagttccccatgatttacaattttggaagggacacaaagaaacatagacttcccccatcccagatgattccgagtacatagtctgcagataatacttagcaaaacgcagtctacagactcctaaagcagcttgtctaggaagaccacccatgtgggcttatcactccaggttctgtgacccgggaccttctgagaaaacagcactgctgtgaaatatcttccttgaagcctgtgataagtctccttgttagaatgactccaacttcctgccaataatctttgtcctctccataggagatgttctaggggatgccttccttccctccatttcacaaagaggccagacttgaggactaagtcattagatcttatcccttagaattttgcatatcagcatctgctaacctccacaacacaccctggcacagggtggggctgagggccccaggaaacaaagattcccaaaagtgagagggatgagtcattatttcctagagatgactgttgttttagagaaccttggtccaactctgttctgacaaggttttaggaagatggcaacaacagtggcagcagtgtactttttggatctttctcataaaaaaacaaaagagcaagtaagagagggaaaccaaatatccacatgcaacatccgcaacaaatctagtatgtcaaggtttgacatactcccatggaccccaaagtatgagccagtgagaatgagtcatcaatatctcaagacccatataccagcatctgtgcagaaggatgcagaaggaagcaaagggatgttggatggacctaagaagaggagatccccaagctgtctacagatccttactggaaggtatggtgcaccaatttgagaacagcagctgaaactgggagggacctaacggagtatttcccagtcctctcgcccattctgtatggtgagcacataataggtacttatttagtgtttgtcgaattaataaagttcaaatgacatttccctgga

SEQ ID NO: 16194 - DNA, 431 bp, Homo sapiens
  source 1..431: mol_type = unassigned DNA
gggcggagccggccaggcggcgcgagcgggaactacggccttggccttcttcagttctagcgtcaacccggtgctctacgtcttcaccgctggagatctgctgccccgggtcctcccgacggccatgaacactacatcttctgcagcacccccctcactaggtgtagagttcatctctctgctggctatcatcctgctgtcagtggcgctggctgtggggcttcccggcaacagctttgtggtgtggagtatcctgaaaaggatgcagaagcgctctgtcactgccctgatggtgctgaacctggccctggccgacctggccgtattgctcactgctccctttttccttcacttcctggcccaaggcacctggagttttggactggctggttgccgcctgtgtcactatgtctgcggagtcagcatgtacg

SEQ ID NO: 16195 - DNA, 710 bp, Homo sapiens
  source 1..710: mol_type = unassigned DNA
gcagcagtgtggaggtccaacgaaggagctccctgaatggcagagacaagaggaaatcagatgatttggaaaacttgggaggaagccatcaagctgggagatgaggactttccacaagcaagagctaactaggggcacaggacaggagtaggcacctcgcctactgctgcttaacctttcagcttctccaggcccccaatcctgcttgctcccagcttggcccagaaggatgtcggtctgctaccgtcccccagggaacgagacactgctgagctggaagacttcgcgggccacaggcacagccttcctgctgctggcggcgctgctggggctgcctggcaacggcttcgtggtgtggagcttggcgggctggcggcctgcacgggggcgaccgctggcggccacgcttgtgctgcacctggcgctggccgacggcgcggtgctgctgctcacgccgctctttgtggccttcctgacccggcaggcctggccgctgggccaggcgggctgcaaggcggtgtactacgtgtgcgcgctcagcatgtacgccagcgtgctgctcaccggcctgctcagcctgcagcgctgcctcgcagtcacccgccccttcctggcgcctcggctgcgcagcccggccctggcccgccgcctgctgctggcggtctggctggccgccctgttgctcgccgtcccggccgccgtctaccgcc

SEQ ID NO: 16196 - DNA, 3092 bp, Homo sapiens
  source 1..3092: mol_type = unassigned DNA
aaactggccctggccctgaaccaaataccttgaaccctcgtaaactccataccctgacccccttgttttggatatacccaggtagaacaactctctctcactgtctgttgtgaggatacgctgtagcccactcattaagtacattctcctaataaatgctttggactgatcaccctgccagtcttttgtcttgggcaatctatacttttctcagaggttcccaaggcctactgaagggacttaacatactcttaatggctttcctctctcttgttttaccttatgccctcacttcctgagttaacctcccaaatacaggatcacctgtacccaagcccttagctcaagaatacaggatcacctgtacccaagcccttagctcaagctctgctttggaagaacccaaactaagacagtgctcctggtgccctccccaagcaacctcaagttctggctgttacttgagcagaggcctttcttttcccttcccccagctctatccatctgccaggcccccctcaaatctcttcatttccaagttttgcttgacttttccaagaggagagggctgcttcttagtatgtccctactcatcctttcctttcttgtcttgtatcctggtgcagcctggtaatggggcctcttcatggttgtgtgtcatgactccctaaccattatgcctccatgcatcccctgttcctcctggaacctagcaccatgccttacatggaaaagctgtcattgacagcccggtgagagccctgagggtggagtgactggggcagggcctgaggcaagaggtgggaggaggtaggaggccaggggctcagccggaccaggagactggaaacaggcaaggataaggcaggtgggggactgagttgtttgggtcacctctgcaggccagagagaccaggcaacatacacactgcagaaggtgggctgggaggattggggccagagctgggggagggatgagaacagaagcaggaccaggattcagcagagtcctcctatttccttccaccaccagggaatcttactgccccacttcagcttgtgctgtttcctggcaaggcaggctctcacatgcctggacgcctgggtgcgttggtgatgggaaggagcagggtgagggaggggccccaggagaggcccaggatgagcctcatcttgtccctccccattcttgtcttaccctctgcaaatgtgataggcacaggacaggagtaggcacctcgcctactgctgcttaacctttcagcttctccaggcccccaatcctgcttgctcccagcttggtaagtagatctgtgcacgtccctttacaccccaccatccagttttgcccagatgtgctagaatggggctggacaaagaaggaggggccagactagaggagtggtggtagagatagtgacagcctggggtgatgactttatgcctgtttaccactgagctctgggaaggaggccaggagtggggcaggtcaactgactgggagcaggggatctgggttccaagaaggagttgtgtttgaggtggggtctgggtcctcgtggaagtcaggactcccaggcagaaaagaggcaggctgcagggaagtaaggaggaggcatggcaccttctcatcgggcatcacaggtggggttttgccccacccctgaacgccctctgtggcgccttccacccacctgtaggcccagaaggatgtcggtctgctaccgtcccccagggaacgagacactgctgagctggaagacttcgcgggccacaggcacagccttcctgctgctggcggcgctgctggggctgcctggcaacggcttcgtggtgtggagcttggcgggctggcggcctgcacgggggcgaccgctggcggccacgcttgtgctgcacctggcgctggccgacggcgcggtgctgctgctcacgccgctctttgtggccttcctgacccggcaggcctggccgctgggccaggcgggctgcaaggcggtgtactacgtgtgcgcgctcagcatgtacgccagcgtgctgctcaccggcctgctcagcctgcagcgctgcctcgcagtcacccgccccttcctggcgcctcggctgcgcagcccggccctggcccgccgcctgctgctggcggtctggctggccgccctgttgctcgccgtcccggccgccgtctaccgccacctgtggagggaccgcgtatgccagctgtgccacccgtcgccggtccacgccgccgcccacctgagcctggagactctgaccgctttcgtgcttcctttcgggctgatgctcggctgctacagcgtgacgctggcacggctgcggggcgcccgctggggctccgggcggcacggggcgcgggtgggccggctggtgagcgccatcgtgcttgccttcggcttgctctgggccccctaccacgcagtcaaccttctgcaggcggtcgcagcgctggctccaccggaaggggccttggcgaagctgggcggagccggccaggcggcgcgagcgggaactacggccttggccttcttcagttctagcgtcaacccggtgctctacgtcttcaccgctggagatctgctgccccgggcaggtccccgtttcctcacgcggctcttcgaaggctctggggaggcccgagggggcggccgctctagggaagggaccatggagctccgaactacccctcagctgaaagtggtggggcagggccgcggcaatggagacccggggggtgggatggagaaggacggtccggaatgggacctttgacagcagaccctacaacctgctgcccttccctgtccctttccaccccccacccaccctccagaggtcagtgttctgggacatttggggacccttctttgactagagtttggatctggctgggtaggattactatacacttggggcaggcccaggctcctccaaactgagggattatgagggtggtgatggtccctgttaaggactattgtgtgcttgcaagttggcatgtacccatgtgccagcattgcttacttgttgccaatagctgttattgtgaaatacactgggaagccattagatgatga

SEQ ID NO: 16197 - DNA, 1108 bp, Homo sapiens
  source 1..1108: mol_type = unassigned DNA
gcacaggacaggagtaggcacctcgcctactgctgcttaacctttcagcttctccaggcccccaatcctgcttgctcccagcttggtggggttttgccccacccctgaacgccctctgtggcgccttccacccacctgtaggcccagaaggatgtcggtctgctaccgtcccccagggaacgagacactgctgagctggaagacttcgcgggccacaggcacagccttcctgctgctggcggcgctgctggggctgcctggcaacggcttcgtggtgtggagcttggcgggctggcggcctgcacgggggcgaccgctggcggccacgcttgtgctgcacctggcgctggccgacggcgcggtgctgctgctcacgccgctctttgtggccttcctgacccggcaggcctggccgctgggccaggcgggctgcaaggcggtgtactacgtgtgcgcgctcagcatgtacgccagcgtgctgctcaccggcctgctcagcctgcagcgctgcctcgcagtcacccgccccttcctggcgcctcggctgcgcagcccggccctggcccgccgcctgctgctggcggtctggctggccgccctgttgctcgccgtcccggccgccgtctaccgccacctgtggagggaccgcgtatgccagctgtgccacccgtcgccggtccacgccgccgcccacctgagcctggagactctgaccgctttcgtgcttcctttcgggctgatgctcggctgctacagcgtgacgctggcacggctgcggggcgcccgctggggctccgggcggcacggggcgcgggtgggccggctggtgagcgccatcgtgcttgccttcggcttgctctgggccccctaccacgcagtcaaccttctgcaggcggtcgcagcgctggctccaccggaaggggccttggcgaagctgggcggagccggccaggcggcgcgagcgggaactacggccttggccttcttcagttctagcgtcaacccggtgctctacgtcttcaccgctggagatctgctgccccgggcaggtccccgtttcctcacgcggctcttcgaaggctctggggaggcccgagggggcggccgc

SEQ ID NO: 16198 - DNA, 1515 bp, Homo sapiens
  source 1..1515: mol_type = unassigned DNA
attcttgtcttaccctctgcaaatgtgataggcacaggacaggagtaggcacctcgcctactgctgcttaacctttcagcttctccaggcccccaatcctgcttgctcccagcttggcccagaaggatgtcggtctgctaccgtcccccagggaacgagacactgctgagctggaagacttcgcgggccacaggcacagccttcctgctgctggcggcgctgctggggctgcctggcaacggcttcgtggtgtggagcttggcgggctggcggcctgcacgggggcgaccgctggcggccacgcttgtgctgcacctggcgctggccgacggcgcggtgctgctgctcacgccgctctttgtggccttcctgacccggcaggcctggccgctgggccaggcgggctgcaaggcggtgtactacgtgtgcgcgctcagcatgtacgccagcgtgctgctcaccggcctgctcagcctgcagcgctgcctcgcagtcacccgccccttcctggcgcctcggctgcgcagcccggccctggcccgccgcctgctgctggcggtctggctggccgccctgttgctcgccgtcccggccgccgtctaccgccacctgtggagggaccgcgtatgccagctgtgccacccgtcgccggtccacgccgccgcccacctgagcctggagactctgaccgctttcgtgcttcctttcgggctgatgctcggctgctacagcgtgacgctggcacggctgcggggcgcccgctggggctccgggcggcacggggcgcgggtgggccggctggtgagcgccatcgtgcttgccttcggcttgctctgggccccctaccacgcagtcaaccttctgcaggcggtcgcagcgctggctccaccggaaggggccttggcgaagctgggcggagccggccaggcggcgcgagcgggaactacggccttggccttcttcagttctagcgtcaacccggtgctctacgtcttcaccgctggagatctgctgccccgggcaggtccccgtttcctcacgcggctcttcgaaggctctggggaggcccgagggggcggccgctctagggaagggaccatggagctccgaactacccctcagctgaaagtggtggggcagggccgcggcaatggagacccggggggtgggatggagaaggacggtccggaatgggacctttgacagcagaccctacaacctgctgcccttccctgtccctttccaccccccacccaccctccagaggtcagtgttctgggacatttggggacccttctttgactagagtttggatctggctgggtaggattactatacacttggggcaggcccaggctcctccaaactgagggattatgagggtggtgatggtccctgttaaggactattgtgtgcttgcaagttggcatgtacccatgtgccagcattgcttacttgttgccaatagctgttattgtgaaatacactgggaagccattagatgatgacttaagt

SEQ ID NO: 16199 - DNA, 1560 bp, Homo sapiens
  source 1..1560: mol_type = unassigned DNA
accctctgcaaatgtgataggcacaggacaggagtaggcacctcgcctactgctgcttaacctttcagcttctccaggcccccaatcctgcttgctcccagcttggtggggttttgccccacccctgaacgccctctgtggcgccttccacccacctgtaggcccagaaggatgtcggtctgctaccgtcccccagggaacgagacactgctgagctggaagacttcgcgggccacaggcacagccttcctgctgctggcggcgctgctggggctgcctggcaacggcttcgtggtgtggagcttggcgggctggcggcctgcacgggggcgaccgctggcggccacgcttgtgctgcacctggcgctggccgacggcgcggtgctgctgctcacgccgctctttgtggccttcctgacccggcaggcctggccgctgggccaggcgggctgcaaggcggtgtactacgtgtgcgcgctcagcatgtacgccagcgtgctgctcaccggcctgctcagcctgcagcgctgcctcgcagtcacccgccccttcctggcgcctcggctgcgcagcccggccctggcccgccgcctgctgctggcggtctggctggccgccctgttgctcgccgtcccggccgccgtctaccgccacctgtggagggaccgcgtatgccagctgtgccacccgtcgccggtccacgccgccgcccacctgagcctggagactctgaccgctttcgtgcttcctttcgggctgatgctcggctgctacagcgtgacgctggcacggctgcggggcgcccgctggggctccgggcggcacggggcgcgggtgggccggctggtgagcgccatcgtgcttgccttcggcttgctctgggccccctaccacgcagtcaaccttctgcaggcggtcgcagcgctggctccaccggaaggggccttggcgaagctgggcggagccggccaggcggcgcgagcgggaactacggccttggccttcttcagttctagcgtcaacccggtgctctacgtcttcaccgctggagatctgctgccccgggcaggtccccgtttcctcacgcggctcttcgaaggctctggggaggcccgagggggcggccgctctagggaagggaccatggagctccgaactacccctcagctgaaagtggtggggcagggccgcggcaatggagacccggggggtgggatggagaaggacggtccggaatgggacctttgacagcagaccctacaacctgctgcccttccctgtccctttccaccccccacccaccctccagaggtcagtgttctgggacatttggggacccttctttgactagagtttggatctggctgggtaggattactatacacttggggcaggcccaggctcctccaaactgagggattatgagggtggtgatggtccctgttaaggactattgtgtgcttgcaagttggcatgtacccatgtgccagcattgcttacttgttgccaatagctgttattgtgaaatacactgggaagccattagatgatgacttaagt

SEQ ID NO: 16200 - DNA, 666 bp, Homo sapiens
  source 1..666: mol_type = unassigned DNA
cttcctctcctgggccgtcctctgagcagcagacggggctaagcgttccccagctcgccttcacacacagcccgtgccaccacaccgacggtaccatgaaggacgaggtagctctactggctgctgtcaccctcctgggagtcctgctgcaagcctacttctccctgcaggtgatctcggcgcgcagggccttccgcgtgtcgccgccgctcaccaccggcccacccgagttcgagcgcgtctaccgagcccaggtgaactgcagcgagtacttcccgctgttcctcgccacgctctgggtcgccggcatcttctttcatgaaggggcggcggccctgtgcggcctggtctacctgttcgcgcgcctccgctacttccagggctacgcgcgctccgcgcagctcaggctggcaccgctgtacgcgagcgcgcgcgccctctggctgctggtggcgctggctgcgctcggcctgctcgcccacttcctcccggccgcgctgcgcgccgcgctcctcggacggctccggacgctgctgccgtgggcctgagaccaaggcccccgggccgacggagccgggaaagaagagccggagcctccagctgccccggggaggggcgctcgcttccgcatcctagtctctatcattaaagttctagtgaccgaga

SEQ ID NO: 16201 - DNA, 1833 bp, Homo sapiens
  source 1..1833: mol_type = unassigned DNA
catccagttcctttgcggtcctcttcttcagcacatgccaaagctgttcctcacggcctgtgagacaagagcatcttggatgtaggacaatggaagagttagatgccttattggaggaactggaacgctccacccttcaggacagtgatgaatattccaacccagctcctcttcccctggatcagcattccagaaaggagactaaccttgatgagacttcggagatcctttctattcaggataacacaagtcccttgccggcgcagctcgtgtatactaccaatatccaggagctcaatgtctacagtgaagcccaagagccaaaggaatcaccaccaccttctaaaacgtcagcagctgctcagttggatgagctcatggctcacctgactgagatgcaggccaaggttgcagtgagagcagatgctggcaagaagcacttaccagacaagcaggatcacaaggcctccctggactcaatgcttgggggtctggagcaggaattgcaggaccttggcattgccacagtgcccaagggccattgtgcatcctgccagaaaccgattgctgggaaggtgatccatgctctagggcaatcatggcatcctgagcattttgtctgtactcattgcaaagaagagattggctccagtcccttctttgagcggagtggcttggcctactgccccaacgactaccaccaacttttttctccacgctgtgcttactgcgctgctcccatcctggataaagtgctgacagcaatgaaccagacctggcacccagagcacttcttctgctctcactgcggagaggtgtttggtgcagaaggctttcatgagaaggacaagaagccatattgccgaaaggatttcttagccatgttctcacccaagtgtggtggctgcaatcgcccagtgttggaaaactacctttcagccatggacactgtctggcacccagagtgctttgtttgtggggactgcttcaccagtttttctactggctccttctttgaactggatggacgtccattctgtgagctccattaccatcaccgccggggaacgctctgccatgggtgtgggcagcccatcactggccgttgtatcagtgccatggggtacaagttccatcctgagcactttgtgtgtgctttctgcctgacacagttgtcgaagggcattttcagggagcagaatgacaagacctattgtcaaccttgcttcaataagctcttcccactgtaatgccaactgatccatagcctcttcagattccttataaaatttaaaccaagagaggagaggaaagggtaaattttctgttactgaccttctgcttaatagtcttatagaaaaaggaaaggtgatgagcaaataaaggaacttctagactttacatgactaggctgataatcttattttttaggcttctatacagttaattctataaattctctttctccctctcttctccaatcaagcacttggagttagatctaggtccttctatctcgtccctctacagatgtattttccacttgcataattcatgccaacactggttttcttaggtttctccattttcacctctagtgatggccctactcatatcttctctaatttggtcctgatacttgtttcttttcacgttttcccatttccctgtggctcactgtcttacaatcactgctgtggaatcatgataccacttttagctctttgcatcttccttcagtgtatttttgtttttcaagaggaagtagattttaactggacaactttgagtactgacatcattgataaataaactggcttgtggtttcaataa

SEQ ID NO: 16202 - DNA, 1879 bp, Homo sapiens
  source 1..1879: mol_type = unassigned DNA
actttttcttactttttatctgggcgttggcgtacctttctcggggtgtctgcgtaactgcccagacttgccttggtttggtcagatgacacctcctctgggactggctagccagcgttcatgtctacattattgatctcgtcttccgatgccttattggaggaactggaacgctccacccttcaggacagtgatgaatattccaacccagctcctcttcccctggatcagcattccagaaaggagactaaccttgatgagacttcggagatcctttctattcaggataacacaagtcccttgccggcgcagctcgtgtatactaccaatatccaggagctcaatgtctacagtgaagcccaagagccaaaggaatcaccaccaccttctaaaacgtcagcagctgctcagttggatgagctcatggctcacctgactgagatgcaggccaaggttgcagtgagagcagatgctggcaagaagcacttaccagacaagcaggatcacaaggcctccctggactcaatgcttgggggtctggagcaggaattgcaggaccttggcattgccacagtgcccaagggccattgtgcatcctgccagaaaccgattgctgggaaggtgatccatgctctagggcaatcatggcatcctgagcattttgtctgtactcattgcaaagaagagattggctccagtcccttctttgagcggagtggcttggcctactgccccaacgactaccaccaacttttttctccacgctgtgcttactgcgctgctcccatcctggataaagtgctgacagcaatgaaccagacctggcacccagagcacttcttctgctctcactgcggagaggtgtttggtgcagaaggctttcatgagaaggacaagaagccatattgccgaaaggatttcttagccatgttctcacccaagtgtggtggctgcaatcgcccagtgttggaaaactacctttcagccatggacactgtctggcacccagagtgctttgtttgtggggactgcttcaccagtttttctactggctccttctttgaactggatggacgtccattctgtgagctccattaccatcaccgccggggaacgctctgccatgggtgtgggcagcccatcactggccgttgtatcagtgccatggggtacaagttccatcctgagcactttgtgtgtgctttctgcctgacacagttgtcgaagggcattttcagggagcagaatgacaagacctattgtcaaccttgcttcaataagctcttcccactgtaatgccaactgatccatagcctcttcagattccttataaaatttaaaccaagagaggagaggaaagggtaaattttctgttactgaccttctgcttaatagtcttatagaaaaaggaaaggtgatgagcaaataaaggaacttctagactttacatgactaggctgataatcttattttttaggcttctatacagttaattctataaattctctttctccctctcttctccaatcaagcacttggagttagatctaggtccttctatctcgtccctctacagatgtattttccacttgcataattcatgccaacactggttttcttaggtttctccattttcacctctagtgatggccctactcatatcttctctaatttggtcctgatacttgtttcttttcacgttttcccatttccctgtggctcactgtcttacaatcactgctgtggaatcatgataccacttttagctctttgcatcttccttcagtgtatttttgtttttcaagaggaagtagattttaactggacaactttgagtactgacatcattgataaataaactggcttgtggtttcaataa

SEQ ID NO: 16203 - DNA, 2377 bp, Homo sapiens
  source 1..2377: mol_type = unassigned DNA
cgcgcggccgccaccccaccatgctcaagcgctgcggccggcgcctgctgctggcgctggcgggcgcgctgctcgcctgcctgctggtgctcaccgccgacccgccgccgcctccactgcccgccgagcgcggccggcgcgcgctgcgcagcctggcgggccccgcgggggctgccccggcgcccgggctgggggcggcggcggcggcgcccggggcgctggtccgcgacgtgcacagtctgtccgagtacttcagcctgctcacccgcgcgcgcagagatgcgggcccgccgcccggggctgccccccgccccgccgacggccacccgcgccccctggccgagccgctcgcgccccgagacgtcttcatcgctgtcaagaccaccaaaaagttccaccgcgcgcgcctcgacctgctgctggagacctggatctcgcgccacaaggagatgacgttcatcttcactgacggggaagatgaggccctggccaggcacacgggcaacgtggtcatcacaaactgctcggccgcccacagccgccaggcgctgtcctgcaagatggccgtggagtatgaccgcttcatcgagtccggcaggaagtggttctgccacgtggacgatgacaactacgtcaacctgcgggccctgctgcggctgctggccagctacccgcacacgcgggacgtctacgtcggcaagcccagcctggacaggcccatccaggccatggagcgggtcagcgagaacaaggtgcgtcctgtccacttctggtttgccacgggcggcgctggcttctgcatcagccgtgggctggctctgaagatgagcccgtgggccagcgggggtcacttcatgaatacggctgagcggatccggctgcctgatgactgcaccatcggctacatcgtggaggccctgctgggtgtgcccctcatccgcagcggcctcttccactcccacctggagaacctgcagcaggtgcccacctcggagctccacgagcaggtgacgctgagctacggtatgtttgaaaacaagcggaacgccgtccacgtgaaggggcccttctcggtggaggccgacccatccaggttccgctccatccactgccacctgtacccggacacaccctggtgtccccgcactgccatcttctagtggccatggctgagacccaatccctgggcgcccctggtatccaaagggcccagggaccctgttgcgctgccctggcctcggcattcgaggctcccctagggccgtgcctgtgcgtgtgcgtgtgcgtgtgtgtgtgtgtgtactgcatgcccacccgggtagcaggctgctgggcagttctgctctgtggaggggcgggcaccagcgccacttatgtgcctctgctccgagggccagtgggctgcagggcctgcttggaggaaggatttgtgtgtcggaggccactccgagggcaattctgttaggatttttggatctttctacagctacggggctccgggctactttgcagggatgcgatgcgtaggtgcctttctcttcctgctgaccacaagctctgtgctgggggtacctgtgccctgaagtcctggcccctgtgtcatagccccaagtacgactcactgagccatgctcattgcaggggaggctgggtctgggggtgcgtgacccaatccccttcctcctggcctggacgctgtggcttaagagtaacagcagccaccgcccagttccagtggccccacgaagcccccagtggctggctgtccagctgggcaaacagtggcacccctcccagctcttctgagtggggagtcttccaggcctcctcagaggtcttccctttgcctccccaggacagggtgagtcagagctcagcatttaatctcctctccaaagtagagagcaagtcgcccacagtgggcgtgtctgtaaatattgtgacagtatttttttactgtgctgttttttttgaaaggggatgggtaaaaagtagggtgttcttgttttttgcttgggagggtgggggtgggggagggtcttattttatcttatcttttctgtggatcagaaaaaacagaagccaaactcggggtcatctttgtttttaaagctgaagtgggactgtctggcactctgtgtatttatgcgttccagcatctggaacctcccatccctgccctcctcctgtgtagctgccacctccccgctgggcccagcatggctcacctgtcccgtgggctgtgtttcttgttgtttttctctttgcaaagacatagctaggaaagcgaatgataagggaaaagttctcagggaattgaagtgttgttgctatggtgacgtccttttgctgtgaataaaggtgctctttgcagcaa

SEQ ID NO: 16204 - DNA, 1968 bp, Homo sapiens
  source 1..1968: mol_type = unassigned DNA
atgacaccaggtcgctgctgtcttgcggctgacattcaggtagagacgttcatcttcactgacggggaagatgaggccctggccaggcacacgggcaacgtggtcatcacaaactgctcggccgcccacagccgccaggcgctgtcctgcaagatggccgtggagtatgaccgcttcatcgagtccggcaggaagtggttctgccacgtggacgatgacaactacgtcaacctgcgggccctgctgcggctgctggccagctacccgcacacgcgggacgtctacgtcggcaagcccagcctggacaggcccatccaggccatggagcgggtcagcgagaacaaggtgcgtcctgtccacttctggtttgccacgggcggcgctggcttctgcatcagccgtgggctggctctgaagatgagcccgtgggccagcgggggtcacttcatgaatacggctgagcggatccggctgcctgatgactgcaccatcggctacatcgtggaggccctgctgggtgtgcccctcatccgcagcggcctcttccactcccacctggagaacctgcagcaggtgcccacctcggagctccacgagcaggtgacgctgagctacggtatgtttgaaaacaagcggaacgccgtccacgtgaaggggcccttctcggtggaggccgacccatccaggttccgctccatccactgccacctgtacccggacacaccctggtgtccccgcactgccatcttctagtggccatggctgagacccaatccctgggcgcccctggtatccaaagggcccagggaccctgttgcgctgccctggcctcggcattcgaggctcccctagggccgtgcctgtgcgtgtgcgtgtgcgtgtgtgtgtgtgtgtactgcatgcccacccgggtagcaggctgctgggcagttctgctctgtggaggggcgggcaccagcgccacttatgtgcctctgctccgagggccagtgggctgcagggcctgcttggaggaaggatttgtgtgtcggaggccactccgagggcaattctgttaggatttttggatctttctacagctacggggctccgggctactttgcagggatgcgatgcgtaggtgcctttctcttcctgctgaccacaagctctgtgctgggggtacctgtgccctgaagtcctggcccctgtgtcatagccccaagtacgactcactgagccatgctcattgcaggggaggctgggtctgggggtgcgtgacccaatccccttcctcctggcctggacgctgtggcttaagagtaacagcagccaccgcccagttccagtggccccacgaagcccccagtggctggctgtccagctgggcaaacagtggcacccctcccagctcttctgagtggggagtcttccaggcctcctcagaggtcttccctttgcctccccaggacagggtgagtcagagctcagcatttaatctcctctccaaagtagagagcaagtcgcccacagtgggcgtgtctgtaaatattgtgacagtatttttttactgtgctgttttttttgaaaggggatgggtaaaaagtagggtgttcttgttttttgcttgggagggtgggggtgggggagggtcttattttatcttatcttttctgtggatcagaaaaaacagaagccaaactcggggtcatctttgtttttaaagctgaagtgggactgtctggcactctgtgtatttatgcgttccagcatctggaacctcccatccctgccctcctcctgtgtagctgccacctccccgctgggcccagcatggctcacctgtcccgtgggctgtgtttcttgttgtttttctctttgcaaagacatagctaggaaagcgaatgataagggaaaagttctcagggaattgaagtgttgttgctatggtgacgtccttttgctgtgaataaaggtgctctttgcagc

SEQ ID NO: 16205 - DNA, 1377 bp, Homo sapiens
  source 1..1377: mol_type = unassigned DNA
atgctcaagcgctgcggccggcgcctgctgctggcgctggcgggcgcgctgctcgcctgcctgctggtgctcaccgccgacccgccgccgcctccactgcccgccgagcgcggccggcgcgcgctgcgcagcctggcgggccccgcgggggctgccccggcgcccgggctgggggcggcggcggcggcgcccggggcgctggtccgcgacgtgcacagtctgtccgagtacttcagcctgctcacccgcgcgcgcagagatgcgggcccgccgcccggggctgccccccgccccgccgacggccacccgcgccccctggccgagccgctcgcgccccgagacgtcttcatcgctgtcaagaccaccaaaaagttccaccgcgcgcgcctcgacctgctgctggagacctggatctcgcgccacaaggagatgacgttcatcttcactgacggggaagatgaggccctggccaggcacacgggcaacgtggtcatcacaaactgctcggccgcccacagccgccaggcgctgtcctgcaagatggccgtggagtatgaccgcttcatcgagtccggcaggaagtggttctgccacgtggacgatgacaactacgtcaacctgcgggccctgctgcggctgctggccagctacccgcacacgcgggacgtctacgtcggcaagcccagcctggacaggcccatccaggccatggagcgggtcagcgagaacaaggtgcgtcctgtccacttctggtttgccacgggcggcgctggcttctgcatcagccgtgggctggctctgaagatgagcccgtgggccagcgggggtcacttcatgaatacggctgagcggatccggctgcctgatgactgcaccatcggctacatcgtggaggccctgctgggtgtgcccctcatccgcagcggcctcttccactcccacctggagaacctgcagcaggtgcccacctcggagctccacgagcaggtgacgctgagctacggtatgtttgaaaacaagcggaacgccgtccacgtgaaggggcccttctcggtggaggccgacccatccaggtggggaaactgaggcacggagcagctgatgcccaaggtccagcagccatgctggtgggctggggaggcgctcagactccaagccaggcaggccgtgggtccggccgccccacagctggtaatgctgcacctccctctcctgtgatgtggccccaggccccgaccccgctcaggggtggtgggaagagtcctggagagcaggagcagtgccggagcccccactgcagctggtcccagcccctgcagagatccagacgcttgttttttaaatacagcagctctgcggtgcttttccttcctcaaa

SEQ ID NO: 16206 - DNA, 2058 bp, Homo sapiens
  source 1..2058: mol_type = unassigned DNA
ggagggttttgctctttgtgtgggtgtgtgagtggctatgatcctagttgtccagctgctgcgtggagaataagtaaagcaggtctgaatgacaccaggtcgctgctgtcttgcggctgacattcaggtagagacgttcatcttcactgacggggaagatgaggccctggccaggcacacgggcaacgtggtcatcacaaactgctcggccgcccacagccgccaggcgctgtcctgcaagatggccgtggagtatgaccgcttcatcgagtccggcaggaagtggttctgccacgtggacgatgacaactacgtcaacctgcgggccctgctgcggctgctggccagctacccgcacacgcgggacgtctacgtcggcaagcccagcctggacaggcccatccaggccatggagcgggtcagcgagaacaaggtgcgtcctgtccacttctggtttgccacgggcggcgctggcttctgcatcagccgtgggctggctctgaagatgagcccgtgggccagcgggggtcacttcatgaatacggctgagcggatccggctgcctgatgactgcaccatcggctacatcgtggaggccctgctgggtgtgcccctcatccgcagcggcctcttccactcccacctggagaacctgcagcaggtgcccacctcggagctccacgagcaggtgacgctgagctacggtatgtttgaaaacaagcggaacgccgtccacgtgaaggggcccttctcggtggaggccgacccatccaggttccgctccatccactgccacctgtacccggacacaccctggtgtccccgcactgccatcttctagtggccatggctgagacccaatccctgggcgcccctggtatccaaagggcccagggaccctgttgcgctgccctggcctcggcattcgaggctcccctagggccgtgcctgtgcgtgtgcgtgtgcgtgtgtgtgtgtgtgtactgcatgcccacccgggtagcaggctgctgggcagttctgctctgtggaggggcgggcaccagcgccacttatgtgcctctgctccgagggccagtgggctgcagggcctgcttggaggaaggatttgtgtgtcggaggccactccgagggcaattctgttaggatttttggatctttctacagctacggggctccgggctactttgcagggatgcgatgcgtaggtgcctttctcttcctgctgaccacaagctctgtgctgggggtacctgtgccctgaagtcctggcccctgtgtcatagccccaagtacgactcactgagccatgctcattgcaggggaggctgggtctgggggtgcgtgacccaatccccttcctcctggcctggacgctgtggcttaagagtaacagcagccaccgcccagttccagtggccccacgaagcccccagtggctggctgtccagctgggcaaacagtggcacccctcccagctcttctgagtggggagtcttccaggcctcctcagaggtcttccctttgcctccccaggacagggtgagtcagagctcagcatttaatctcctctccaaagtagagagcaagtcgcccacagtgggcgtgtctgtaaatattgtgacagtatttttttactgtgctgttttttttgaaaggggatgggtaaaaagtagggtgttcttgttttttgcttgggagggtgggggtgggggagggtcttattttatcttatcttttctgtggatcagaaaaaacagaagccaaactcggggtcatctttgtttttaaagctgaagtgggactgtctggcactctgtgtatttatgcgttccagcatctggaacctcccatccctgccctcctcctgtgtagctgccacctccccgctgggcccagcatggctcacctgtcccgtgggctgtgtttcttgttgtttttctctttgcaaagacatagctaggaaagcgaatgataagggaaaagttctcagggaattgaagtgttgttgctatggtgacgtccttttgctgtgaataaaggtgctctttgcagcaa

SEQ ID NO: 16207 - DNA, 2268 bp, Homo sapiens
  source 1..2268: mol_type = unassigned DNA
agactaagctgcaacactggcagagcctcccaaggaagggaggagggaggacagaggccaaggcggctcctggccaccctcgcagcttcctccctccctggccacaaggacccaaagctcagagggatggatgaacagacaggaaggctcaggctggacacgtattgtatgagtgccaagcagatctgggcatggagcaaatgctcaggaaggctgtgggatgagcacatgaaatggatggaaggatggacggacagatggacagatggatggatggatggatggatggatgagtggagcccaacaccagctctcaggtcctacggaggtggcctctctcagcagacgttcatcttcactgacggggaagatgaggccctggccaggcacacgggcaacgtggtcatcacaaactgctcggccgcccacagccgccaggcgctgtcctgcaagatggccgtggagtatgaccgcttcatcgagtccggcaggaagtggttctgccacgtggacgatgacaactacgtcaacctgcgggccctgctgcggctgctggccagctacccgcacacgcgggacgtctacgtcggcaagcccagcctggacaggcccatccaggccatggagcgggtcagcgagaacaaggtgcgtcctgtccacttctggtttgccacgggcggcgctggcttctgcatcagccgtgggctggctctgaagatgagcccgtgggccagcgggggtcacttcatgaatacggctgagcggatccggctgcctgatgactgcaccatcggctacatcgtggaggccctgctgggtgtgcccctcatccgcagcggcctcttccactcccacctggagaacctgcagcaggtgcccacctcggagctccacgagcaggtgacgctgagctacggtatgtttgaaaacaagcggaacgccgtccacgtgaaggggcccttctcggtggaggccgacccatccaggttccgctccatccactgccacctgtacccggacacaccctggtgtccccgcactgccatcttctagtggccatggctgagacccaatccctgggcgcccctggtatccaaagggcccagggaccctgttgcgctgccctggcctcggcattcgaggctcccctagggccgtgcctgtgcgtgtgcgtgtgcgtgtgtgtgtgtgtgtactgcatgcccacccgggtagcaggctgctgggcagttctgctctgtggaggggcgggcaccagcgccacttatgtgcctctgctccgagggccagtgggctgcagggcctgcttggaggaaggatttgtgtgtcggaggccactccgagggcaattctgttaggatttttggatctttctacagctacggggctccgggctactttgcagggatgcgatgcgtaggtgcctttctcttcctgctgaccacaagctctgtgctgggggtacctgtgccctgaagtcctggcccctgtgtcatagccccaagtacgactcactgagccatgctcattgcaggggaggctgggtctgggggtgcgtgacccaatccccttcctcctggcctggacgctgtggcttaagagtaacagcagccaccgcccagttccagtggccccacgaagcccccagtggctggctgtccagctgggcaaacagtggcacccctcccagctcttctgagtggggagtcttccaggcctcctcagaggtcttccctttgcctccccaggacagggtgagtcagagctcagcatttaatctcctctccaaagtagagagcaagtcgcccacagtgggcgtgtctgtaaatattgtgacagtatttttttactgtgctgttttttttgaaaggggatgggtaaaaagtagggtgttcttgttttttgcttgggagggtgggggtgggggagggtcttattttatcttatcttttctgtggatcagaaaaaacagaagccaaactcggggtcatctttgtttttaaagctgaagtgggactgtctggcactctgtgtatttatgcgttccagcatctggaacctcccatccctgccctcctcctgtgtagctgccacctccccgctgggcccagcatggctcacctgtcccgtgggctgtgtttcttgttgtttttctctttgcaaagacatagctaggaaagcgaatgataagggaaaagttctcagggaattgaagtgttgttgctatggtgacgtccttttgctgtgaataaaggtgctctttgcagc

SEQ ID NO: 16208 - DNA, 4747 bp, Homo sapiens
  source 1..4747: mol_type = unassigned DNA
atggccgcggggggcagcggctgcacttcctcagcgggcggcggtggccggggagttaatcctcgacgcacgggtcccgtttccctctgtgcggcggccggcgggaccataagggcttaactcatatatttaacccccctccaaaaaggtttgaaagtattcttgaagggctgtttggacctgcattattaaaagatctcagtttatttaaagactgtgaacctgaaagcatttctgattggacttttgatgaaaactgtttattctgttgcttgagaagagataaagtaaagggacacttagtcggtctggatgaaccagcttcgggagctgggcaagaagctctgcttaaacaagagcaagcaaaaatcattcgattcgagagacaagcagaagaattcctcaatgcagtcttttatagaaaagacagtccctgggtctccgaccccaatattcccctagtggcccgtgagatcatgcagcgaatgatccaacaatttgctgctgaatatacctcaaaaaatagctctactcaggaccccagccagcccaatagcacaaagaaccaaagcctgccgaaagcatctccagtcaccacctctcccacggctgcaactactcagaaccctgtgctcagcaaacttctcatggctgaccaagactcacctctggaccttactgtcagaaagtctcagtcagaacctagcgaacaagacggtgtacttgatctgtccactaagaaaagtccatgtgctggcagcacttccctgagccactctccaggctgctccagtactcaagggaacgggcgacctgggagacccagccagtaccgcccagacggacttcggagtggtgatggggtacctccaagaagcttacaggatggaaccagggaaggttttggacactccacatcactcaaagttccactggctcgatccctgcagattagtgaagaactactgagcagaaaccaattgtccacagctgccagccttgggccatctggattacagaatcatggacaacacttaatattatccagggaagcctcttgggcaaaaccacattacgagttcaacctcagccgtatgaagttcaggggaaatggtgcactcagcaacatcagtgaccttccttttcttgcagaaaactctgcctttccaaaaatggcacttcaagcaaaacaagatggaaaaaaggatgtgagccattcatctcctgtagatttaaagataccacaagttcgaggaatggatctttcttgggagtctcgcactggtgatcagtacagctatagctctttggtaatgggttcacaaacggagagcgcgcttagtaaaaaattaagggctattcttccaaaacaaagtagaaaaagcatgttagatgctggacccgattcttggggctcagatgctgagcagtctacctctggacagccatatcccacatcggatcaagaaggagaccctggctccaagcagcctcggaagaaaagagggcgttacagacagtacaacagtgagatactggaggaagcaatctcagtggttatgagtggaaaaatgagtgtttccaaagctcagagtatttatgggattccccacagtacactggagtacaaagtaaaggagaggctgggcactttgaaaaaccctccaaagaaaaagatgaaattaatgaggtcggaggggccagatgtttctgtaaagattgaattagatccccagggagaggcagcacaaagtgcaaatgaatcaaaaaacgagtaggaatactgtagagtgccaattactgtacaaactgggtgagcactactgcatcattgttcagctatcattgcttgcacgtaatttcatttactgtgacacttgcttctttgcagattttgcattgacttgtgtgtacagagatgaaatgtgcattctgaatgttgcatattttaaatttttcatgtgcagtatggctcggaatatgtttggccttttgcatgtttctctacaaaagagaattgagttacctcacagagaacagatacatggaagtggactccttgcctgtagagcctgcatgcttttttgtttttttttgttgttgttgttttttcttaagttatatttgtttttactttttaaaaaagaagaggaaacaaagcccccttttagaaactacgtctgtcatactgggagctttatcactgcaaattggaaagccatcttatacaaaattattcacatttttcatctacgattcaactaatcgaaggattaaactaaagaaaaaactaagaagaacaatgaacctttgactttgagaaatttggttattcactgacataattattgggtcatttatagttacattttataattttcttctcactattaaatttatttaaattagcaagctattagtgctcacccagaggggaaggtggtggaaaatgtgcacacactaccttcagaaatgcttcagttaattactttgaacactacctttgctgtaatttcatttgagattttctaagggtagaatttggtctcaccaacaagtgaggatatagccttatctcatggaggacgagctccgtatttactcaggagcagtcagggtacattacataaaacaatggaggatgcctcattttagcaaactaggtttctttgtattcttcagtccttttacagaattgatgtgctaactgaatatcattgcagcaactagactaagatattcaagatctctttattggggatgggagaaatagggaaagaaatgtgtataagtaattatgatattgcaaaagtgatacttagattttacagcctcagtagtctgcccagtgtccacattaatgaaggatccatgtttgtagtgagagaaaaaaaccccaaggtaacccgatatgatttaggatgcatatcagttctaacaattcaatcagaagtcaagctcattggaattccttttttaactgatccaaatactagtagaagggggagggagaggtgttgggttttttttttaagtttttatttaattttgttggttagaatttttttctgtttttggcatcctacataataccccccttcttgactttttctgataattagctgatattcatggttgtttagcacacagttcaggacctttgagatcatgtttgtataagcactccttgaagaatatctaagctttttctgagatgggcttttaaaattataataagggaagtttattttctgcggtttttgcaagaataagcaaagcccatggaatttaatttttcattgtgatcagattaaaattactatttgtgcaaaacaaattccacaccacatgtactgtatattctaatctgctgagaaaggtggtcaggcccttctaaatgcttaaccaaaaacaaacattattggagtttcagtgtaaaataaaattaaaattggagggttggttagattgatttcagatggatactaacagtttgaggggaggtccagatatttccaaggcataaattcttgcctggaaactttggagcaattaattaaattaggttaagttttccctcagcaacctgtgtgttcaaaggttaggcacaccattgctgttactaaaatacatgcactgctcattcttgacatagcttgggtgtgggttcctcttgttttggttattttgtgtagcagtttaatcagtggataactgagcctgtttcctcttagctttctagacttcttaacagaaaaaacagtttgggttcaatagcattttatgattctacaatattttgtcacctagctggaagttgcaataaaaattccttatgaaatatatggttttcatctgtaattgaaggaaatcatagaaagtttgctgaaagcaaagggctaagcttatgaaggaatgcctcctttgttacacactcaagaatttgtcagcacacaattaattgcagccatagtacctttttgcgtaatgtttgggatattcagtagcccaggattgctacaaaaaggtcctttgagaaaattaatttgtgcttgcttttatcccctctcagaaagacatcactaaaggcccattaaaaatctggccctaaaagttcaacttttgtagagtttattgttcagagaggtttaatcctatgtggtagtctatataagtgatgtatgagttgagttatgtaaattttgtcattgtagtgtacatggagtgatcattttactaacataaatattttctatgtgtgtttcagtggatgacaatcgagcagcagaagaatggtgtgcctaccctttaatgctgcagtttaagagaacttgtattgtgtcatttcagattgtaggctgagagttgtaaatagtgaaaatttgagtacttctattatttgttttggttagaaagtgaatttaaaaaacaaaccaaactctaaactttctcagattaaaagtcctgagacctgaagattgtaatattcatgtctgtgaagcttttaaacattacacttgagatcagtcatgacttgatattcaggtaaattttcttttccaagaagcttttgaataagcatatttcctccaaaggtctctctctttctctctctttttttgagtgtagattattttaaagcactaattgcattacattggtaactgcaatataaaatagccattattgttttgtgaagcatggttgaaattagctagtggtcccttttgaatttcatgagcctctc

SEQ ID NO: 16209 - DNA, 10390 bp, Homo sapiens
  source 1..10390: mol_type = unassigned DNA
gcgaagcgtgaggtggagatgggggcggagggagctggagctgtcacagtccccgggtgcgcctgaccgagccaagtggggtgtcatggccgcggggggcagcggctgcacttcctcagcgggcggcggtggccggggagttaatcctcgacgcacgggtcggtgtgtcccgtttccctctgtgcggcggccggcgggaccataagggcttaactcatatatttaacccccctccaaaaaggtttgaaagtattcttgaagggctgtttggacctgcattattaaaagatctcagtttatttaaagactgtgaacctgaaagcatttctgattggacttttgatgaaaactgtttattctgttgcttgagaagagataaagtaaagggacacttagtcggtctggatgaaccagcttcgggagctgggcaagaagctctgcttaaacaagagcaagcaaaaatcattcgattcgagagacaagcagaagaattcctcaatgcagtcttttatagaaaagacagtccctgggtctccgaccccaatattcccctagtggcccgtgagatcatgcagcgaatgatccaacaatttgctgctgaatatacctcaaaaaatagctctactcaggaccccagccagcccaatagcacaaagaaccaaagcctgccgaaagcatctccagtcaccacctctcccacggctgcaactactcagaaccctgtgctcagcaaacttctcatggctgaccaagactcacctctggaccttactgtcagaaagtctcagtcagaacctagcgaacaagacggtgtacttgatctgtccactaagaaaagtccatgtgctggcagcacttccctgagccactctccaggctgctccagtactcaagggaacgggcgacctgggagacccagccagtaccgcccagacggacttcggagtggtgatggggtacctccaagaagcttacaggatggaaccagggaaggttttggacactccacatcactcaaagttccactggctcgatccctgcagattagtgaagaactactgagcagaaaccaattgtccacagctgccagccttgggccatctggattacagaatcatggacaacacttaatattatccagggaagcctcttgggcaaaaccacattacgagttcaacctcagccgtatgaagttcaggggaaatggtgcactcagcaacatcagtgaccttccttttcttgcagaaaactctgcctttccaaaaatggcacttcaagcaaaacaagatggaaaaaaggatgtgagccattcatctcctgtagatttaaagataccacaagttcgaggaatggatctttcttgggagtctcgcactggtgatcagtacagctatagctctttggtaatgggttcacaaacggagagcgcgcttagtaaaaaattaagggctattcttccaaaacaaagtagaaaaagcatgttagatgctggacccgattcttggggctcagatgctgagcagtctacctctggacagccatatcccacatcggatcaagaaggagaccctggctccaagcagcctcggaagaaaagagggcgttacagacagtacaacagtgagatactggaggaagcaatctcagtggttatgagtggaaaaatgagtgtttccaaagctcagagtatttatgggattccccacagtacactggagtacaaagtaaaggagaggctgggcactttgaaaaaccctccaaagaaaaagatgaaattaatgaggtcggaggggccagatgtttctgtaaagattgaattagatccccagggagaggcagcacaaagtgcaaatgaatcaaaaaacgagtaggaatactgtagagtgccaattactgtacaaactgggtgagcactactgcatcattgttcagctatcattgcttgcacgtaatttcatttactgtgacacttgcttctttgcagattttgcattgacttgtgtgtacagagatgaaatgtgcattctgaatgttgcatattttaaatttttcatgtgcagtatggctcggaatatgtttggccttttgcatgtttctctacaaaagagaattgagttacctcacagagaacagatacatggaagtggactccttgcctgtagagcctgcatgcttttttgtttttttttgttgttgttgttttttcttaagttatatttgtttttactttttaaaaaagaagaggaaacaaagcccccttttagaaactacgtctgtcatactgggagctttatcactgcaaattggaaagccatcttatacaaaattattcacatttttcatctacgattcaactaatcgaaggattaaactaaagaaaaaactaagaagaacaatgaacctttgactttgagaaatttggttattcactgacataattattgggtcatttatagttacattttataattttcttctcactattaaatttatttaaattagcaagctattagtgctcacccagaggggaaggtggtggaaaatgtgcacacactaccttcagaaatgcttcagttaattactttgaacactacctttgctgtaatttcatttgagattttctaagggtagaatttggtctcaccaacaagtgaggatatagccttatctcatggaggacgagctccgtatttactcaggagcagtcagggtacattacataaaacaatggaggatgcctcattttagcaaactaggtttctttgtattcttcagtccttttacagaattgatgtgctaactgaatatcattgcagcaactagactaagatattcaagatctctttattggggatgggagaaatagggaaagaaatgtgtataagtaattatgatattgcaaaagtgatacttagattttacagcctcagtagtctgcccagtgtccacattaatgaaggatccatgtttgtagtgagagaaaaaaaccccaaggtaacccgatatgatttaggatgcatatcagttctaacaattcaatcagaagtcaagctcattggaattccttttttaactgatccaaatactagtagaagggggagggagaggtgttgggttttttttttaagtttttatttaattttgttggttagaatttttttctgtttttggcatcctacataataccccccttcttgactttttctgataattagctgatattcatggttgtttagcacacagttcaggacctttgagatcatgtttgtataagcactccttgaagaatatctaagctttttctgagatgggcttttaaaattataataagggaagtttattttctgcggtttttgcaagaataagcaaagcccatggaatttaatttttcattgtgatcagattaaaattactatttgtgcaaaacaaattccacaccacatgtactgtatattctaatctgctgagaaaggtggtcaggcccttctaaatgcttaaccaaaaacaaacattattggagtttcagtgtaaaataaaattaaaattggagggttggttagattgatttcagatggatactaacagtttgaggggaggtccagatatttccaaggcataaattcttgcctggaaactttggagcaattaattaaattaggttaagttttccctcagcaacctgtgtgttcaaaggttaggcacaccattgctgttactaaaatacatgcactgctcattcttgacatagcttgggtgtgggttcctcttgttttggttattttgtgtagcagtttaatcagtggataactgagcctgtttcctcttagctttctagacttcttaacagaaaaaacagtttgggttcaatagcattttatgattctacaatattttgtcacctagctggaagttgcaataaaaattccttatgaaatatatggttttcatctgtaattgaaggaaatcatagaaagtttgctgaaagcaaagggctaagcttatgaaggaatgcctcctttgttacacactcaagaatttgtcagcacacaattaattgcagccatagtacctttttgcgtaatgtttgggatattcagtagcccaggattgctacaaaaaggtcctttgagaaaattaatttgtgcttgcttttatcccctctcagaaagacatcactaaaggcccattaaaaatctggccctaaaagttcaacttttgtagagtttattgttcagagaggtttaatcctatgtggtagtctatataagtgatgtatgagttgagttatgtaaattttgtcattgtagtgtacatggagtgatcattttactaacataaatattttctatgtgtgtttcagtggatgacaatcgagcagcagaagaatggtgtgcctaccctttaatgctgcagtttaagagaacttgtattgtgtcatttcagattgtaggctgagagttgtaaatagtgaaaatttgagtacttctattatttgttttggttagaaagtgaatttaaaaaacaaaccaaactctaaactttctcagattaaaagtcctgagacctgaagattgtaatattcatgtctgtgaagcttttaaacattacacttgagatcagtcatgacttgatattcaggtaaattttcttttccaagaagcttttgaataagcatatttcctccaaaggtctctctctttctctctctttttttgagtgtagattattttaaagcactaattgcattacattggtaactgcaatataaaatagccattattgttttgtgaagcatggttgaaattagctagtggtcccttttgaatttcatgagcctctcaaaaaagaaaaacttaaaaaaaaaaaaaaaaaaaaacaaaaagctgctggaatatttcaaaagatatatattttaccttattataggttttgtaaagttagtttgtaatattcaggtgcacttttaatgttaaattttgtgttcagagttccattataccatgtatttctcggaggtggctcatcacacggctggtggcagtcttggtgccgcagtgattccttaatatttgatttctctcttgatttgccactattctgtattggcactttcagtgtagatattctagtttggggatgtcctcacaatgtgtaatagagattggtctattagcatgcttaatttctgctaatcagagttttgcatggcccaaacaacagttgaccatttttatggtatgggaaagtgtagttcacaactgtctttgtcacgaaagccgtttttcctcacattttccagtaggcagataacattacttaaattattaatatataacactcttggaactattgataggaaataatgtatttaaaataattttttgcattttcagagaccttgatgttatagggtagataagctatggcactataaaatcaaaaacactaattctgtggaaggatatctagttggtatttttatctttagctttctcatttctgagacagcatagtcatccagcttgatggtaatgtagtatattactttgttcagtgggcttataagtgactctgaattatgtttgtgatgagctatacactttttttctgttccccaaataccatgaaggacaaggtcactctttcaggaaaaataatttatatttgtgtataatactttttaatattaagtttgttgttctgaagtttagatgttgcttgataaacctttgctgcagcagatcatgaatatgagtaaggctttgtgtgataataggggtccttatgtgaagttaattactgttcagttctggtgagcaagctcaacaagtgtgaagtgtgtattagctttatttggtacacttttactttacaatatcgaagtgcttttagaactctggttatcttatataaaccattacctcaaccaattggcatttcttttccccaacatttaccttagctataatatgagctatgtgggatcagatggtaaaactataaaaggcacaatgagaagtttagttcccaagttttggagagaactctaaattagactaaaaacaactacctgttaacaccaatatcataactaccttctgtcgttaggcagtacatagcaacctttgagctgctagtgagctatctgttctccccctacccccaagtaagcacacagtgccaggcctggttctaagcctttgtgattctcttacatctcattgacccataatagtgaagcatggattcatttattttcataagacaaattgagtcagctcgatgtcagaagttgaaaatattttgagtagtttaacagttatatgagagattggcatcattttctttaacagcttttatctttgtagatttccttttgagacatgtatttttgcttttataatcctttcattaaatgccagaggttgttttcatattaatcactcttttctgtatattcaggttgctgtcattggtgatagaatatggcaatagacagaattgtgctccactttatgttttttaggagatattgaaagttataggttaaattttggccttcttgaagatatcaaagattgttttccttgttacctttaattagaatttggtcttcattaatgctttggtcaggctagcattactaaaaacttgatggcttcagcagaacagcccgtttaggagactattaagctatctagggattttttttcaaattaattgctttcaaaatctgaaaaggaaaaaagtataattgtggtacaaagaagacagatctccaggctctttcttctcagtttattttggtttaattctgtactggagacttgaataggatttgtgaacatggtgatggaaagaaaaatagaggacattatttgtgtaccctcattcctgaataatcttgcagtcaccttttaaagaagcagacattagccctgtaacacaacactgtagctataaactctaagtgttaggaaggagattggggtggggagggtggagtaggatggaaaaagcatgtagacttctgagaagaggctaaaaattctgccctataatactaaaaatgagtcacaagataatgtggtgaagttaggccatcttgatttgatagaaaaatcttttacattgtttaaaaatgagaatcgaggctaattaatgttgatttgacaatagaacatgagctaattctgcaaccgtttggggggtaattttatggtttccagttcatttagagctgtatcaagaaaagctaaaaagcaagcacttttagttaatcatagatttattggatatagcaaatattattataatatttaatctctattatttgaatgtggaaatgaactcttttaccccatcttgaactgtcattgaacatgctcaagatgatcaacactggaaatgaccctacacacataccaaaaaaatctaaagcagtaagacatatttgaagatccatacctcttaaactttttagatttgtcttgggaaagaatttatgaacctgtaaccagtattagtgcagtcttgggttccttgttctgcataattgcaccctttctcaggtatgtcctgacaacataaattttaaaataatctcattagagattagattctcagtggatagtgtgtaaggggactaggggtggggggttgggggtagttggacacaggacactgacacagtagagcagggatttttaacagtcaatagccaaatagaatttcaatctagaatatttttaccccctcagaatgagtgaaacaacttctattatttggtgtacccggtgctacactcctaaaagtcttttttttttttcatccaggtgacgttttttatttttcctgcttggtggtggaaggttatatagtaaacttcactgtcattaagaaagcgcttgtccaaaatgtttaaagtactagaaaagggataattcagcactttttctgttacaacactaaagtcttaatttatcttcagagtcttaggtactgtaagtttttggatgattatttaaaaatataaaacatactacataatatggggtcagatcacatttatataaataattcttattttaaaaaagacaataacattttgtacctttctagcaattccaagtgattgcctcattttctcttgttaagcatttcaagcttaagaatttggaatttgagagaaggtgagggggaaaattccctaaaataaaaatttgtttcaaaccattttagaaaaataaatcactaggaaaataggtagggattctctccccctttaagtcttcagggaatgagcagtatttagaatctttggctgaaattcaagcctttttactttgtaaatttttaatattaattcactgacatgctttttacaccagaggactgaaaatggatcttaatgtttttaagttgtggaagggtatatttctaaaatgaggggggatgattaactaggttagtattaccagcattagtaagtttaaggaattttagtatgtaatagcaaagtgtttgattaaaagtctaatcctatattactagtcaaaattagttacattctgatctaggaaagataatagtcattggatattgatatgctgtgctgtcagaaaaccagactaagatagaaacctttatctgactcccacatgttgcttgttgtgatgggatgtatactttacagcagcttattgctgctttgaaaaaaaatgtataaactatacatttggagtgtttgcatataattctttataacctccacttaaagctgtcagacattggtattttatcagtccacattgttgaataaaactaatgttcttaggaatccagcttgtacacactgtttaaaaaccctcagggacagtttacacactcttctcactcaattcaggtactttgatgctattcttaaacctaacagtgacttgtatttttctgttttgcttttatttcaacgtgctggtagcacatctgatgaatgtcaacttaaaaaactcagttcaggtatccaggtataactcagccaaacagattttaaagctgcatataactctccagcacatggtgcctcacactcttatagtggcattctatatattcagttattactactgagcagataatatgggggttcctgttaacagtgtattttttaaaaaaagcgcataaatgtatagccagcacactacacacacacacacaaacatgcacagttaaactatatatttttaaatgccactaatagccagcacaactaaaacaaaagacattcctaactgctctgtaagctgttaacagatgcagttccttcttgatgtggctcttgcttcttcacgataactactactaaattcaagcactggtccttgggtgtctgacctctacattctagtttatgcaatgtctttagagaattttgtgcactggccactgtgatggaaccattgggccaggagtgctttgagtttatcagtagtgattctgccaaagttggtgttgtaacatgagtatgtaaaatgtcaaaaaaattagcagaggtctaggtctgcatatcagcagacagttttgtccgtgtattttgtagccttgaagttctcagtgacaagttttttctgatgcgaagttctaattccagtgttttagtcctttgcatctttaatgttaagacttgcctctttaaaattgcttttgttttctgcagtactatctgtggttaacaaaatagattatttctctgctttaatatttgatatcttacatctaaaataaattctctccacatataaaacccatagcctttggagatatggaaaatggtatctttcagatttctagaagttcaagtgtcatacaacaaaacaggaaccccctttactcttatggacctcatttcaatatactgtttacagtttgatggaattgtataatttaatatttctcttgtactgtagtttatatttatttacagatttttttgtactgtgtgatttgaactttttgttccttgctatgatcaatgtttatgtagtagagcacttatgatcacaaattaagttttttggtttgattgcactacattaaattttttaatgcagttctgatttttgactggactaaaactgtgtcttaatgtatgtgatgagtacttaaaattttaatccatgtggtccccccccttttttttttttttgcattgtatgtcaaaagcgcttgttctttcgtgcatgtgtaagatttaatggttccattgtattatttgaccatgacattttggagaaacattcccagctgtaatgttgtgtatggtagttctcactggatgctagagttttcaaaaccactattcttctaataaattttgttgtgaaaaactgtt

SEQ ID NO: 16210 - DNA, 4834 bp, Homo sapiens
  source 1..4834: mol_type = unassigned DNA
gggccgggcgggcggcagaagatggcgagggtgtgtaggcggcagcaatgctccgttgagagacgcggctttcggcaagaactggattcgtggcgccacaagctcattcactgtgtaggtcccgtttccctctgtgcggcggccggcgggaccataagggcttaactcatatatttaacccccctccaaaaaggtttgaaagtattcttgaagggctgtttggacctgcattattaaaagatctcagtttatttaaagactgtgaacctgaaagcatttctgattggacttttgatgaaaactgtttattctgttgcttgagaagagataaagtaaagggacacttagtcggtctggatgaaccagcttcgggagctgggcaagaagctctgcttaaacaagagcaagcaaaaatcattcgattcgagagacaagcagaagaattcctcaatgcagtcttttatagaaaagacagtccctgggtctccgaccccaatattcccctagtggcccgtgagatcatgcagcgaatgatccaacaatttgctgctgaatatacctcaaaaaatagctctactcaggaccccagccagcccaatagcacaaagaaccaaagcctgccgaaagcatctccagtcaccacctctcccacggctgcaactactcagaaccctgtgctcagcaaacttctcatggctgaccaagactcacctctggaccttactgtcagaaagtctcagtcagaacctagcgaacaagacggtgtacttgatctgtccactaagaaaagtccatgtgctggcagcacttccctgagccactctccaggctgctccagtactcaagggaacgggcgacctgggagacccagccagtaccgcccagacggacttcggagtggtgatggggtacctccaagaagcttacaggatggaaccagggaaggttttggacactccacatcactcaaagttccactggctcgatccctgcagattagtgaagaactactgagcagaaaccaattgtccacagctgccagccttgggccatctggattacagaatcatggacaacacttaatattatccagggaagcctcttgggcaaaaccacattacgagttcaacctcagccgtatgaagttcaggggaaatggtgcactcagcaacatcagtgaccttccttttcttgcagaaaactctgcctttccaaaaatggcacttcaagcaaaacaagatggaaaaaaggatgtgagccattcatctcctgtagatttaaagataccacaagttcgaggaatggatctttcttgggagtctcgcactggtgatcagtacagctatagctctttggtaatgggttcacaaacggagagcgcgcttagtaaaaaattaagggctattcttccaaaacaaagtagaaaaagcatgttagatgctggacccgattcttggggctcagatgctgagcagtctacctctggacagccatatcccacatcggatcaagaaggagaccctggctccaagcagcctcggaagaaaagagggcgttacagacagtacaacagtgagatactggaggaagcaatctcagtggttatgagtggaaaaatgagtgtttccaaagctcagagtatttatgggattccccacagtacactggagtacaaagtaaaggagaggctgggcactttgaaaaaccctccaaagaaaaagatgaaattaatgaggtcggaggggccagatgtttctgtaaagattgaattagatccccagggagaggcagcacaaagtgcaaatgaatcaaaaaacgagtaggaatactgtagagtgccaattactgtacaaactgggtgagcactactgcatcattgttcagctatcattgcttgcacgtaatttcatttactgtgacacttgcttctttgcagattttgcattgacttgtgtgtacagagatgaaatgtgcattctgaatgttgcatattttaaatttttcatgtgcagtatggctcggaatatgtttggccttttgcatgtttctctacaaaagagaattgagttacctcacagagaacagatacatggaagtggactccttgcctgtagagcctgcatgcttttttgtttttttttgttgttgttgttttttcttaagttatatttgtttttactttttaaaaaagaagaggaaacaaagcccccttttagaaactacgtctgtcatactgggagctttatcactgcaaattggaaagccatcttatacaaaattattcacatttttcatctacgattcaactaatcgaaggattaaactaaagaaaaaactaagaagaacaatgaacctttgactttgagaaatttggttattcactgacataattattgggtcatttatagttacattttataattttcttctcactattaaatttatttaaattagcaagctattagtgctcacccagaggggaaggtggtggaaaatgtgcacacactaccttcagaaatgcttcagttaattactttgaacactacctttgctgtaatttcatttgagattttctaagggtagaatttggtctcaccaacaagtgaggatatagccttatctcatggaggacgagctccgtatttactcaggagcagtcagggtacattacataaaacaatggaggatgcctcattttagcaaactaggtttctttgtattcttcagtccttttacagaattgatgtgctaactgaatatcattgcagcaactagactaagatattcaagatctctttattggggatgggagaaatagggaaagaaatgtgtataagtaattatgatattgcaaaagtgatacttagattttacagcctcagtagtctgcccagtgtccacattaatgaaggatccatgtttgtagtgagagaaaaaaaccccaaggtaacccgatatgatttaggatgcatatcagttctaacaattcaatcagaagtcaagctcattggaattccttttttaactgatccaaatactagtagaagggggagggagaggtgttgggttttttttttaagtttttatttaattttgttggttagaatttttttctgtttttggcatcctacataataccccccttcttgactttttctgataattagctgatattcatggttgtttagcacacagttcaggacctttgagatcatgtttgtataagcactccttgaagaatatctaagctttttctgagatgggcttttaaaattataataagggaagtttattttctgcggtttttgcaagaataagcaaagcccatggaatttaatttttcattgtgatcagattaaaattactatttgtgcaaaacaaattccacaccacatgtactgtatattctaatctgctgagaaaggtggtcaggcccttctaaatgcttaaccaaaaacaaacattattggagtttcagtgtaaaataaaattaaaattggagggttggttagattgatttcagatggatactaacagtttgaggggaggtccagatatttccaaggcataaattcttgcctggaaactttggagcaattaattaaattaggttaagttttccctcagcaacctgtgtgttcaaaggttaggcacaccattgctgttactaaaatacatgcactgctcattcttgacatagcttgggtgtgggttcctcttgttttggttattttgtgtagcagtttaatcagtggataactgagcctgtttcctcttagctttctagacttcttaacagaaaaaacagtttgggttcaatagcattttatgattctacaatattttgtcacctagctggaagttgcaataaaaattccttatgaaatatatggttttcatctgtaattgaaggaaatcatagaaagtttgctgaaagcaaagggctaagcttatgaaggaatgcctcctttgttacacactcaagaatttgtcagcacacaattaattgcagccatagtacctttttgcgtaatgtttgggatattcagtagcccaggattgctacaaaaaggtcctttgagaaaattaatttgtgcttgcttttatcccctctcagaaagacatcactaaaggcccattaaaaatctggccctaaaagttcaacttttgtagagtttattgttcagagaggtttaatcctatgtggtagtctatataagtgatgtatgagttgagttatgtaaattttgtcattgtagtgtacatggagtgatcattttactaacataaatattttctatgtgtgtttcagtggatgacaatcgagcagcagaagaatggtgtgcctaccctttaatgctgcagtttaagagaacttgtattgtgtcatttcagattgtaggctgagagttgtaaatagtgaaaatttgagtacttctattatttgttttggttagaaagtgaatttaaaaaacaaaccaaactctaaactttctcagattaaaagtcctgagacctgaagattgtaatattcatgtctgtgaagcttttaaacattacacttgagatcagtcatgacttgatattcaggtaaattttcttttccaagaagcttttgaataagcatatttcctccaaaggtctctctctttctctctctttttttgagtgtagattattttaaagcactaattgcattacattggtaactgcaatataaaatagccattattgttttgtgaagcatggttgaaattagctagtggtcccttttgaatttcatgagcctctcaaaaaagaaaaacttaaaaaaaaaaaaaaaaaaaaacaaaaa

SEQ ID NO: 16211 - DNA, 7777 bp, Homo sapiens
  source 1..7777: mol_type = unassigned DNA
gcgcggggccgcggcggaggctgggccgggcgggcggcagaagatggcgagggtgtgtaggcggcagcaatgctccgttgagagacgcggctttcggcaagaactggattcgtggcgccacaagctcattcactgtgtaggtcccgtttccctctgtgcggcggccggcgggaccataagggcttaactcatatatttaacccccctccaaaaaggtttgaaagtattcttgaagggctgtttggacctgcattattaaaagatctcagtttatttaaagactgtgaacctgaaagcatttctgattggacttttgatgaaaactgtttattctgttgcttgagaagagataaagtaaagggacacttagtcggtctggatgaaccagcttcgggagctgggcaagaagctctgcttaaacaagagcaagcaaaaatcattcgattcgagagacaagcagaagaattcctcaatgcagtcttttatagaaaagacagtccctgggtctccgaccccaatattcccctagtggcccgtgagatcatgcagcgaatgatccaacaatttgctgctgaatatacctcaaaaaatagctctactcaggaccccagccagcccaatagcacaaagaaccaaagcctgccgaaagcatctccagtcaccacctctcccacggctgcaactactcagaaccctgtgctcagcaaacttctcatggctgaccaagactcacctctggaccttactgtcagaaagtctcagtcagaacctagcgaacaagacggtgtacttgatctgtccactaagaaaagtccatgtgctggcagcacttccctgagccactctccaggctgctccagtactcaagggaacgggcgacctgggagacccagccagtaccgcccagacggacttcggagtggtgatggggtacctccaagaagcttacaggatggaaccagggaaggttttggacactccacatcactcaaagttccactggctcgatccctgcagattagtgaagaactactgagcagaaaccaattgtccacagctgccagccttgggccatctggattacagaatcatggacaacacttaatattatccagggaagcctcttgggcaaaaccacattacgagttcaacctcagccgtatgaagttcaggggaaatggtgcactcagcaacatcagtgaccttccttttcttgcagaaaactctgcctttccaaaaatggcacttcaagcaaaacaagatggaaaaaaggatgtgagccattcatctcctgtagatttaaagataccacaagttcgaggaatggatctttcttgggagtctcgcactggtgatcagtacagctatagctctttggtaatgggttcacaaacggagagcgcgcttagtaaaaaattaagggctattcttccaaaacaaagtagaaaaagcatgttagatgctggacccgattcttggggctcagatgctgagcagtctacctctggacagccatatcccacatcggatcaagaaggagaccctggctccaagcagcctcggaagaaaagagggcgttacagacagtacaacagtgagatactggaggaagcaatctcagtggttatgagtggaaaaatgagtgtttccaaagctcagagtatttatgggattccccacagtacactggagtacaaagtaaaggagaggctgggcactttgaaaaaccctccaaagaaaaagatgaaattaatgagtggatgacaatcgagcagcagaagaatggtgtgcctaccctttaatgctgcagtttaagagaacttgtattgtgtcatttcagattgtaggctgagagttgtaaatagtgaaaatttgagtacttctattatttgttttggttagaaagtgaatttaaaaaacaaaccaaactctaaactttctcagattaaaagtcctgagacctgaagattgtaatattcatgtctgtgaagcttttaaacattacacttgagatcagtcatgacttgatattcaggtaaattttcttttccaagaagcttttgaataagcatatttcctccaaaggtctctctctttctctctctttttttgagtgtagattattttaaagcactaattgcattacattggtaactgcaatataaaatagccattattgttttgtgaagcatggttgaaattagctagtggtcccttttgaatttcatgagcctctcaaaaaagaaaaacttaaaaaaaaaaaaaaaaaaaaacaaaaagctgctggaatatttcaaaagatatatattttaccttattataggttttgtaaagttagtttgtaatattcaggtgcacttttaatgttaaattttgtgttcagagttccattataccatgtatttctcggaggtggctcatcacacggctggtggcagtcttggtgccgcagtgattccttaatatttgatttctctcttgatttgccactattctgtattggcactttcagtgtagatattctagtttggggatgtcctcacaatgtgtaatagagattggtctattagcatgcttaatttctgctaatcagagttttgcatggcccaaacaacagttgaccatttttatggtatgggaaagtgtagttcacaactgtctttgtcacgaaagccgtttttcctcacattttccagtaggcagataacattacttaaattattaatatataacactcttggaactattgataggaaataatgtatttaaaataattttttgcattttcagagaccttgatgttatagggtagataagctatggcactataaaatcaaaaacactaattctgtggaaggatatctagttggtatttttatctttagctttctcatttctgagacagcatagtcatccagcttgatggtaatgtagtatattactttgttcagtgggcttataagtgactctgaattatgtttgtgatgagctatacactttttttctgttccccaaataccatgaaggacaaggtcactctttcaggaaaaataatttatatttgtgtataatactttttaatattaagtttgttgttctgaagtttagatgttgcttgataaacctttgctgcagcagatcatgaatatgagtaaggctttgtgtgataataggggtccttatgtgaagttaattactgttcagttctggtgagcaagctcaacaagtgtgaagtgtgtattagctttatttggtacacttttactttacaatatcgaagtgcttttagaactctggttatcttatataaaccattacctcaaccaattggcatttcttttccccaacatttaccttagctataatatgagctatgtgggatcagatggtaaaactataaaaggcacaatgagaagtttagttcccaagttttggagagaactctaaattagactaaaaacaactacctgttaacaccaatatcataactaccttctgtcgttaggcagtacatagcaacctttgagctgctagtgagctatctgttctccccctacccccaagtaagcacacagtgccaggcctggttctaagcctttgtgattctcttacatctcattgacccataatagtgaagcatggattcatttattttcataagacaaattgagtcagctcgatgtcagaagttgaaaatattttgagtagtttaacagttatatgagagattggcatcattttctttaacagcttttatctttgtagatttccttttgagacatgtatttttgcttttataatcctttcattaaatgccagaggttgttttcatattaatcactcttttctgtatattcaggttgctgtcattggtgatagaatatggcaatagacagaattgtgctccactttatgttttttaggagatattgaaagttataggttaaattttggccttcttgaagatatcaaagattgttttccttgttacctttaattagaatttggtcttcattaatgctttggtcaggctagcattactaaaaacttgatggcttcagcagaacagcccgtttaggagactattaagctatctagggattttttttcaaattaattgctttcaaaatctgaaaaggaaaaaagtataattgtggtacaaagaagacagatctccaggctctttcttctcagtttattttggtttaattctgtactggagacttgaataggatttgtgaacatggtgatggaaagaaaaatagaggacattatttgtgtaccctcattcctgaataatcttgcagtcaccttttaaagaagcagacattagccctgtaacacaacactgtagctataaactctaagtgttaggaaggagattggggtggggagggtggagtaggatggaaaaagcatgtagacttctgagaagaggctaaaaattctgccctataatactaaaaatgagtcacaagataatgtggtgaagttaggccatcttgatttgatagaaaaatcttttacattgtttaaaaatgagaatcgaggctaattaatgttgatttgacaatagaacatgagctaattctgcaaccgtttggggggtaattttatggtttccagttcatttagagctgtatcaagaaaagctaaaaagcaagcacttttagttaatcatagatttattggatatagcaaatattattataatatttaatctctattatttgaatgtggaaatgaactcttttaccccatcttgaactgtcattgaacatgctcaagatgatcaacactggaaatgaccctacacacataccaaaaaaatctaaagcagtaagacatatttgaagatccatacctcttaaactttttagatttgtcttgggaaagaatttatgaacctgtaaccagtattagtgcagtcttgggttccttgttctgcataattgcaccctttctcaggtatgtcctgacaacataaattttaaaataatctcattagagattagattctcagtggatagtgtgtaaggggactaggggtggggggttgggggtagttggacacaggacactgacacagtagagcagggatttttaacagtcaatagccaaatagaatttcaatctagaatatttttaccccctcagaatgagtgaaacaacttctattatttggtgtacccggtgctacactcctaaaagtcttttttttttttcatccaggtgacgttttttatttttcctgcttggtggtggaaggttatatagtaaacttcactgtcattaagaaagcgcttgtccaaaatgtttaaagtactagaaaagggataattcagcactttttctgttacaacactaaagtcttaatttatcttcagagtcttaggtactgtaagtttttggatgattatttaaaaatataaaacatactacataatatggggtcagatcacatttatataaataattcttattttaaaaaagacaataacattttgtacctttctagcaattccaagtgattgcctcattttctcttgttaagcatttcaagcttaagaatttggaatttgagagaaggtgagggggaaaattccctaaaataaaaatttgtttcaaaccattttagaaaaataaatcactaggaaaataggtagggattctctccccctttaagtcttcagggaatgagcagtatttagaatctttggctgaaattcaagcctttttactttgtaaatttttaatattaattcactgacatgctttttacaccagaggactgaaaatggatcttaatgtttttaagttgtggaagggtatatttctaaaatgaggggggatgattaactaggttagtattaccagcattagtaagtttaaggaattttagtatgtaatagcaaagtgtttgattaaaagtctaatcctatattactagtcaaaattagttacattctgatctaggaaagataatagtcattggatattgatatgctgtgctgtcagaaaaccagactaagatagaaacctttatctgactcccacatgttgcttgttgtgatgggatgtatactttacagcagcttattgctgctttgaaaaaaaatgtataaactatacatttggagtgtttgcatataattctttataacctccacttaaagctgtcagacattggtattttatcagtccacattgttgaataaaactaatgttcttaggaatccagcttgtacacactgtttaaaaaccctcagggacagtttacacactcttctcactcaattcaggtactttgatgctattcttaaacctaacagtgacttgtatttttctgttttgcttttatttcaacgtgctggtagcacatctgatgaatgtcaacttaaaaaactcagttcaggtatccaggtataactcagccaaacagattttaaagctgcatataactctccagcacatggtgcctcacactcttatagtggcattctatatattcagttattactactgagcagataatatgggggttcctgttaacagtgtattttttaaaaaaagcgcataaatgtatagccagcacactacacacacacacacaaacatgcacagttaaactatatatttttaaatgccactaatagccagcacaactaaaacaaaagacattcctaactgctctgtaagctgttaacagatgcagttccttcttgatgtggctcttgcttcttcacgataactactactaaattcaagcactggtccttgggtgtctgacctctacattctagtttatgcaatgtctttagagaattttgtgcactggccactgtgatggaaccattgggccaggagtgctttgagtttatcagtagtgattctgccaaagttggtgttgtaacatgagtatgtaaaatgtcaaaaaaattagcagaggtctaggtctgcatatcagcagacagttttgtccgtgtattttgtagccttgaagttctcagtgacaagttttttctgatgcgaagttctaattccagtgttttagtcctttgcatctttaatgttaagacttgcctctttaaaattgcttttgttttctgcagtactatctgtggttaacaaaatagattatttctctgctttaatatttgatatcttacatctaaaataaattctctccacatataaaacccatagcctttggagatatggaaaatggtatctttcagatttctagaagttcaagtgtcatacaacaaaacaggaaccccctttactcttatggacctcatttcaatatactgtttacagtttgatggaattgtataatttaatatttctcttgtactgtagtttatatttatttacagatttttttgtactgtgtgatttgaactttttgttccttgctatgatcaatgtttatgtagtagagcacttatgatcacaaattaagttttttggtttgattgcactacattaaattttttaatgcagttctgatttttgactggactaaaactgtgtcttaatgtatgtgatgagtacttaaaattttaatccatgtggtccccccccttttttttttttttgcattgtatgtcaaaagcgcttgttctttcgtgcatgtgtaagatttaatggttccattgtattatttgaccatgacattttggagaaacattcccagctgtaatgttgtgtatggtagttctcactggatgctagagttttcaaaaccactattcttctaataaattttgttgtg

SEQ ID NO: 16212 - DNA, 3587 bp, Homo sapiens
  source 1..3587: mol_type = unassigned DNA
gtgacacgtgtcaatcaacccccctccggggggcgcgcgctccggggctcgcgccgagggctcgcgcccctgcctcgtgcctgcgctgctcgtatgtaaatgagggcgcgtgacgcgggacgcagatggacaagggaagagagagaatggccgctgccgccgccgctgctgccgccgccgccgccgccgctcagtgccggagccctcggtgcgcggcggagagaagaggattccggcgggaactcgactcttggcgccaccgcctcatgcactgtgtaggttttgagagtattttagaagggctttatggaccacggctacgaagagacctcagtttatttgaagactgtgaaccagaagagctgactgactggtctatggatgaaaaatgttcattttgtaacctacagagagaagcagtcagtgattgtataccatctcttgattcttcacagtcaacaccaacagaggagctatcatctcagggccagtccaacactgataagattgaatgccaagcagaaaattacctaaatgcactctttcgaaagaaagatcttcctcagaactgtgatcctaacattcccctagttgctcaggaattaatgaaaaagatgatacgtcaatttgcgattgagtacatttcaaaaagtggtaaaactcaagagaatagaaatggttcaattggaccaagtatagtatgtaaaagtatccaaatgaatcaagcagaaaactcccttcaggaagagcaggaaggccccttagacctcactgtgaatcgaatgcaagaacaaaatactcagcaaggggatggagtgttagatctctctacaaagaaaaccagcataaaatctgaagagtcatccatatgtgatccttcttctgaaaattcagtggctggcatgctacaagtgaaaactgatgagaaactgaatgtgtctgatgagaatacagcaagttgccctttgagccccattaagatgtgccttaatcgtcccattgaatggaatctgaatttgacaacagcatctctaacgagctgtacagttcataaccaaaatctcaaaagcgaagagaaatagattgcagttcttcttgcactatctttattttgtatgtcagtattccttctgaacaataagcatttatcaattgatcttgaagtatttctagtcctgtgatttgtctttatattaaatcattagcattaatcattttgattatattctttatatgttttttttacatgttttacatcagatcattgtggaattttgtaaacggattttgatgtttctcttttagtggtattatgtgaattttttatgccctaagtttaaatacgtaattgtccctagttttatttctgtgcacaaagttttaatatataacacattgtgatttataaagctagtattgtaaagatttgtgatgataacctgacccatgagcagttgtaaaacaggtggataccaactacctcgaagcaaattggtgaaagaaaaggcaaaggtatctcttagaagtaaatctccttcaacgttatatatgtacagaagaaaaaaagttgatcatagctttttgtcaagtagcatgtttcccattcacaggaaaatgtgagcttatcagttctttctctgtattttaaatctaagtctgtgggctttaagagcaatggcacaattgcatgtttactgttcagcaaatctgtgcctcttgatagagaaaaatactatgtggtttctgtaagttaccagttttgaatgaaaaatggtaaatggatttacatctgttttattgtaccttagccttttattttaaagttaaagggatgacttttaaaagcaggacattccctacctttaatagtgcaaagcacagtttcagcaatggctacatgactatgtctaaaaactgaatactcagaatactaaaggtttggtgcttaaatttatttttcccatgccagagaaagcaagctttggtatggtaaaccacatgagaacatggctcctttctttttggatagcctggccatgtgtgaatgggattttagcttattatgtttctaagacttttccttacagcacacttaatgtaccttttcagtccttctcccaaccccctgcaaattgtctttaaaacaacaacacataaggaatctgaagcacaggagaacacagagccaacaaacagaatgaagaacaatcatctatttttaactgactttctatcattaccatttttccttttgcttaataactatcttgctttgaaactttgactccttttataagttctatgaggcacatatgtatagcaatttggttctaaaaaccagtgatcttactttagctccatcttaaaatttcaccttaagtaaatggcctctagtagatgataagcctaaaaaaagcacaattattaaaacaaacagatccatgttaggacatttctgaataataaagagaaaaggtgtttcgttgggtattgcagaaaagaggaccaatttcatatagtacaagtttcgtaagtcaggccaagtgtcaatttcaaaagacaagaaatgaaattgacagtgaatagtgctcataaattggtagcgtatataaagagaagttcctgtcacattatattcccactagaattattatccacagtaaataaatattattttgttatgccaaaaatatagcgagcagcttcatggttaataatacatttatgttgacacctccctaatccaggaaacattcacaaacaaggactcccatatacaaatactttaggaagagagatttcccaggcagatatcaccaaaaatgttttcactgtaggaatcacaaaataagtttttgtcaaaataactgttgttgaacgttatactggtcttcctcactggtgattgataagctcctttctagccagtttgtggtacttccttcattttccctagaaatgttacttgttaaatgtgtcctcaggcggtttcatctttgttgattctgcccatctaagtcataagcttctcaaatgcaagctactagctagttacacttgtaagttttccataatgacatgattttaaacataaagagttcataagaatcacttggagagactatttaaaaatgagattcctaggcccacctcagattgtgataaatctgtgtgactgactgatgcacactttttctggactataataactgatgctgctctactgctttaatacaggccaaagtaacgtggaagcgcacagcagaaaatcttcagaaagacatcaggtttgttctgattttgacaagggtaacttcttctttattaaagcaaataactggacataatcttaaaggattccacctccatcgtctttcctaacttagatcttcattgagaaattgggcaaggttaagtttacttttttctagtgctgcggttttggctcgtcttggtagtctcatcttcatttctgattctggttctggaacttcatgatcactaaatagatgttgaaaatacacgaatttagatacaagctttaaaaccagtttatttataaataaaacttttttgtttctgactca

SEQ ID NO: 16213 - DNA, 4984 bp, Homo sapiens
  source 1..4984: mol_type = unassigned DNA
tccccacctcccatccccattcaactgcaattccctctttttggttggatctgaatcgttttgcctcaaacttctgggcttggggctctcaccctgtggattgtttagggtgacaggaatggtgggactcccgaccttgctgcagtcgcttttttttttttctttttttgcctaagacgaatgcatagagctgttatccagcaggttttgagagtattttagaagggctttatggaccacggctacgaagagacctcagtttatttgaagactgtgaaccagaagagctgactgactggtctatggatgaaaaatgttcattttgtaacctacagagagaagcagtcagtgattgtataccatctcttgattcttcacagtcaacaccaacagaggagctatcatctcagggccagtccaacactgataagattgaatgccaagcagaaaattacctaaatgcactctttcgaaagaaagatcttcctcagaactgtgatcctaacattcccctagttgctcaggaattaatgaaaaagatgatacgtcaatttgcgattgagtacatttcaaaaagtggtaaaactcaagagaatagaaatggttcaattggaccaagtatagtatgtaaaagtatccaaatgaatcaagcagaaaactcccttcaggaagagcaggaaggccccttagacctcactgtgaatcgaatgcaagaacaaaatactcagcaaggggatggagtgttagatctctctacaaagaaaaccagcataaaatctgaagagtcatccatatgtgatccttcttctgaaaattcagtggctgggagactacacagaaacagagaggactatgtggaaagaagtgctgagtttgcagatggtttgctctcaaaagctttgaaagacattcagtctggagcactggacataaataaagcaggcatactttatggcatacctcaaaaaactttacttcttcacttagaagccttaccagcagggaagcctgcatcttttaaaaacaaaactcgagatttccatgatagttattcatataaggacagtaaagaaacttgtgcagtgctgcaaaaagtagccttgtgggcaagagctcaagcagagcgcacagaaaaaagtaaactcaatctacttgaaacctcagaaataaaattcccaacagcttccacttacctccatcagctaactctacagaaaatggtcactcagtttaaagaaaaaaatgaaagcctccaatatgaaacttcaaatcctactgtacagttaaaaattcctcagctacgagtaagttctgtctcaaaatcacaacctgatggttctggtctgttggatgttatgtatcaagtttccaaaacctcttcagtcctagaaggatcagctctccaaaaactgaaaaatatactccctaaacagaacaaaatagaatgttctgggcctgtaactcactcaagtgttgactcttactttctacatggggacctctctcctttgtgtcttaattctaaaaatggaacagttgatggaacctctgaaaatactgaagatggattagatcgaaaagacagtaagcagcccaggaaaaaacgtggccgctatcggcaatatgatcatgaaataatggaagaagctattgcaatggtaatgagcggaaaaatgagtgtttccaaagcacaaggaatttatggggtacctcacagcactttagaatacaaggtaaaagaaagatctggaacactgaagactcctccgaagaagaaactacgattaccagacactgggttatataatatgacagattcagggactggcagctgcaaaaacagcagcaagcctgtgtagattacttgttaggaaaatgtttgtgagtgtgtgtgtgtgtgtgtgtttgcgtgtgtgtgtatgtgcacaggtgtgtatttgtgtgtctatatacacacgtgggaattacaaatgctcactctgacaggagacatgaaattttacagttcaaaaaccacttacatgccttttgaaaaaaagttttattcagggttttcactgtggacagaattatatagttgcttacttaattctgatagtttgtatttaatccttgtataaataggtgaaaaagattcaggttttctttagtagtcaatagcataaagcgttgtgggaaaacgagtaattgtcaagtgaaacatttttattggtgaaagaccattccagccattcagttgaaccatcttataatggaaatatgatattcatagtttataaacattctatacaacagacttaacacttgttgtatgtatgtcaagcaaccaatcaaagtttaaatagctatctccatactaagaaaaattaatatatacagtattagtacacgacagtgcattctatgaaatacaaaatgcactcaagtgcatccaccaggaatagaaaagaaaaccttaaaggatatgtataatgaaatttaatatttatcatttaatagttgatttagcaagaagttggggtttataaggtatatactttaaaaaaactgacacatagttaaccccagcagctatagaaccctttaatataataagatggagtactaagaacaaaaaataatttaaatttaattattaaaataatttagttttgtttttcatttgaaaaataagctaatgtgtaaggttagaaaagaaagttggaatgcaacttagagcatgtttataatgtgcacagaaaaagcttgagaatgataattttggtttaaatgtgctggttagttgatgttatgactactttaaattttaaggattgtgacacactcctactattgaaaaacctcagtgtaactttaatatatttgctgctgtgacatttcaaaacattttcagtttatcaaaatgaattgcagatttcattttggtgggcgatacattatcattttgctaataaccaaatttgcagtttgttcagggtcttgaatagatttacaaatatttaacactgaagctgttttgaactttcagtaatgtaaactctctactaattgggtagttagaagctgggcagtgcattttaacttttactagactcataagagagactggtcatttttacctagcagttttaaaatatgggtcaaagtatccttgttggatttatggagtatgcaactgtagtggtaaaatgttataaagcatatgccttcatataaagaatagggatttgctttatgtattcaaaattctctgagtgccccctttctctgttaaaattcaggttctgatcatttttctaagccagttttcctaagtccaaaaggaatacttttagctgaatttaaaaaataagtgcaccttgtcaaatgcttgtgtttttacacttgtgtttgtgtgtatttaataatcatatatacgtgtaatactaaagagattttcagctattaaattttaaaactgcttacatgtttaaagaaactgaagagtgagaaactacacaaccaagcagttatttggtctctgagatctatacttaaccctcttcagctattaatgttacctgcacactagggtatgaatcctcttttttttttttttcaccccaagaaaatatacataatagattacagaacagcagatgtcagggtcatctttctttttaaagaattaagccatattttgtgagggccagaacttgcattatttagtatatttcccccttcccccaatggaaagcaaagttaaaggtaaagtacatatttcaaaacaattttattgacctctttatacagaattttacttggaaaactttgggggctttgaatgcattacataatatttatattgtattgagcttttttattcctcacactatatttacattaataaattgattgagaagtttatagtaaagggaaacttacagaacacttttgtatcatttaaaagatgacctgaccaaaaactttacaggattcataaatcagggatcattttgctattgacttcacagtaatcagtagttttataggtaatattatagttaatttgcagcattttagtacttgtattatttatttttggtcagaaatagtaaattaaaatattttttgatagtttataggtaataatcaacccataacttttaaaagaaacaaaacatttctattattgagttaacatttgattatacaaactaggaaaggcagggaaattccccttctccccagtgattctattaagatgacctttatgttaaactttcaaagtactttatgaatttagttaccagttactatttattaattgacaattttctgaaaaatcccgtttcagcagacttaatgaaggtgaaagcaacccttatgtgctttctacttatttgaatgttcctcaagtattttatattaaaaaaaaaaagaaggaaaagagaaaacagtgcctctgtttttagaaaactactgctcagtaaagttgtttaaaccatttctggtagctaatgacaattttatattaaattgtatactaactttagtgagactgatttttttagttgtttacagtacaaatacttgtatttgttttttaattgcagtatttccaatgtcgcagtaatttagtaaaactctgtggctgccttgattttgacagattttgttaatataaactgattgttaggcaattagttatatttatgcataaatcaattgcactataattcatgaattatttattacaatattttctaatgaattcatgtatctgtcttgtgttgtaaatgtactgtaattctgttcctactttgtgttgttatatatctaaatctgattgtatgaattttaattgttcagttaacgtgtttctaggttgtaatttgtagtaaagcacttcaatgcttttgcacttaaatttacaacactgttggtgtgtgattgatttactcattcagtaaaagaaaaaaagaaaagaaaagaaaaaaactga

SEQ ID NO: 16214 - DNA, 5009 bp, Homo sapiens
  source 1..5009: mol_type = unassigned DNA
aacccccctccggggggcgcgcgctccggggctcgcgccgagggctcgcgcccctgcctcgtgcctgcgctgctcgtatgtaaatgagggcgcgtgacgcgggacgcagatggacaagggaagagagagaatggccgctgccgccgccgctgctgccgccgccgccgccgccgctcagtgccggagccctcggtgcgcggcggagagaagaggattccggcgggaactcgactcttggcgccaccgcctcatgcactgtgtaggttttgagagtattttagaagggctttatggaccacggctacgaagagacctcagtttatttgaagactgtgaaccagaagagctgactgactggtctatggatgaaaaatgttcattttgtaacctacagagagaagcagtcagtgattgtataccatctcttgattcttcacagtcaacaccaacagaggagctatcatctcagggccagtccaacactgataagattgaatgccaagcagaaaattacctaaatgcactctttcgaaagaaagatcttcctcagaactgtgatcctaacattcccctagttgctcaggaattaatgaaaaagatgatacgtcaatttgcgattgagtacatttcaaaaagtggtaaaactcaagagaatagaaatggttcaattggaccaagtatagtatgtaaaagtatccaaatgaatcaagcagaaaactcccttcaggaagagcaggaaggccccttagacctcactgtgaatcgaatgcaagaacaaaatactcagcaaggggatggagtgttagatctctctacaaagaaaaccagcataaaatctgaagagtcatccatatgtgatccttcttctgaaaattcagtggctgggagactacacagaaacagagaggactatgtggaaagaagtgctgagtttgcagatggtttgctctcaaaagctttgaaagacattcagtctggagcactggacataaataaagcaggcatactttatggcatacctcaaaaaactttacttcttcacttagaagccttaccagcagggaagcctgcatcttttaaaaacaaaactcgagatttccatgatagttattcatataaggacagtaaagaaacttgtgcagtgctgcaaaaagtagccttgtgggcaagagctcaagcagagcgcacagaaaaaagtaaactcaatctacttgaaacctcagaaataaaattcccaacagcttccacttacctccatcagctaactctacagaaaatggtcactcagtttaaagaaaaaaatgaaagcctccaatatgaaacttcaaatcctactgtacagttaaaaattcctcagctacgagtaagttctgtctcaaaatcacaacctgatggttctggtctgttggatgttatgtatcaagtttccaaaacctcttcagtcctagaaggatcagctctccaaaaactgaaaaatatactccctaaacagaacaaaatagaatgttctgggcctgtaactcactcaagtgttgactcttactttctacatggggacctctctcctttgtgtcttaattctaaaaatggaacagttgatggaacctctgaaaatactgaagatggattagatcgaaaagacagtaagcagcccaggaaaaaacgtggccgctatcggcaatatgatcatgaaataatggaagaagctattgcaatggtaatgagcggaaaaatgagtgtttccaaagcacaaggaatttatggggtacctcacagcactttagaatacaaggtaaaagaaagatctggaacactgaagactcctccgaagaagaaactacgattaccagacactgggttatataatatgacagattcagggactggcagctgcaaaaacagcagcaagcctgtgtagattacttgttaggaaaatgtttgtgagtgtgtgtgtgtgtgtgtgtttgcgtgtgtgtgtatgtgcacaggtgtgtatttgtgtgtctatatacacacgtgggaattacaaatgctcactctgacaggagacatgaaattttacagttcaaaaaccacttacatgccttttgaaaaaaagttttattcagggttttcactgtggacagaattatatagttgcttacttaattctgatagtttgtatttaatccttgtataaataggtgaaaaagattcaggttttctttagtagtcaatagcataaagcgttgtgggaaaacgagtaattgtcaagtgaaacatttttattggtgaaagaccattccagccattcagttgaaccatcttataatggaaatatgatattcatagtttataaacattctatacaacagacttaacacttgttgtatgtatgtcaagcaaccaatcaaagtttaaatagctatctccatactaagaaaaattaatatatacagtattagtacacgacagtgcattctatgaaatacaaaatgcactcaagtgcatccaccaggaatagaaaagaaaaccttaaaggatatgtataatgaaatttaatatttatcatttaatagttgatttagcaagaagttggggtttataaggtatatactttaaaaaaactgacacatagttaaccccagcagctatagaaccctttaatataataagatggagtactaagaacaaaaaataatttaaatttaattattaaaataatttagttttgtttttcatttgaaaaataagctaatgtgtaaggttagaaaagaaagttggaatgcaacttagagcatgtttataatgtgcacagaaaaagcttgagaatgataattttggtttaaatgtgctggttagttgatgttatgactactttaaattttaaggattgtgacacactcctactattgaaaaacctcagtgtaactttaatatatttgctgctgtgacatttcaaaacattttcagtttatcaaaatgaattgcagatttcattttggtgggcgatacattatcattttgctaataaccaaatttgcagtttgttcagggtcttgaatagatttacaaatatttaacactgaagctgttttgaactttcagtaatgtaaactctctactaattgggtagttagaagctgggcagtgcattttaacttttactagactcataagagagactggtcatttttacctagcagttttaaaatatgggtcaaagtatccttgttggatttatggagtatgcaactgtagtggtaaaatgttataaagcatatgccttcatataaagaatagggatttgctttatgtattcaaaattctctgagtgccccctttctctgttaaaattcaggttctgatcatttttctaagccagttttcctaagtccaaaaggaatacttttagctgaatttaaaaaataagtgcaccttgtcaaatgcttgtgtttttacacttgtgtttgtgtgtatttaataatcatatatacgtgtaatactaaagagattttcagctattaaattttaaaactgcttacatgtttaaagaaactgaagagtgagaaactacacaaccaagcagttatttggtctctgagatctatacttaaccctcttcagctattaatgttacctgcacactagggtatgaatcctcttttttttttttttcaccccaagaaaatatacataatagattacagaacagcagatgtcagggtcatctttctttttaaagaattaagccatattttgtgagggccagaacttgcattatttagtatatttcccccttcccccaatggaaagcaaagttaaaggtaaagtacatatttcaaaacaattttattgacctctttatacagaattttacttggaaaactttgggggctttgaatgcattacataatatttatattgtattgagcttttttattcctcacactatatttacattaataaattgattgagaagtttatagtaaagggaaacttacagaacacttttgtatcatttaaaagatgacctgaccaaaaactttacaggattcataaatcagggatcattttgctattgacttcacagtaatcagtagttttataggtaatattatagttaatttgcagcattttagtacttgtattatttatttttggtcagaaatagtaaattaaaatattttttgatagtttataggtaataatcaacccataacttttaaaagaaacaaaacatttctattattgagttaacatttgattatacaaactaggaaaggcagggaaattccccttctccccagtgattctattaagatgacctttatgttaaactttcaaagtactttatgaatttagttaccagttactatttattaattgacaattttctgaaaaatcccgtttcagcagacttaatgaaggtgaaagcaacccttatgtgctttctacttatttgaatgttcctcaagtattttatattaaaaaaaaaaagaaggaaaagagaaaacagtgcctctgtttttagaaaactactgctcagtaaagttgtttaaaccatttctggtagctaatgacaattttatattaaattgtatactaactttagtgagactgatttttttagttgtttacagtacaaatacttgtatttgttttttaattgcagtatttccaatgtcgcagtaatttagtaaaactctgtggctgccttgattttgacagattttgttaatataaactgattgttaggcaattagttatatttatgcataaatcaattgcactataattcatgaattatttattacaatattttctaatgaattcatgtatctgtcttgtgttgtaaatgtactgtaattctgttcctactttgtgttgttatatatctaaatctgattgtatgaattttaattgttcagttaacgtgtttctaggttgtaatttgtagtaaagcacttcaatgcttttgcacttaaatttacaacactgttggtgtgtgattgatttactcattcagt

SEQ ID NO: 16215 - DNA, 1013 bp, Homo sapiens
  source 1..1013: mol_type = unassigned DNA
acgcagatggacaagggaagagagagaatggccgctgccgccgccgctgctgccgccgccgccgccgccgctcagtgccggagccctcggtgcgcggcggagagaagaggattccggcgggaactcgactcttggcgccaccgcctcatgcactgtgtaggttttgagagtattttagaagggctttatggaccacggctacgaagagacctcagtttatttgaaggattgtataccatctcttgattcttcacagtcaacaccaacagaggagctatcatctcagggccagtccaacactgataagattgaatgccaagcagaaaattacctaaatgcactctttcgaaagaaagatcttcctcagaactgtgatcctaacattcccctagttgctcaggaattaatgaaaaagatgatacgtcaatttgcgattgagtacatttcaaaaagtggtaaaactcaagagaatagaaatggttcaattggaccaagtatagtatgtaaaagtatccaaatgaatcaagcagaaaactcccttcaggaagagcaggaaggccccttagacctcactgtgaatcgaatgcaagaacaaaatactcagcaagcatgctacaagtgaaaactgatgagaaactgaatgtgtctgatgagaatacagcaagttgccctttgagccccattaagatgtgccttaatcgtcccattgaatggaatctgaatttgacaacagcatctctaacgagctgtacagttcataaccaaaatctcaaaagcgaagagaaatagattgcagttcttcttgcactatctttattttgtatgtcagtattccttctgaacaataagcatttatcaattgatcttgaagtatttctagtcctgtgatttgtctttatattaaatcattagcattaatcattttgattatattctttatatgttttttttacatgttttacatcagatcattgtggaattttgtaaacggattttgatgtttctcttttagt

SEQ ID NO: 16216 - DNA, 2953 bp, Homo sapiens
  source 1..2953: mol_type = unassigned DNA
tttcaatccctaaggtctcagcaatgctttatctgtcggggcttccgtgatgtcacccatttcctggtctggagcgaccaatgccgtcctccttcctccaggcacctgttcaccgaagttgaggctggtcacaactccggcggcccaaggagctgctcggttcacccacaaggaatgagagctgcctgcctgctgctgcttggagagccccagacagtcgcttgaagaggtgtgtggatgtctcctagatcttgacttgctcctgaggaaatattgtgtgactgagtttcctgttatactgctctccaatccatcatgaaccagccagagtctgccaacgatcctgaacccctgtgtgcagtgtgtggccaagcccactccttggaggaaaaccacttctacagctatccagaggaagtggatgatgacctcatctgccacatctgcctgcaggctttgctggaccccctggacactccgtgtggacacacctactgcaccctctgcctcaccaacttcctggtggagaaggacttctgtcccatggaccgcaagcctctggttctgcagcactgcaagaagtccagcatcctggtcaacaaactcctcaacaagctactggtgacctgcccattcagggagcactgcacccaggtgttgcagcgctgtgacctcgagcatcactttcaaaccagctgtaaaggtgcctcccactacggcctgaccaaagataggaagaggcgctcacaagatggctgtccagacggctgtgcgagcctcacagccacggctccctccccagaggtttctgcagctgccaccatctccttaatgacagacgagcctggcctagacaaccctgcctacgtgtcctcggcagaggacgggcagccagcaatcagcccagtggactctggccggagcaaccgaactagggcacggccctttgagagatccactattagaagcagatcatttaaaaaaataaatcgagctttgagtgttcttcgaaggacaaagagcgggagtgcagttgccaaccatgccgaccagggcagggaaaattctgaaaacaccactgcccctgaagtctttccaaggttgtaccacctgattccagatggtgaaattaccagcatcaagatcaatcgagtagatcccagtgaaagcctctctattaggctggtgggaggtagcgaaaccccactggtccatatcattatccaacacatttatcgtgatggggtgatcgccagagacggccggctactgccaggagacatcattctaaaggtcaacgggatggacatcagcaatgtccctcacaactacgctgtgcgtctcctgcggcagccctgccaggtgctgtggctgactgtgatgcgtgaacagaagttccgcagcaggaacaatggacaggccccggatgcctacagaccccgagatgacagctttcatgtgattctcaacaaaagtagccccgaggagcagcttggaataaaactggtgcgcaaggtggatgagcctggggttttcatcttcaatgtgctggatggcggtgtggcatatcgacatggtcagcttgaggagaatgaccgtgtgttagccatcaatggacatgatcttcgatatggcagcccagaaagtgcggctcatctgattcaggccagtgaaagacgtgttcacctcgtcgtgtcccgccaggttcggcagcggagccctgacatctttcaggaagccggctggaacagcaatggcagctggtccccagggccaggggagaggagcaacactcccaagcccctccatcctacaattacttgtcatgagaaggtggtaaatatccaaaaagaccccggtgaatctctcggcatgaccgtcgcagggggagcatcacatagagaatgggatttgcctatctatgtcatcagtgttgagcccggaggagtcataagcagagatggaagaataaaaacaggtgacattttgttgaatgtggatggggtcgaactgacagaggtcagccggagtgaggcagtggcattattgaaaagaacatcatcctcgatagtactcaaagctttggaagtcaaagagtatgagccccaggaagactgcagcagcccagcagccctggactccaaccacaacatggccccacccagtgactggtccccatcctgggtcatgtggctggaattaccacggtgcttgtataactgtaaagatattgtattacgaagaaacacagctggaagtctgggcttctgcattgtaggaggttatgaagaatacaatggaaacaaaccttttttcatcaaatccattgttgaaggaacaccagcatacaatgatggaagaattagatgtggtgatattcttcttgctgtcaatggtagaagtacatcaggaatgatacatgcttgcttggcaagactgctgaaagaacttaaaggaagaattactctaactattgtttcttggcctggcacttttttatagaatcaatgatgggtcagaggaaaacagaaaaatcacaaataggctaagaagttgaaacactatatttatcttgtcagtttttatatttaaagaaagaatacattgtaaaaatgtcaggaaaagtatgatcatctaatgaaagccagttacacctcagaaaatatgattccaaaaaaattaaaactactagttttttttcagtgtggaggatttctcattactctacaacattgtttatattttttctattcaataaaaagccctaaaacaactaaaatgatttgtataccccactgaattcaagctgatttaaatttaaaatttggtatatgctgaagtctgccaagggtacattatggccatttttaatttacagctaaaatattttttaaaatgcattgctgagaaacgttgctttcatcaaacaagaataaatatttttcagaagtta

SEQ ID NO: 16217 - DNA, 3757 bp, Homo sapiens
  source 1..3757: mol_type = unassigned DNA
cagcctaagctctctcgccaaccgtggtggctccttgcgttcctacatcctctcatctgagaatcagagagcataatcttcttacgggcccgtgatttattaacgtggcttaatctgaaggttctcagtcaaattctttgtgatctactgattgtgggggcatggcaaggtttgcttaaaggagcttggctggtttgggcccttgtagctgacagaaggtggccagggagaaggcagcacactgctcggagaatgaaggcgcttctgttgctggtcttgccttggctcagtcctgctaactacattgacaatgtgggcaacctgcacttcctgtattcagaactctgtaaaggtgcctcccactacggcctgaccaaagataggaagaggcgctcacaagatggctgtccagacggctgtgcgagcctcacagccacggctccctccccagaggtttctgcagctgccaccatctccttaatgacagacgagcctggcctagacaaccctgcctacgtgtcctcggcagaggacgggcagccagcaatcagcccagtggactctggccggagcaaccgaactagggcacggccctttgagagatccactattagaagcagatcatttaaaaaaataaatcgagctttgagtgttcttcgaaggacaaagagcgggagtgcagttgccaaccatgccgaccagggcagggaaaattctgaaaacaccactgcccctgaagtctttccaaggttgtaccacctgattccagatggtgaaattaccagcatcaagatcaatcgagtagatcccagtgaaagcctctctattaggctggtgggaggtagcgaaaccccactggtccatatcattatccaacacatttatcgtgatggggtgatcgccagagacggccggctactgccaggagacatcattctaaaggtcaacgggatggacatcagcaatgtccctcacaactacgctgtgcgtctcctgcggcagccctgccaggtgctgtggctgactgtgatgcgtgaacagaagttccgcagcaggaacaatggacaggccccggatgcctacagaccccgagatgacagctttcatgtgattctcaacaaaagtagccccgaggagcagcttggaataaaactggtgcgcaaggtggatgagcctggggttttcatcttcaatgtgctggatggcggtgtggcatatcgacatggtcagcttgaggagaatgaccgtgtgttagccatcaatggacatgatcttcgatatggcagcccagaaagtgcggctcatctgattcaggccagtgaaagacgtgttcacctcgtcgtgtcccgccaggttcggcagcggagccctgacatctttcaggaagccggctggaacagcaatggcagctggtccccagggccaggggagaggagcaacactcccaagcccctccatcctacaattacttgtcatgagaaggtggtaaatatccaaaaagaccccggtgaatctctcggcatgaccgtcgcagggggagcatcacatagagaatgggatttgcctatctatgtcatcagtgttgagcccggaggagtcataagcagagatggaagaataaaaacaggtgacattttgttgaatgtggatggggtcgaactgacagaggtcagccggagtgaggcagtggcattattgaaaagaacatcatcctcgatagtactcaaagctttggaagtcaaagagtatgagccccaggaagactgcagcagcccagcagccctggactccaaccacaacatggccccacccagtgactggtccccatcctgggtcatgtggctggaattaccacggtgcttgtataactgtaaagatattgtattacgaagaaacacagctggaagtctgggcttctgcattgtaggaggttatgaagaatacaatggaaacaaaccttttttcatcaaatccattgttgaaggaacaccagcatacaatgatggaagaattagatgtggtgatattcttcttgctgtcaatggtagaagtacatcaggaatgatacatgcttgcttggcaagactgctgaaagaacttaaaggaagaattactctaactattgtttcttggcctggcacttttttatagaatcaatgatgggtcagaggaaaacagaaaaatcacaaataggctaagaagttgaaacactatatttatcttgtcagtttttatatttaaagaaagaatacattgtaaaaatgtcaggaaaagtatgatcatctaatgaaagccagttacacctcagaaaatatgattccaaaaaaattaaaactactagttttttttcagtgtggaggatttctcattactctacaacattgtttatattttttctattcaataaaaagccctaaaacaactaaaatgatttgtataccccactgaattcaagctgatttaaatttaaaatttggtatatgctgaagtctgccaagggtacattatggccatttttaatttacagctaaaatattttttaaaatgcattgctgagaaacgttgctttcatcaaacaagaataaatatttttcagaagttatagttgtcttttagtatgtgatactaattaagattacttttgtattatcactatttaaaagatcctagtaatttattctttcaaataccatgttatttgttaccatcaccgatgaatacctcctaggcttatccctaaaaatgctcgctcagagaattaattataaacttgttttgtttttagtaagaaatggctaaagctctttttttccacaatcgttagtaactgtataaaaactcatgctgctccaccagtgggccttggaaaatgcatcaagaaggccaaaccagcttgaccctggctcacagacatggtcatgaggcgatttaaatttgtgccacaatgaagagtgtgtgtacacatgcctcctagaaactacactatgggtaattaattaatttatttcatagaggccacccagatgccttataggttttattaatttggatatgaaagtgtaccccatttggtttcaccaggaacccaaatttagaatattgaaaagccatcaaaaagttgtgatatcaaaaatgtatgagtctcttaatatactaagcaagagtgtcacagcagtaatgataaagactagttttaatctcaagccttagaggggccctttgttgccttttgtgatgcagcctcttaagagagtggtgtttgattaacaaaaaaactgtggcccaagtggaacccttgaccttttctcagataatctgtgtatgtacacagctaacacagctctttagattccctgttaagtgactcattcacattcctttcttggatataaagtcattgctgtctttttatttttgaaatagtacaagacaaagatttttaacttaacatgaaaaattcactcttttattttggaaaaaaagttaacttttcatactaacaaacagaacaagatttaaggtaaatttcttaaacattatccagaaaaataacaagatttatagtatctacttctggtactaatatacacaaaaggccaaaaccatgcctattctgcaggtgtagcttcggtgctctcctgttcaggggcaggctcactgcccgcttcttttccttctttgcttcttttagattttttgtgtttgtgtctcctgtgactatctccttcttcactttcatggcgacgtctactattac

SEQ ID NO: 16218 - DNA, 556 bp, Homo sapiens
  source 1..556: mol_type = unassigned DNA
gcacattcaagtgtttccccagctgtgtttacagctttgggtttctaagcctcttgagaagtaatcagttttgatcatcttaaatcccaaagtaaattttcttttctggatattatcctagttgctaacacaggttagtctggcctattgaaccatcttttactgctgtgaccttcaaaaatgaaagctgtggttttgccctgagaagaagaaaaggagatttgaaatatgactcagattcttccctgcaaaaggctgggacccttgaaaactatctacgtggaaaagtgagagaacaaggggacacaagcaaagctgcccaggcacctgttcaccgaagttgaggctggtcacaactccggcggcccaaggagctgctcggttcacccacaaggaatgagagctgcctgcctgctgctgcttggagagccccagacagtcgcttgaagaggtgtgtggatgtctcctagatcttgacttgctcctgaggaaatattgtgtgactgagtttcctgttatactgctctccaatccatcatgaaccagccagagtctg

SEQ ID NO: 16219 - DNA, 572 bp, Homo sapiens
  source 1..572: mol_type = unassigned DNA
agaagagatttgtcactgatgctaatgcatgctgctctgcaggggaccactctccctcgaagctccccatagctgctctcagttttatggatctgctctactcaaagccttgcagaaggggcaggggatgcccaggttaacccccgcacgtacaaaggtggagcagttttcatgcatagctgggacgaagaacactggaaagagaaagaaaaattttccgagctactgctaagccagaaaagctcagctctcaaacggactatctcctgagacgtcacacagctgggaactgatccgcaatacagcaaaggcacctgttcaccgaagttgaggctggtcacaactccggcggcccaaggagctgctcggttcacccacaaggaatgagagctgcctgcctgctgctgcttggagagccccagacagtcgcttgaagaggtgtgtggatgtctcctagatcttgacttgctcctgaggaaatattgtgtgactgagtttcctgttatactgctctccaatccatcatgaaccagccagagtctgccaacgatcctgaacccctgtgtgcagtg

SEQ ID NO: 16220 - DNA, 731 bp, Homo sapiens
  source 1..731: mol_type = unassigned DNA
aaggaagttcaggggcgtctcagccccatccaaaccagaagagatttgtcactgatgctaatgcatgctgctctgcaggggaccactctccctcgaagctccccatagctgctctcagttttatggatctgctctactcaaagccttgcagaaggggcaggggatgcccaggttaacccccgcacgtacaaaggtggagcagttttcatgcatagctgggacgaagaacactggaaagagaaagaaaaattttccgagctactgctaagccagaaaagctcagctctcaaacggactatctcctgagacgtcacacagctgggaactgatccgcaatacagcaaaggtgtgtggatgtctcctagatcttgacttgctcctgaggaaatattgtgtgactgagtttcctgttatactgctctccaatccatcatgaaccagccagagtctgccaacgatcctgaacccctgtgtgcagtgtgtggccaagcccactccttggaggaaaaccacttctacagctatccagaggaagtggatgatgacctcatctgccacatctgcctgcaggctttgctggaccccctggacactccgtgtggacacacctactgcaccctctgcctcaccaacttcctggtggagaaggacttctgtcccatggaccgcaagcctctggttctgcagcactgcaagaagtccagcatcctggtcaacaaactcctcaacaa

SEQ ID NO: 16221 - DNA, 603 bp, Homo sapiens
  source 1..603: mol_type = unassigned DNA
acacggggctggacacgtgctgtgctcaggaaagaaagtaaattccacctggcaaattgctctaactgatttatttgtccacaaagagacgccacctacctgcttgcaggtattcaggcacctgttcaccgaagttgaggctggtcacaactccggcggcccaaggagctgctcggttcacccacaaggaatgagagctgcctgcctgctgctgcttggagagccccagacagtcgcttgaagaggtgtgtggatgtctcctagatcttgacttgctcctgaggaaatattgtgtgactgagtttcctgttatactgctctccaatccatcatgaaccagccagagtctgccaacgatcctgaacccctgtgtgcagtgtgtggccaagcccactccttggaggaaaaccacttctacagctatccagaggaagtggatgatgacctcatctgccacatctgcctgcaggctttgctggaccccctggacactccgtgtggacacacctactgcaccctctgcctcaccaacttcctggtggagaaggacttctgtcccatggaccgcaagcctctggttctgcagcactgcaagaagtccag

SEQ ID NO: 16222 - DNA, 1024 bp, Homo sapiens
  source 1..1024: mol_type = unassigned DNA
cgccatgtttctgaggcctccccagccatgtggaactcaggacactggggaaatagccgagttttgaagaatgtcagcagggagccaccagggatcatcctccccggtaagaagagacctccagagaccttcaggaagctggaaagaagcttccaatgattcccagtggtagaagtgtgtggtgcaaaggcacttaggtggacaggtttggccctcaacatgaacttgatgttgctaacacaggttagtctggcctattgaaccatcttttactgctgtgaccttcaaaaatgaaagctgtggttttgccctgagaagaagaaaaggagatttgaaatatgactcagattcttccctgcaaaaggctgggacccttgaaaactatctacgtggaaaagtgagagaacaaggggacacaagcaaagctgcccaggcacctgttcaccgaagttgaggctggtcacaactccggcggcccaaggagctgctcggttcacccacaaggaatgagagctgcctgcctgctgctgcttggagagccccagacagtcgcttgaagaggtgtgtggatgtctcctagatcttgacttgctcctgaggaaatattgtgtgactgagtttcctgttatactgctctccaatccatcatgaaccagccagagtctgccaacgatcctgaacccctgtgtgcagtgtgtggccaagcccactccttggaggaaaaccacttctacagctatccagaggaagtggatgatgacctcatctgccacatctgcctgcaggctttgctggaccccctggacactccgtgtggacacacctactgcaccctctgcctcaccaacttcctggtggagaaggacttctgtcccatggaccgcaagcctctggttctgcagcactgcaagaagtccagcatcctggtcaacaaactcctcaacaagctactggtgacctgcccattcagggagcactgcacccaggtgttgcagcgctgtgacctcgagcatcactttcaaac

SEQ ID NO: 16223 - DNA, 2336 bp, Homo sapiens
  source 1..2336: mol_type = unassigned DNA
atggctgtccagacggctgtgcgagcctcacagccacggctccctcccctagacaaccctgcctacgtgtcctcggcagaggacgggcagccagcaatcagcccagtggactctggccggagcaaccgaactagggcacggccctttgagagatccactattagaagcagatcatttaaaaaaataaatcgagctttgagtgttcttcgaaggacaaagagcgggagtgcagttgccaaccatgccgaccagggcagggaaaattctgaaaacaccactgcccctgaagtctttccaaggttgtaccacctgattccagatggtgaaattaccagcatcaagatcaatcgagtagatcccagtgaaagcctctctattaggctggtgggaggtagcgaaaccccactggtccatatcattatccaacacatttatcgtgatggggtgatcgccagagacggccggctactgccaggagacatcattctaaaggtcaacgggatggacatcagcaatgtccctcacaactacgctgtgcgtctcctgcggcagccctgccaggtgctgtggctgactgtgatgcgtgaacagaagttccgcagcaggaacaatggacaggccccggatgcctacagaccccgagatgacagctttcatgtgattctcaacaaaagtagccccgaggagcagcttggaataaaactggtgcgcaaggtggatgagcctggggttttcatcttcaatgtgctggatggcggtgtggcatatcgacatggtcagcttgaggagaatgaccgtgtgttagccatcaatggacatgatcttcgatatggcagcccagaaagtgcggctcatctgattcaggccagtgaaagacgtgttcacctcgtcgtgtcccgccaggttcggcagcggagccctgacatctttcaggaagccggctggaacagcaatggcagctggtccccagggccaggggagaggagcaacactcccaagcccctccatcctacaattacttgtcatgagaaggtggtaaatatccaaaaagaccccggtgaatctctcggcatgaccgtcgcagggggagcatcacatagagaatgggatttgcctatctatgtcatcagtgttgagcccggaggagtcataagcagagatggaagaataaaaacaggtgacattttgttgaatgtggatggggtcgaactgacagaggtcagccggagtgaggcagtggcattattgaaaagaacatcatcctcgatagtactcaaagctttggaagtcaaagagtatgagccccaggaagactgcagcagcccagcagccctggactccaaccacaacatggccccacccagtgactggtccccatcctgggtcatgtggctggaattaccacggtgcttgtataactgtaaagatattgtattacgaagaaacacagctggaagtctgggcttctgcattgtaggaggttatgaagaatacaatggaaacaaaccttttttcatcaaatccattgttgaaggaacaccagcatacaatgatggaagaattagatgtggtgatattcttcttgctgtcaatggtagaagtacatcaggaatgatacatgcttgcttggcaagactgctgaaagaacttaaaggaagaattactctaactattgtttcttggcctggcacttttttatagaatcaatgatgggtcagaggaaaacagaaaaatcacaaataggctaagaagttgaaacactatatttatcttgtcagtttttatatttaaagaaagaatacattgtaaaaatgtcaggaaaagtatgatcatctaatgaaagccagttacacctcagaaaatatgattccaaaaaaattaaaactactagttttttttcagtgtggaggatttctcattactctacaacattgtttatattttttctattcaataaaaagccctaaaacaactaaaatgatttgtataccccactgaattcaagctgatttaaatttaaaatttggtatatgctgaagtctgccaagggtacattatggccatttttaatttacagctaaaatattttttaaaatgcattgctgagaaacgttgctttcatcaaacaagaataaatatttttcagaagttatagttgtcttttagtatgtgatactaattaagattacttttgtattatcactatttaaaagatcctagtaatttattctttcaaataccatgttatttgttaccatcaccgatgaatacctcctaggcttatccctaaaaatgctcgctcagagaattaattataaacttgttttgtttttagt

SEQ ID NO: 16224 - DNA, 4625 bp, Homo sapiens
  source 1..4625: mol_type = unassigned DNA
gtgcgcggcccgggcagccgcgctttcccaaaaaacacaccttgactttagtcagatacatcactgtctgttaaaggaaaccaagcgtgaagtggaagtctaacacatgaggatacagaattgattcaaaatgggaacaacaagtgatgagatggtgtctgtggaacagacctcctcctcttctctaaaccccctgtgttttgaatgtggccaacagcactggacaagagaaaaccatttgtacaattaccagaatgaagtggatgatgacctagtctgccatatttgccttcaacctctgctgcagccactagacacaccctgtggacatacattctgctacaagtgcctcagaaactttttacaagagaaagatttctgtccgttggaccggaaaagacttcattttaagttgtgcaagaagtctagtattctagttcataaactcctagacaaattattagttttatgtccattttcttcagtgtgcaaagatgtaatgcaacgttgtgatctggaggcacatctcaaaaacagatgtcctggagcttctcatcggagagttgccctggagagaaggaaaactagtagaactcaagcagagattgagaatgaaaatgggcccactctactagatcctgcaggtaccttatctccagaagcagactgtttggggacaggcgcagtgcctgtggagcggcacttgacatcagcgtctctttccacatggagtgaggagcctggccttgacaaccctgcctttgaggagagcgctggagctgacaccacacaacagccacttagtttaccagaaggagaaatcaccacgattgaaattcatcggtccaatccttacattcagttaggaatcagcattgtgggtggcaacgaaacacctttgattaacattgtcatccaggaggtctatcgggatggggtcattgccagagacgggagacttcttgctggagaccagattcttcaggtcaacaactacaatatcagcaatgtgtcccataactatgcccgagctgtcctttcccagccctgcaacacactgcatcttactgtgcttcgagagaggcgctttggcaaccgagcacacaaccattctgatagtaactctccacgagaagagattttccaagtggctcttcataaacgggactctggtgaacagcttggcattaaattggtgcgaaggacagatgagccaggggtttttattcttgacctgttggaaggggggttggctgcccaggacggcaggctaagcagcaatgaccgagtgctggccatcaatgggcacgacctgaagtatggaactccggagcttgctgcccagattattcaggccagtggagagagagtgaatttaacaattgctagaccagggaaaccccagcctggtaacaccattagagaagcaggaaatcatagcagcagcagccagcaccacacaccaccaccgtattatagcagaccaagctcacataaggatcttactcagtgtgttacatgccaagaaaaacacattactgtaaagaaggaaccacatgaatcccttggcatgaccgttgctgggggcaggggaagtaagagtggtgagctgcccatctttgtgaccagtgtgccaccccatggctgccttgcacgagatggcagaataaagagaggtgatgtgttgctaaatatcaacggcattgatttgaccaatttaagtcacagtgaggcagttgcaatgctgaaagccagtgccgcgtcccctgctgttgcccttaaagcacttgaggtccagattgttgaggaggcgactcagaacgcggaggagcagccgagtactttcagcgaaaatgagtatgatgccagttggtccccatcatgggtcatgtggcttgggcttcccagcacacttcatagctgccacgatatagttttacgaagaagttacttgggaagttggggctttagtatcgttggtggatatgaagagaaccacaccaatcagccttttttcattaaaactattgtcttgggaactcctgcttattatgatggaagattaaagtgtggtgacatgattgtggccgtaaatgggctgtcaaccgtgggcatgagccactctgcactagttcccatgttgaaggagcagaggaacaaagtcactctgaccgttatttgttggcctggcagccttgtatagattttggaaattggtttcaaatcttgcatcttccttttttagatttttgaaagaaaaccctttggtttcattgtgtttgtggtttaggagctgctgacactgctggtatacacagggccaaaacccactaagattgtccgtttatgtttatttaaatggtttcctaagttagttacatttcttttagcttggaaacagtcttccactaacctttgtgagtttatattttcagaattcagacttagttgttaaaatgttacctatggtaatgagcaaagctcacccaaactgtgccccagatggagtaaagaccttctggtgggtctttgttttcagtaactgaatcatagaacgagttctgtatccctcaggcctgatgtcagcaaagccagtaacaacagcgtgtactgccactgtcataaccaataccatgaatgaatatactttaaattttggtgataactgttccccatttttttttgaaccacagtctcactctcacccaggctggagtgcagtggcacaatctcagctcactgcaagctccgcctcctgggttcacgccattctcccacctcagcctcccgagtagctgggactacaggcgtgtgccaccatgcccagctaattttttgtacttttagtagagacggggtttcaccgtgttagccaggatggtctcgatctcctgaccttgtgatctgcccgcctcagcctcccaaagtgctgggattacaggtgtgagctgccgcacccggccgttcccattttttattggtgccaacatttcaaaacttcatactgtttataaactgattttctggtttatttctactgtaatctctcaatattcatagaagatgaagaaataagtctgacaacactaaagaaatttcttaatatactattattagaatagtagaggataaaagataatgttatccagttacaaaggaatttggatgataattataacttaatgttagagatggtaaagctgcacttacttgaacagcccaaaagcattaaaaatctatttccagaggaatgttttgctatgtagggaaattttgaagtagtttttgctaaaaaattatttctagagttgtgttattcttagcagtaatcttggctagaaatgtttttgtgatttatgcgattaaacgaaatgataaagataaaaccatattattaaatacctatatatcacagctaagtaggagaaagggagacctttttattttgttcaggtaggagtatttcttgtgtattttagaaacaattatttttcccattatttcttatgagattagttgtttcaagtaggagacagaaaagttctgttttgttggaaatgtaggttttagatgtatctttcagtcagctctcagtcactagactatttcatattttttgaaatgtttttgaaaattatgactagcccattttttgtcctttattcaacatacttatcctctgaacacataaataagtgaataagataaaaatatctttaccttattaatattatacatacttgaaaaaaatttcatttagaaacctagttcagaatctgagcaaatttacaagtgacctctgtaataaatggtattgataatcagagaatgtatttcagaatactacagtacaatatattatgaagcatgaccactttattttgaaacttagcaattgtattgctggggtttattgtatctgtagcatgtcactgattatttcagttagttttataatgatttttaaaaaacatatctatttggaataagatacagcaacaatcattgctactgacttgttcaaccccttagttacactgtatgatcaacatataacaagatacagtggaatggcccatacagtatattactgttgtgtgatgattggctttggaagcagtttgattttgaaatgctttgatattctaattgacatggaacaagttttttccctgctccccaaatagaattttgtaaccaactttgctatttttttaaagtttgtaagaatgtgtcatttcttggggagtagccatccatcaacaaatatcctgactgctactttgttatatacaaaatacttacattgaacctggtggcataatgagtattttgaaagaagaaatttcttcactctcatttttatagaaatcttggaatcagcttaagctgtagcttttatgacaaaagacagtcatttttggtcagagtgatatttggtgacggaaacttgttcataatttattgttactatagaactatttggattttctcatttttagttctgatagttaaatattttggtttgttctgtgccttcagtttaaattatttcaggatttttcagatgtttaaataatggtgtgaatcattcaggatggaaataaaagtcatcctttctgtaa

SEQ ID NO: 16225 - DNA, 4170 bp, Homo sapiens
  source 1..4170: mol_type = unassigned DNA
cggccccggcggtcgctccctggacccaacccgaggctgacccaggcccctgcccatgcggggcgcccctggctcggaagagtcccccgggccgggagcagctccaggcagcggccccggaggaagaggaagaagggacagtgctcagcttgggggacccggaccctcgccgcggcatttggagccgggggcagtcccgaactctgtgcttggcaccgccgctccgagtagggcagcgcctgccgggaccctgacccggaccccctgcgcctcgtaggcggcggcgccgccgcgccaccctgttcttccgtgtctccctctgcctggcggcagtcacggccaagaacctacattaagaaacgcattcagatgcatcagccgtttgtaaagcacctgtcgtgagccagagagtattatgagggaggccgaggacttcatgctccggacagagaaacggcgctgggattagggattgccacttctgagaggatgctgggaatctgcagggggagacggaaattcttggctgcctcgttgagtcttctctgcatcccagccatcacctggatttacctgttttctgggagcttcgaagatggaaagcccgtgtctctgtcaccgctggagtcccaggcacacagccccaggtacacggcctccagccagcgggagcgcgagagcctggaggtgcgcatgcgcgaggtggaggaggagaaccgcgccctccgcaggcagctcagcctggcccagggccgagccccatcccatcgccgaggcaaccactccaagacctactccatggaggagggcactggagacagcgagaaccttcgggctggcatcgtggcaggcaacagctccgagtgtgggcagcagccggtcgtggagaaatgcgagacaatccacgttgctattgtctgcgccggatacaatgccagccgggatgtcgtcaccctggtcaaatccgtcctgttccatagacggaaccctctgcacttccaccttattgctgactccattgcggagcagatcctggccacgctcttccagacctggatggtgcccgctgtgcgtgtggacttctacaatgcagacgagctcaagtctgaagtttcctggatccccaataaacattactctgggatttatggtctgatgaagcttgtcctgaccaagactcttcctgccaacctggagagagtcatcgtccttgacacggatatcacctttgccactgacattgcagagctgtgggctgtgttccacaagttcaaaggtcagcaagtcctgggcttggtggagaaccagagtgactggtaccttggaaacctgtggaaaaatcaccgcccatggccagcccttggaagaggctacaacacaggggtgatcctgttacttctggataagctgcggaagatgaaatgggagcagatgtggaggctgaccgcagagagggagctcatgggcatgctctctacatccttagctgaccaggatattttcaatgccgtcatcaaacaaaaccccttccttgtgtaccagctcccctgcttctggaatgtgcagctgtcagaccacacccgctccgagcagtgctacagagacgtgtctgatctaaagctccagaagcagctgtctgagctggacgaggacgacctgtgctatgagttccggcgagagcgcttcactgtccaccgcacccacctgtacttcctgcactacgagtatgagcctgcagcagacagcacggacgtcaccctggtcgctcagctgtccatggacaggctccagatgctggaggccatctgcaagcactgggaggggcccatcagcctggccctctacctgtcagacgccgaggcccagcagttcctccgctacgcacagggctctgaggtgcttatgagccgccacaacgtgggctaccacatcgtgtacaaggagggccagttctaccccgtgaacctgctgcgcaacgtggccatgaagcacatcagcactccctacatgttcctgtctgacattgacttcctgcccatgtatgggctctatgagtacctcaggaagtctgtcatccagctcgatcttgccaacaccaagaaagcaatgattgtccccgcgttcgagacactgcgctaccggctgtccttccccaagtcaaaagcggagttgctgtcaatgctggacatggggaccctcttcacattcaggtaccacgtctggacgaaaggccacgcacccacaaacttcgccaagtggcggaccgccaccacgccttaccgggttgagtgggaggccgattttgagccgtatgttgttgtgagacgtgactgcccggagtacgaccggaggtttgtaggctttggctggaacaaagtggctcatatcatggagctggatgtgcaggagtatgagttcattgtgctgcccaacgcctacatgatccacatgcctcatgcccccagcttcgacattaccaagttccgttccaacaagcaataccgcatctgtctcaaaaccctcaaggaagagtttcagcaggacatgtcccgccgctacggctttgctgccctgaaatatctcacagccgagaacaacagctagcaccaagaagcccaccactagggggagacatgctgtaggggaagtgccactcgctgtttggggcccggccttcaaattcaaaattgagccatgctttttcggtttgtttttatttatctctttggcccagccaagctgccctcactacagagaccttggacaaggatccagccagtccctctctgccccacaaccctgcattcccagaggttagctatgcagcccacctagatgagtctcttcaagaatgggaaatcaaggggtgacagggagtaaaagggttatcatcttactgcaaagccacaagatcagggcagggctttaggatgttctggatgctttttaataattatgcttcccatcataactggggagaaagggaagtcagggttctaggggttattcgtcccaggaaatagaagtgaaattgtctttattaagtgaaaactttcccctttgccctgcaatgtagctgggcattcaaacggagggcaaaccgatgatctaaaccaaccacttggaaaaacccaatggggacattgtaaccagagggtcctggaggtggggttgatgggtttccttatccccaaagtcactcctgttttgttttgtttttctttgggggttttgtttatttttggggctggcaatccaaaatagaaaatctgatcctttgaggctctaaaggaaaatcagctgcctctaccaaccaccctctatcagcagtggcccaggaaggaggtcaagcatcttcggccgatatttaaacatgggcagcttccttcaggatgatcaccgaggctcccgtgactttgaactccctactctccagaatccaggggctatagcgatggggactgcggaattacgagggctggctgttttacaccggtcacattttctattggcagtgactgattcatgggaaagggctttgaaggaactacttcagtgcacacacaaggtacgaacctctcaggcctttcgaagaactttcataattcatgaaagcccagttctgaagattcacgtatccatctggagacctacaggaagaaagtgattgggttcctctggttcttgcctgcttcactgtggatgggaagaggtgacaacctcagtctccctttgggacctgtccaagggtaggcaaccaccttcaccttcacacagattgaggagacactggactttttacccattttctttaatcttcaatattaatattgtgtttacattgatgagaacaagagttaatgccctaccctctgctgggctgtttgtattgagttgcaatgtgaccagcgaaagctgcatttaataaatgaaagtacagactgtttcttccccattcccctcccactcttgcaggaagctactgagacacaccttgacatagagagctaaattgcagtggataaacagcaacttcacactttctgttcccccattctatttttctcatcatttgaactttagccttttttttccccttttgcctgaagttagatcccactctgtctctaactcaaaccatcttcaagttttccattccgcatctttctc

SEQ ID NO: 16226 - DNA, 4409 bp, Homo sapiens
  source 1..4409: mol_type = unassigned DNA
cggccgcgctcgtctcgccgggctgttcgcgggcaggccctgccctgaagggacgaatcggcttggagcgcgggaggtggagtcggccccggcggtcgctccctggacccaacccgaggctgacccaggcccctgcccatgcggggcgcccctggctcggaagagtcccccgggccgggagcagctccaggcagcggccccggaggaagaggaagaagggacagtgctcagcttgggggacccggaccctcgccgcggcatttggagccgggggcagtcccgaactctgtgcttggcaccgccgctccgagtagggcagcgcctgccgggaccctgacccggaccccctgcgcctcgtaggcggcggcgccgccgcgccaccctgttcttccgtgtctccctctgcctggcggcagtcacggccaagaacctacattaagaaacgcattcagatgcatcagccgtttgtaaagcacctgtcgtgagccagagagtattatgagggaggccgaggacttcatgctccggacagagaaacggcgctgggattagggattgccacttctgagaggatgctgggaatctgcagggggagacggaaattcttggctgcctcgttgagtcttctctgcatcccagccatcacctggatttacctgttttctgggagcttcgaagatggaaagcccgtgtctctgtcaccgctggagtcccaggcacacagccccaggtacacggcctccagccagcgggagcgcgagagcctggaggtgcgcatgcgcgaggtggaggaggagaaccgcgccctccgcaggcagctcagcctggcccagggccgagccccatcccatcgccgaggcaaccactccaagacctactccatggaggagggcactggagacagcgagaaccttcgggctggcatcgtggcaggcaacagctccgagtgtgggcagcagccggtcgtggagaaatgcgagacaatccacgttgctattgtctgcgccggatacaatgccagccgggatgtcgtcaccctggtcaaatccgtcctgttccatagacggaaccctctgcacttccaccttattgctgactccattgcggagcagatcctggccacgctcttccagacctggatggtgcccgctgtgcgtgtggacttctacaatgcagacgagctcaagtctgaagtttcctggatccccaataaacattactctgggatttatggtctgatgaagcttgtcctgaccaagactcttcctgccaacctggagagagtcatcgtccttgacacggatatcacctttgccactgacattgcagagctgtgggctgtgttccacaagttcaaaggtcagcaagtcctgggcttggtggagaaccagagtgactggtaccttggaaacctgtggaaaaatcaccgcccatggccagcccttggaagaggctacaacacaggggtgatcctgttacttctggataagctgcggaagatgaaatgggagcagatgtggaggctgaccgcagagagggagctcatgggcatgctctctacatccttagctgaccaggatattttcaatgccgtcatcaaacaaaaccccttccttgtgtaccagctcccctgcttctggaatgtgcagctgtcagaccacacccgctccgagcagtgctacagagacgtgtctgatctaaaggtcattcactggaactcccccaagaagctccgggtgaagaacaagcatgtggagttttttcgcaacctctacctgaccttcctggagtatgacggcaatcttctgaggcgggaactgtttggctgccccagtgaggctgatgtcaacagtgaaaacctccagaagcagctgtctgagctggacgaggacgacctgtgctatgagttccggcgagagcgcttcactgtccaccgcacccacctgtacttcctgcactacgagtatgagcctgcagcagacagcacggacgtcaccctggtcgctcagctgtccatggacaggctccagatgctggaggccatctgcaagcactgggaggggcccatcagcctggccctctacctgtcagacgccgaggcccagcagttcctccgctacgcacagggctctgaggtgcttatgagccgccacaacgtgggctaccacatcgtgtacaaggagggccagttctaccccgtgaacctgctgcgcaacgtggccatgaagcacatcagcactccctacatgttcctgtctgacattgacttcctgcccatgtatgggctctatgagtacctcaggaagtctgtcatccagctcgatcttgccaacaccaagaaagcaatgattgtccccgcgttcgagacactgcgctaccggctgtccttccccaagtcaaaagcggagttgctgtcaatgctggacatggggaccctcttcacattcaggtaccacgtctggacgaaaggccacgcacccacaaacttcgccaagtggcggaccgccaccacgccttaccgggttgagtgggaggccgattttgagccgtatgttgttgtgagacgtgactgcccggagtacgaccggaggtttgtaggctttggctggaacaaagtggctcatatcatggagctggatgtgcaggagtatgagttcattgtgctgcccaacgcctacatgatccacatgcctcatgcccccagcttcgacattaccaagttccgttccaacaagcaataccgcatctgtctcaaaaccctcaaggaagagtttcagcaggacatgtcccgccgctacggctttgctgccctgaaatatctcacagccgagaacaacagctagcaccaagaagcccaccactagggggagacatgctgtaggggaagtgccactcgctgtttggggcccggccttcaaattcaaaattgagccatgctttttcggtttgtttttatttatctctttggcccagccaagctgccctcactacagagaccttggacaaggatccagccagtccctctctgccccacaaccctgcattcccagaggttagctatgcagcccacctagatgagtctcttcaagaatgggaaatcaaggggtgacagggagtaaaagggttatcatcttactgcaaagccacaagatcagggcagggctttaggatgttctggatgctttttaataattatgcttcccatcataactggggagaaagggaagtcagggttctaggggttattcgtcccaggaaatagaagtgaaattgtctttattaagtgaaaactttcccctttgccctgcaatgtagctgggcattcaaacggagggcaaaccgatgatctaaaccaaccacttggaaaaacccaatggggacattgtaaccagagggtcctggaggtggggttgatgggtttccttatccccaaagtcactcctgttttgttttgtttttctttgggggttttgtttatttttggggctggcaatccaaaatagaaaatctgatcctttgaggctctaaaggaaaatcagctgcctctaccaaccaccctctatcagcagtggcccaggaaggaggtcaagcatcttcggccgatatttaaacatgggcagcttccttcaggatgatcaccgaggctcccgtgactttgaactccctactctccagaatccaggggctatagcgatggggactgcggaattacgagggctggctgttttacaccggtcacattttctattggcagtgactgattcatgggaaagggctttgaaggaactacttcagtgcacacacaaggtacgaacctctcaggcctttcgaagaactttcataattcatgaaagcccagttctgaagattcacgtatccatctggagacctacaggaagaaagtgattgggttcctctggttcttgcctgcttcactgtggatgggaagaggtgacaacctcagtctccctttgggacctgtccaagggtaggcaaccaccttcaccttcacacagattgaggagacactggactttttacccattttctttaatcttcaatattaatattgtgtttacattgatgagaacaagagttaatgccctaccctctgctgggctgtttgtattgagttgcaatgtgaccagcgaaagctgcatttaataaatgaaagtacagactgtttcttccccattcccctcccactcttgcaggaagctactgagacacaccttgacatagagagctaaattgcagtggataaacagcaacttcacactttctgttcccccattctatttttctcatcatttgaactttagccttttttttccccttttgcctgaagttagatcccactctgtctctaactcaaaccatcttcaagttttccattccgcatctttctc

SEQ ID NO: 16227 - DNA, 4138 bp, Homo sapiens
  source 1..4138: mol_type = unassigned DNA
gggggcgcggccgcgctcgtctcgccgggctgttcgcgggcaggccctgccctgaagggacgaatcggcttggagcgcgggaggtggagtcggccccggcggtcgctccctggacccaacccgaggctgacccaggcccctgcccatgcggggcgcccctggctcggaagagtcccccgggccgggagcagctccaggcagcggccccggaggaagaggaagaagggacagtgctcagcttgggggacccggaccctcgccgcggcatttggagccgggggcagtcccgaactctgtgcttggcaccgccgctccgagtagggcagcgcctgccgggaccctgacccggaccccctgcgcctcgtaggcggcggcgccgccgcgccaccctgttcttccgtgtctccctctgcctggcggcagtcacggccaagagagtattatgagggaggccgaggacttcatgctccggacagagaaacggcgctgggattagggattgccacttctgagaggatgctgggaatctgcagggggagacggaaattcttggctgcctcgttgagtcttctctgcatcccagccatcacctggatttacctgttttctgggagcttcgaagatggaaagcccgtgtctctgtcaccgctggagtcccaggcacacagccccaggtacacggcctccagccagcgggagcgcgagagcctggaggtgcgcatgcgcgaggtggaggaggagaaccgcgccctccgcaggcagctcagcctggcccagggccgagccccatcccatcgccgaggcaaccactccaagacctactccatggaggagggcactggagacagcgagaaccttcgggctggcatcgtggcaggcaacagctccgagtgtgggcagcagccggtcgtggagaaatgcgagacaatccacgttgctattgtctgcgccggatacaatgccagccgggatgtcgtcaccctggtcaaatccgtcctgttccatagacggaaccctctgcacttccaccttattgctgactccattgcggagcagatcctggccacgctcttccagacctggatggtgcccgctgtgcgtgtggacttctacaatgcagacgagctcaagtctgaagtttcctggatccccaataaacattactctgggatttatggtctgatgaagcttgtcctgaccaagactcttcctgccaacctggagagagtcatcgtccttgacacggatatcacctttgccactgacattgcagagctgtgggctgtgttccacaagttcaaaggtcagcaagtcctgggcttggtggagaaccagagtgactggtaccttggaaacctgtggaaaaatcaccgcccatggccagcccttggaagaggctacaacacaggggtgatcctgttacttctggataagctgcggaagatgaaatgggagcagatgtggaggctgaccgcagagagggagctcatgggcatgctctctacatccttagctgaccaggatattttcaatgccgtcatcaaacaaaaccccttccttgtgtaccagctcccctgcttctggaatgtgcagctgtcagaccacacccgctccgagcagtgctacagagacgtgtctgatctaaaggtcattcactggaactcccccaagaagctccgggtgaagaacaagcatgtggagttttttcgcaacctctacctgaccttcctggagtatgacggcaatcttctgaggcgggaactgtttggctgccccagtgaggctgatgtcaacagtgaaaacctccagaagcagctgtctgagctggacgaggacgacctgtgctatgagttccggcgagagcgcttcactgtccaccgcacccacctgtacttcctgcactacgagtatgagcctgcagcagacagcacggacgtcaccctggtcgctcagctgtccatggacaggctccagatgctggaggccatctgcaagcactgggaggggcccatcagcctggccctctacctgtcagacgccgaggcccagcagttcctccgctacgcacagggctctgaggtgcttatgagccgccacaacgtgggctaccacatcgtgtacaaggagggccagttctaccccgtgaacctgctgcgcaacgtggccatgaagcacatcagcactccctacatgttcctgtctgacattgacttcctgcccatgtatgggctctatgagtacctcaggaagtctgtcatccagctcgatcttgccaacaccaagaaagcaatgattgtccccgcgttcgagacactgcgctaccggctgtccttccccaagtcaaaagcggagttgctgtcaatgctggacatggggaccctcttcacattcaggtaccacgtctggacgaaaggccacgcacccacaaacttcgccaagtggcggaccgccaccacgccttaccgggttgagtgggaggccgattttgagccgtatgttgttgtgagacgtgactgcccggagtacgaccggaggtttgtaggctttggctggaacaaagtggctcatatcatggagctggatgtgcaggagtatgagttcattgtgctgcccaacgcctacatgatccacatgcctcatgcccccagcttcgacattaccaagttccgttccaacaagcaataccgcatctgtctcaaaaccctcaaggaagagtttcagcaggacatgtcccgccgctacggctttgctgccctgaaatatctcacagccgagaacaacagctagcaccaagaagcccaccactagggggagacatgctgtaggggaagtgccactcgctgtttggggcccggccttcaaattcaaaattgagccatgctttttcggtttgtttttatttatctctttggcccagccaagctgccctcactacagagaccttggacaaggatccagccagtccctctctgccccacaaccctgcattcccagaggttagctatgcagcccacctagatgagtctcttcaagaatgggaaatcaaggggtgacagggagtaaaagggttatcatcttactgcaaagccacaagatcagggcagggctttaggatgttctggatgctttttaataattatgcttcccatcataactggggagaaagggaagtcagggttctaggggttattcgtcccaggaaatagaagtgaaattgtctttattaagtgaaaactttcccctttgccctgcaatgtagctgggcattcaaacggagggcaaaccgatgatctaaaccaaccacttggaaaaacccaatggggacattgtaaccagagggtcctggaggtggggttgatgggtttccttatccccaaagtcactcctgttttgttttgtttttctttgggggttttgtttatttttggggctggcaatccaaaatagaaaatctgatcctttgaggctctaaaggaaaatcagctgcctctaccaaccaccctctatcagcagtggcccaggaaggaggtcaagcatcttcggccgatatttaaacatgggcagcttccttcaggatgatcaccgaggctcccgtgactttgaactccctactctccagaatccaggggctatagcgatggggactgcggaattacgagggctggctgttttacaccggtcacattttctattggcagtgactgattcatgggaaagggctttgaaggaactacttcagtgcacacacaaggtacgaacctctcaggcctttcgaagaactttcataattcatgaaagcccagttctgaagattcacgtatccatctggagacctacaggaagaaagtgattgggttcctctggttcttgcctgcttcactgtggatgggaagaggtgacaacctcagtctccctttgggacctgtccaagggtaggcaaccaccttcaccttcacacagattgaggagacactggactttttacccattttctttaatcttcaatattaatattgtgtttacattgatgagaacaagagttaatgccctaccctctgctgggctgtttgtattgagttgcaatgtgaccagcgaaagctgcatttaataaatgaaagtacagactgtttcttcccca

SEQ ID NO: 16228 - DNA, 3955 bp, Homo sapiens
  source 1..3955: mol_type = unassigned DNA
gctcgtctcgccgggctgttcgcgggcaggccctgccctgaagggacgaatcggcttggagcgcgggaggtggagtcggccccggcggtcgctccctggacccaacccgaggctgacccaggcccctgcccatgcggggcgcccctggctcggaagagtcccccgggccgggagcagctccaggcagcggccccggaggaagaggaagaagggacagtgctcagcttgggggacccggaccctcgccgcggcatttggagccgggggcagtcccgaactctgtgcttggcaccgccgctccgagtagggcagcgcctgccgggaccctgacccggaccccctgcgcctcgtaggcggcggcgccgccgcgccaccctgttcttccgtgtctccctctgcctggcggcagtcacggccaagagagtattatgagggaggccgaggacttcatgctccggacagagaaacggcgctgggattagggattgccacttctgagaggatgctgggaatctgcagggggagacggaaattcttggctgcctcgttgagtcttctctgcatcccagccatcacctggatttacctgttttctgggagcttcgaagatggaaagcccgtgtctctgtcaccgctggagtcccaggcacacagccccaggtacacggcctccagccagcgggagcgcgagagcctggaggtgcgcatgcgcgaggtggaggaggagaaccgcgccctccgcaggcagctcagcctggcccagggccgagccccatcccatcgccgaggcaaccactccaagacctactccatggaggagggcactggagacagcgagaaccttcgggctggcatcgtggcaggcaacagctccgagtgtgggcagcagccggtcgtggagaaatgcgagacaatccacgttgctattgtctgcgccggatacaatgccagccgggatgtcgtcaccctggtcaaatccgtcctgttccatagacggaaccctctgcacttccaccttattgctgactccattgcggagcagatcctggccacgctcttccagacctggatggtgcccgctgtgcgtgtggacttctacaatgcagacgagctcaagtctgaagtttcctggatccccaataaacattactctgggatttatggtctgatgaagcttgtcctgaccaagactcttcctgccaacctggagagagtcatcgtccttgacacggatatcacctttgccactgacattgcagagctgtgggctgtgttccacaagttcaaaggtcagcaagtcctgggcttggtggagaaccagagtgactggtaccttggaaacctgtggaaaaatcaccgcccatggccagcccttggaagaggctacaacacaggggtgatcctgttacttctggataagctgcggaagatgaaatgggagcagatgtggaggctgaccgcagagagggagctcatgggcatgctctctacatccttagctgaccaggatattttcaatgccgtcatcaaacaaaaccccttccttgtgtaccagctcccctgcttctggaatgtgcagctgtcagaccacacccgctccgagcagtgctacagagacgtgtctgatctaaagctccagaagcagctgtctgagctggacgaggacgacctgtgctatgagttccggcgagagcgcttcactgtccaccgcacccacctgtacttcctgcactacgagtatgagcctgcagcagacagcacggacgtcaccctggtcgctcagctgtccatggacaggctccagatgctggaggccatctgcaagcactgggaggggcccatcagcctggccctctacctgtcagacgccgaggcccagcagttcctccgctacgcacagggctctgaggtgcttatgagccgccacaacgtgggctaccacatcgtgtacaaggagggccagttctaccccgtgaacctgctgcgcaacgtggccatgaagcacatcagcactccctacatgttcctgtctgacattgacttcctgcccatgtatgggctctatgagtacctcaggaagtctgtcatccagctcgatcttgccaacaccaagaaagcaatgattgtccccgcgttcgagacactgcgctaccggctgtccttccccaagtcaaaagcggagttgctgtcaatgctggacatggggaccctcttcacattcaggtaccacgtctggacgaaaggccacgcacccacaaacttcgccaagtggcggaccgccaccacgccttaccgggttgagtgggaggccgattttgagccgtatgttgttgtgagacgtgactgcccggagtacgaccggaggtttgtaggctttggctggaacaaagtggctcatatcatggagctggatgtgcaggagtatgagttcattgtgctgcccaacgcctacatgatccacatgcctcatgcccccagcttcgacattaccaagttccgttccaacaagcaataccgcatctgtctcaaaaccctcaaggaagagtttcagcaggacatgtcccgccgctacggctttgctgccctgaaatatctcacagccgagaacaacagctagcaccaagaagcccaccactagggggagacatgctgtaggggaagtgccactcgctgtttggggcccggccttcaaattcaaaattgagccatgctttttcggtttgtttttatttatctctttggcccagccaagctgccctcactacagagaccttggacaaggatccagccagtccctctctgccccacaaccctgcattcccagaggttagctatgcagcccacctagatgagtctcttcaagaatgggaaatcaaggggtgacagggagtaaaagggttatcatcttactgcaaagccacaagatcagggcagggctttaggatgttctggatgctttttaataattatgcttcccatcataactggggagaaagggaagtcagggttctaggggttattcgtcccaggaaatagaagtgaaattgtctttattaagtgaaaactttcccctttgccctgcaatgtagctgggcattcaaacggagggcaaaccgatgatctaaaccaaccacttggaaaaacccaatggggacattgtaaccagagggtcctggaggtggggttgatgggtttccttatccccaaagtcactcctgttttgttttgtttttctttgggggttttgtttatttttggggctggcaatccaaaatagaaaatctgatcctttgaggctctaaaggaaaatcagctgcctctaccaaccaccctctatcagcagtggcccaggaaggaggtcaagcatcttcggccgatatttaaacatgggcagcttccttcaggatgatcaccgaggctcccgtgactttgaactccctactctccagaatccaggggctatagcgatggggactgcggaattacgagggctggctgttttacaccggtcacattttctattggcagtgactgattcatgggaaagggctttgaaggaactacttcagtgcacacacaaggtacgaacctctcaggcctttcgaagaactttcataattcatgaaagcccagttctgaagattcacgtatccatctggagacctacaggaagaaagtgattgggttcctctggttcttgcctgcttcactgtggatgggaagaggtgacaacctcagtctccctttgggacctgtccaagggtaggcaaccaccttcaccttcacacagattgaggagacactggactttttacccattttctttaatcttcaatattaatattgtgtttacattgatgagaacaagagttaatgccctaccctctgctgggctgtttgtattgagttgcaatgtgaccagcgaaagctgcatttaataaatgaaagtacagac

SEQ ID NO: 16229 - DNA, 773 bp, Homo sapiens
  source 1..773: mol_type = unassigned DNA
ccccttgttttcagcgcgttctggaacagagctgcacgtcagaggaagaactgagcagccttcgagctaaaagacttggcattaaactttgacactttaatggtctctaggatattagatagtattttttcatataatgttcttctccgacacggtaatggcatcagaaacagaatctgctatgcctgccaacgtgcacggtgaggctcatcgccgcagagaacctacattaagaaacgcattcagatgcatcagccgtttgtaaagcacctgtcgtgagccagagagtattatgagggaggccgaggacttcatgctccggacagagaaacggcgctgggattagggattgccacttctgagaggatgctgggaatctgcagggggagacggaaattcttggctgcctcgttgagtcttctctgcatcccagccatcacctggatttacctgttttctgggagcttcgaagatggaaagcccgtgtctctgtcaccgctggagtcccaggcacacagccccaggtacacggcctccagccagcgggagcgcgagagcctggaggtgcgcatgcgcgaggtggaggaggagaaccgcgccctccgcaggcagctcagcctggcccagggccgagccccatcccatcgccgaggcaaccactccaagacctactccatggaggagggcactggagacagcgagaaccttcgggctggcatcgtggcaggcaacagctccgagtgtgggcagcagccggtcgtggagaaatgcga

SEQ ID NO: 16230 - DNA, 568 bp, Homo sapiens
  source 1..568: mol_type = unassigned DNA
aaataactccacagcatgtctcattaggccaggaacactccagctaatcgaggcgtgcctttgtcgtgcgctgctcgtgccaggggagttaaaaaaagaaataggcctgatcccaagggtgtgggcagggcagagataataaacccaaatacaaagtcaggccacccaggaatgaggtggtgtgctctatcggggccggattcccccagctccagatcatctggccaaatctgcaccctcctcccgggcctcccttttgctggggatggtttgggcagagaacctacattaagaaacgcattcagatgcatcagccgtttgtaaagcacctgtcgtgagccagagagtattatgagggaggccgaggacttcatgctccggacagagaaacggcgctgggattagggattgccacttctgagaggatgctgggaatctgcagggggagacggaaattcttggctgcctcgttgagtcttctctgcatcccagccatcacctggatttacctgttttctgggagcttcgaagatggaaagcccgtgtctctgtcaccgctggagtccca

SEQ ID NO: 16231 - DNA, 559 bp, Homo sapiens
  source 1..559: mol_type = unassigned DNA
agatttgacagtcaaggatcctcatggcagcatggagaggccaggcgtgtctgcgtggccattctgtggagagtattatgagggaggccgaggacttcatgctccggacagagaaacggcgctgggattagggattgccacttctgagaggatgctgggaatctgcagggggagacggaaattcttggctgcctcgttgagtcttctctgcatcccagccatcacctggatttacctgttttctgggagcttcgaagatggaaagcccgtgtctctgtcaccgctggagtcccaggcacacagccccaggtacacggcctccagccagcgggagcgcgagagcctggaggtgcgcatgcgcgaggtggaggaggagaaccgcgccctccgcaggcagctcagcctggcccagggccgagccccatcccatcgccgaggcaaccactccaagacctactccatggaggagggcactggagacagcgagaaccttcgggctggcatcgtggcaggcaacagctccgagtgtgggcagcagccggtcgtggagaaatgcgag

SEQ ID NO: 16232 - DNA, 560 bp, Homo sapiens
  source 1..560: mol_type = unassigned DNA
attcagaacagactagacaaataactccacagcatgtctcattaggccaggaacactccagctaatcgaggcgtgcctttgtcgtgcgctgctcgtgccaggggagttaaaaaaagaaataggcctgatcccaagggtgtgggcagggcagagataataaacccaaatacaaagtcaggccacccaggaatgaggtggtgtgctctatcggggccggattcccccagctccagatcatctggccaaatctgcaccctcctcccgggcctcccttttgctggggatggtttgggcagagagagtattatgagggaggccgaggacttcatgctccggacagagaaacggcgctgggattagggattgccacttctgagaggatgctgggaatctgcagggggagacggaaattcttggctgcctcgttgagtcttctctgcatcccagccatcacctggatttacctgttttctgggagcttcgaagatggaaagcccgtgtctctgtcaccgctggagtcccaggcacacagccccaggtacacggcctccagccagcgg

SEQ ID NO: 16233 - DNA, 562 bp, Homo sapiens
  source 1..562: mol_type = unassigned DNA
aagaatcttttccatttctgttgaatgagggggcttgagaaaaagctcacgaaattaaaaggagaatgaagacgcttctgaagggagctcgaacctacattaagaaacgcattcagatgcatcagccgtttgtaaagcacctgtcgtgagccagagagtattatgagggaggccgaggacttcatgctccggacagagaaacggcgctgggattagggattgccacttctgagaggatgctgggaatctgcagggggagacggaaattcttggctgcctcgttgagtcttctctgcatcccagccatcacctggatttacctgttttctgggagcttcgaagatggaaagcccgtgtctctgtcaccgctggagtcccaggcacacagccccaggtacacggcctccagccagcgggagcgcgagagcctggaggtgcgcatgcgcgaggtggaggaggagaaccgcgccctccgcaggcagctcagcctggcccagggccgagccccatcccatcgccgaggcaaccactccaagacctactccatggaggagggcactgg

SEQ ID NO: 16234 - DNA, 2533 bp, Homo sapiens
  source 1..2533: mol_type = unassigned DNA
gcagttaacttatcccgaagctccaaagcaaacgtcttttacttcttcgccggggacgctgctgtaccaccgctgcctccctttcgcattctgctgggctcggtcagccgctgagattagagagtattatgagggaggccgaggacttcatgctccggacagagaaacggcgctgggattagggattgccacttctgagaggatgctgggaatctgcagggggagacggaaattcttggctgcctcgttgagtcttctctgcatcccagccatcacctggatttacctgttttctgggagcttcgaagatggaaagcccgtgtctctgtcaccgctggagtcccaggcacacagccccaggtacacggcctccagccagcgggagcgcgagagcctggaggtgcgcatgcgcgaggtggaggaggagaaccgcgccctccgcaggcagctcagcctggcccagggccgagccccatcccatcgccgaggcaaccactccaagacctactccatggaggagggcactggagacagcgagaaccttcgggctggcatcgtggcaggcaacagctccgagtgtgggcagcagccggtcgtggagaaatgcgagacaatccacgttgctattgtctgcgccggatacaatgccagccgggatgtcgtcaccctggtcaaatccgtcctgttccatagacggaaccctctgcacttccaccttattgctgactccattgcggagcagatcctggccacgctcttccagacctggatggtgcccgctgtgcgtgtggacttctacaatgcagacgagctcaagtctgaagtttcctggatccccaataaacattactctgggatttatggtctgatgaagcttgtcctgaccaagactcttcctgccaacctggagagagtcatcgtccttgacacggatatcacctttgccactgacattgcagagctgtgggctgtgttccacaagttcaaaggtcagcaagtcctgggcttggtggagaaccagagtgactggtaccttggaaacctgtggaaaaatcaccgcccatggccagcccttggaagaggctacaacacaggggtgatcctgttacttctggataagctgcggaagatgaaatgggagcagatgtggaggctgaccgcagagagggagctcatgggcatgctctctacatccttagctgaccaggatattttcaatgccgtcatcaaacaaaaccccttccttgtgtaccagctcccctgcttctggaatgtgcagctgtcagaccacacccgctccgagcagtgctacagagacgtgtctgatctaaaggtcattcactggaactcccccaagaagctccgggtgaagaacaagcatgtggagttttttcgcaacctctacctgaccttcctggagtatgacggcaatcttctgaggcgggaactgtttggctgccccagtgaggctgatgtcaacagtgaaaacctccagaagcagctgtctgagctggacgaggacgacctgtgctatgagttccggcgagagcgcttcactgtccaccgcacccacctgtacttcctgcactacgagtatgagcctgcagcagacagcacggacgtcaccctggtcgctcagctgtccatggacaggctccagatgctggaggccatctgcaagcactgggaggggcccatcagcctggccctctacctgtcagacgccgaggcccagcagttcctccgctacgcacagggctctgaggtgcttatgagccgccacaacgtgggctaccacatcgtgtacaaggagggccagttctaccccgtgaacctgctgcgcaacgtggccatgaagcacatcagcactccctacatgttcctgtctgacattgacttcctgcccatgtatgggctctatgagtacctcaggtaccacgtctggacgaaaggccacgcacccacaaacttcgccaagtggcggaccgccaccacgccttaccgggttgagtgggaggccgattttgagccgtatgttgttgtgagacgtgactgcccggagtacgaccggaggtttgtaggctttggctggaacaaagtggctcatatcatggagctggatgtgcaggagtatgagttcattgtgctgcccaacgcctacatgatccacatgcctcatgcccccagcttcgacattaccaagttccgttccaacaagcaataccgcatctgtctcaaaaccctcaaggaagagtttcagcaggacatgtcccgccgctacggctttgctgccctgaaatatctcacagccgagaacaacagctagcaccaagaagcccaccactagggggagacatgctgtaggggaagtgccactcgctgtttggggcccggccttcaaattcaaaattgagccatgctttttcggtttgtttttatttatctctttggcccagccaagctgccctcactacagagaccttggacaaggatccagccagtccctctctgccccacaaccctgcattcccag

SEQ ID NO: 16235 - DNA, 2008 bp, Homo sapiens
  source 1..2008: mol_type = unassigned DNA
atgaaaggcaaatgacttttcaaacattctgcagctgggatgacttctttttttaattttttaaaatatgtcaaggtgatttgtaatccacagcaaaatgttaatatggtctgaagtttcctggatccccaataaacattactctgggatttatggtctgatgaagcttgtcctgaccaagactcttcctgccaacctggagagagtcatcgtccttgacacggatatcacctttgccactgacattgcagagctgtgggctgtgttccacaagttcaaaggtcagcaagtcctgggcttggtggagaaccagagtgactggtaccttggaaacctgtggaaaaatcaccgcccatggccagcccttggaagaggctacaacacaggggtgatcctgttacttctggataagctgcggaagatgaaatgggagcagatgtggaggctgaccgcagagagggagctcatgggcatgctctctacatccttagctgaccaggatattttcaatgccgtcatcaaacaaaaccccttccttgtgtaccagctcccctgcttctggaatgtgcagctgtcagaccacacccgctccgagcagtgctacagagacgtgtctgatctaaaggtcattcactggaactcccccaagaagctccgggtgaagaacaagcatgtggagttttttcgcaacctctacctgaccttcctggagtatgacggcaatcttctgaggcgggaactgtttggctgccccagtgaggctgatgtcaacagtgaaaacctccagaagcagctgtctgagctggacgaggacgacctgtgctatgagttccggcgagagcgcttcactgtccaccgcacccacctgtacttcctgcactacgagtatgagcctgcagcagacagcacggacgtcaccctggtcgctcagctgtccatggacaggctccagatgctggaggccatctgcaagcactgggaggggcccatcagcctggccctctacctgtcagacgccgaggcccagcagttcctccgctacgcacagggctctgaggtgcttatgagccgccacaacgtgggctaccacatcgtgtacaaggagggccagttctaccccgtgaacctgctgcgcaacgtggccatgaagcacatcagcactccctacatgttcctgtctgacattgacttcctgcccatgtatgggctctatgagtacctcaggaagtctgtcatccagctcgatcttgccaacaccaagaaagcaatgattgtccccgcgttcgagacactgcgctaccggctgtccttccccaagtcaaaagcggagttgctgtcaatgctggacatggggaccctcttcacattcaggtaccacgtctggacgaaaggccacgcacccacaaacttcgccaagtggcggaccgccaccacgccttaccgggttgagtgggaggccgattttgagccgtatgttgttgtgagacgtgactgcccggagtacgaccggaggtttgtaggctttggctggaacaaagtggctcatatcatggagctggatgtgcaggagtatgagttcattgtgctgcccaacgcctacatgatccacatgcctcatgcccccagcttcgacattaccaagttccgttccaacaagcaataccgcatctgtctcaaaaccctcaaggaagagtttcagcaggacatgtcccgccgctacggctttgctgccctgaaatatctcacagccgagaacaacagctagcaccaagaagcccaccactagggggagacatgctgtaggggaagtgccactcgctgtttggggcccggccttcaaattcaaaattgagccatgctttttcggtttgtttttatttatctctttggcccagccaagctgccctcactacagagaccttggacaaggatccagccagtccctctctgccccacaaccctgcattcccagaggttagctatgcagcccacctagatgagtctcttc

SEQ ID NO: 16236 - DNA, 1851 bp, Homo sapiens
  source 1..1851: mol_type = unassigned DNA
ggacagcctcgcgctgggattggctggcctcgcgcgagcgccggcgcggagtggctggcgaggttttagagggagtcccgctctccaattaaagcggcccagctgcgcctggctgcgcacagagctccctcccaggcccgcgaacttggccattcagccgccgctgtccccgctgcgcgccctcgcgcctctgcctgagaagccaggcgctgttcccccaccccagaagaggatggcaaaggtggctaaggacctcaacccaggagttaaaaagatgtccctgggccagctgcagtcagcaagaggtgtggcatgtttgggatgcaaggggacgtgttcgggcttcgagccacattcatggaggaaaatatgcaagtcttgcaaatgcagccaagaggaccactgcctaacatctgacctagaagacgatcggaaaattggccgcttgctgatggactccaagtattccaccctcactgctcgggtgaaaggcggggacggcatccggatttacaagaggaaccggatgatcatgaccaaccctattgctactgggaaagatcccacttttgacaccatcacctacgagtgggctccccctggagtcacccagaaactgggactgcagtacatggagctcatccccaaggagaagcagccagtgacaggcacagagggtgccttttaccgccgccgccagctcatgcaccagctccccatctatgaccaggatccctcgcgctgccgtggacttttggagaatgagttgaaactgatggaagaatttgtcaagcaatataagagcgaggccctcggcgtgggagaagtggccctcccggggcagggtggcttgcccaaggaggaggggaagcagcaggaaaagccagagggggcagagaccactgctgctaccaccaacggcagtctcagtgacccgtccaaagaagtggaatacgtctgcgagctctgcaagggagcggcccctcctgacagccccgtggtctactcggacagggcaggctacaacaagcagtggcaccccacctgctttgtgtgtgccaagtgctccgagccgctggtggacctcatctacttctggaaggatggtgcaccctggtgcggccgccattactgcgagagtctgcggccccggtgctccggctgcgatgagataatattcgctgaggactaccagcgtgtggaagatctggcctggcaccgaaagcactttgtctgtgagggttgtgagcagctgctgagcggccgggcgtacatcgtcaccaagggtcagcttctgtgcccaacttgcagcaagtccaaacgctcctgaagggctgcccacccacagccagaatccacaggatcccaccgagaaggagagccaggtgtgccgagaccatcctaagggtccgatgtgacagcaagcaagtgaaataaacaatgatttgcttttcagtgagaatatatatatgagatatatatagatatatattctaggttgggtggtggtagatccttgagggtcagtagtttcaaaaccaaaaatattctaagaagtcttaggatggagttccttttctttctgttgttgtttcccagctacaaccaactaaagacacaaatggcgttctgcaaggggactctgggaggagttttccagaatgcaattccgagtgagcaaatcgcatagctgtagaatgtgcgtgcttttttgtggacacaggagctcctccaggagcaggctgggatcccaactatcgcttgttgcctctttttcaagtggaatttgaattttaaataaacaactttttttggcatgataaacagatcaataaaagttttgtgaattcc

SEQ ID NO: 16237 - DNA, 1061 bp, Homo sapiens
  source 1..1061: mol_type = unassigned DNA
ccctcgcgcctctgcctgagaagccaggcgctgttcccccaccccagaagaggatggcaaaggtggctaaggacctcaacccaggagttaaaaagatgtccctgggccagctgcagtcagcaagaggtgtggcatgtttgggatgcaaggggacgtgttcgggcttcgagccacattcatggagggactgcagtacatggagctcatccccaaggagaagcagccagtgacaggcacagagggtgccttttaccgccgccgccagctcatgcaccagctccccatctatgaccaggatccctcgcgctgccgtggacttttggagaatgagttgaaactgatggaagaatttgtcaagcaatataagagcgaggccctcggcgtgggagaagtggccctcccggggcagggtggcttgcccaaggaggaggggaagcagcaggaaaagccagagggggcagagaccactgctgctaccaccaacggcagtctcagtgacccgtccaaagaagtggaatacgtctgcgagctctgcaagggagcggcccctcctgacagccccgtggtctactcggacagggcaggctacaacaagcagtggcaccccacctgctttgtgtgtgccaagtgctccgagccgctggtggacctcatctacttctggaaggatggtgcaccctggtgcggccgccattactgcgagagtctgcggccccggtgctccggctgcgatgagataatattcgctgaggactaccagcgtgtggaagatctggcctggcaccgaaagcactttgtctgtgagggttgtgagcagctgctgagcggccgggcgtacatcgtcaccaagggtcagcttctgtgcccaacttgcagcaagtccaaacgctcctgaagggctgcccacccacagccagaatccacaggatcccaccgagaaggagagccaggtgtgccgagaccatcctaagggtccgatgtgacagcaagcaagtgaaataaacaatgatttgcttttcagtgagaatatatatatgagatatatatagatatatattcta

SEQ ID NO: 16238 - DNA, 1113 bp, Homo sapiens
  source 1..1113: mol_type = unassigned DNA
attcagccgccgctgtccccgctgcgcgccctcgcgcctctgcctgagaagccaggcgctgttcccccaccccagaagaggatggcaaaggtggctaaggacctcaacccaggagttaaaaaggaaaatatgcaagtcttgcaaatgcagccaagaggaccactgcctaacatctgacctagaagacgatcggaaaattggccgcttgctgatggactccaagtattccaccctcactgctcgggtgaaaggcggggacggcatccggatttacaagaggaaccggatgatcatgaccaaccctattgctactgggaaagatcccacttttgacaccatcacctacgagtgggctccccctggagtcacccagaaactgggactgcagtacatggagctcatccccaaggagaagcagccagtgacaggcacagagggtgccttttaccgccgccgccagctcatgcaccagctccccatctatgaccaggatccctcgcgctgccgtggacttttggagaatgagttgaaactgatggaagaatttgtcaagcaatataagagcgaggccctcggcgtgggagaagtggccctcccggggcagggtggcttgcccaaggaggaggggaagcagcaggaaaagccagagggggcagagaccactgctgctaccaccaacggcagtctcagtgacccgtccaaagaagtggaatacgtctgcgagctctgcaagggagcggcccctcctgacagccccgtggtctactcggacagggcaggctacaacaagcagtggcaccccacctgctttgtgtgtgccaagtgctccgagccgctggtggacctcatctacttctggaaggatggtgcaccctggtgcggccgccattactgcgagagtctgcggccccggtgctccggctgcgatgagataatattcgctgaggactaccagcgtgtggaagatctggcctggcaccgaaagcactttgtctgtgagggttgtgagcagctgctgagcggccgggcgtacatcgtcaccaagggtcagcttctgtgcccaacttgcagcaagtccaaacgctcctgaagggctgcccacccacagccaga

SEQ ID NO: 16239 - DNA, 858 bp, Homo sapiens
  source 1..858: mol_type = unassigned DNA
acagagctccctcccaggcccgcgaacttggccattcagccgccgctgtccccgctgcgcgccctcgcgcctctgcctgagaagccaggcgctgttcccccaccccagaagaggatggcaaaggtggctaaggacctcaacccaggagttaaaaagatgtccctgggccagctgcagtcagcaagaggtgtggcatgtttgggatgcaaggggacgtgttcgggcttcgagccacattcatggaggaaaatatgcaagtcttgcaaatgcagccaagaggaccactgcctaacatctgacctagaagacgatcggaaaattggccgcttgctgatggactccaagtattccaccctcactgctcgggtgaaaggcggggacggcatccggatttacaagaggaaccggatgatcatgaccaaccctattgctactgggaaagatcccacttttgacaccatcacctacgagtgggctccccctggagtcacccagaaactgggactgcagtacatggagctcatccccaaggagaagcagccagtgacaggcacagagggtgccttttaccgccgccgccagctcatgcaccagctccccatctatgaccaggatccctcgcgctgccgtggacttttggagaatgagttgaaactgatggaagaatttgtcaagcaatataagagcgaggccctcggcgtgggagaagtggccctcccggggcagggtggcttgcccaaggaggaggggaagcagcaggaaaagccagagggggcagagaccactgctgctaccaccaacggcagtctcagtgacccgtccaaagaagtggaatacaagccagtcccactcgtgtga

SEQ ID NO: 16240 - DNA, 3965 bp, Homo sapiens
  source 1..3965: mol_type = unassigned DNA
agtgcagcccctcctccccgctgtgtttattaggggaaggagggcggaggcggaggccagttccccagctccagccgccgtcgctgctgcctgtgtagttgcagccgcggccgcctcccgccagctcgcctcggggaacaggacgcgcgtgagctcaggcgtccccgccccagcttttctcggaaccatgaaccccaactgcgcccggtgcggcaagatcgtgtatcccacggagaaggtgaactgtctggataagttctggcataaagcatgcttccattgcgagacctgcaagatgacactgaacatgaagaactacaagggctacgagaagaagccctactgcaacgcacactaccccaagcagtccttcaccatggtggcggacaccccggaaaaccttcgcctcaagcaacagagtgagctccagagtcaggtgcgctacaaggaggagtttgagaagaacaagggcaaaggtttcagcgtagtggcagacacgcccgagctccagagaatcaagaagacccaggaccagatcagtaacataaaataccatgaggagtttgagaagagccgcatgggccctagcgggggcgagggcatggagccagagcgtcgggattcacaggacggcagcagctaccggcggcccctggagcagcagcagcctcaccacatcccgaccagtgccccggtttaccagcagccccagcagcagccggtggcccagtcctatggtggctacaaggagcctgcagccccagtctccatacagcgcagcgccccaggtggtggcgggaagcggtaccgcgcggtgtatgactacagcgccgccgacgaggacgaggtctccttccaggacggggacaccatcgtcaacgtgcagcagatcgacgacggctggatgtacgggacggtggagcgcaccggcgacacggggatgctgccggccaactacgtggaggccatctgaacccgcagcgcccccatctgtcttcagcacattccacggcatcgcatccgtcctgggcgtgacccgtccattcttcagtgtctctgttttttaaaacctgcgacagcttgtgattcctacccctcttccagcttcttttgccaactgaagccttcttctgccacttctgcgggctccctcctctggcaggcttcccccttgatcgacttcttggttttctctctggatggaacgggcatgggcctctctgggggaggcagggctggaatgggagacctgttggcctgtgggcctcacctgcccctctgttctctcccctcacatcctcctgcccagctcctcacatacccacacattccagggctggggtgagcctgactgccaggaccccaggtcaggggctccctacattccccagagtgggatccacttcttggttcctgggatggcgatggggactctgccgctgtgtagggaccagtgggatgggctctacctctctttctcaaagagggggctctgcccacctggggtctctctccctacctccctcctcaggggcaacaacaggagaatggggttcctgctgtggggcgaattcatcccctccccgcgcgttccttcgcacactgtgattttgccctcctgcccacgcagacctgcagcgggcaaagagctcccgaggaagcacagcttgggtcaggttcttgcctttcttaattttagggacagctaccggaaggaggggaacaaggagttctcttccgcagcccctttccccacgcccacccccagtctccagggacccttgcctgcctcctaggctggaagccatggtcccgaagtgtagggcaagggtgcctcaggaccttttggtcttcagcctccctcagcccccaggatctgggttaggtggccgctcctccctgctcctcatgggaagatgtctcagagccttccatgacctcccctccccagcccaatgccaagtggacttggagctgcacaaagtcagcagggaccactaaatctccaagacctggtgtgcggaggcaggagcatgtatgtctgcaggtgtctgacacgcaagtgtgtgagtgtgagtgtgagagatggggcgggggtgtgtctgtaggtgtctctgggcctgtgtgtgggtggggttatgtgagggtatgaagagctgtcttcccctgagagtttcctcagaacccacagtgagaggggagggctcctggggcagagaagttccttaggttttctttggaatgaaattcctccttccccccatctctgagtggaggaagcccaccaatctgccctttgcagtgtgcagggtggaaggtaagaggttggtgtggagttggggctgccatagggtctgcagcctgctggggctaagcggtggaggaaggctctgtcactccaggcatatgtttccccatctctgtctggggctacagaatagggtggcagaagtgtcaccctgtgggtgtctccctcgggggctcttcccctagacctccccctcacttacataaagctcccttgaagcaagaaagagggtcccagggctgcaaaactggaagcacagcctcggggatggggagggaaagacggtgctatatccagttcctgctctctgctcatgggtggctgtgacaaccctggcctcacttgattcatctctggttttcttgccaccctctgggagtccccatcccattttcatcctgagcccaaccaggccctgccattggcctcttgtcccttggcacacttgtacccacaggtgaggggcaggacctgaaggtattggcctgttcaacaatcagtcatcatgggtgtttttgtcaactgcttgttaattgatttggggatgtttgccccgaatgagaggttgaggaaaagactgtgggtggggaggccctgcctgacccatcccttttcctttctggccccagcctaggtggaggcaagtggaatatcttatattgggcgatttgggggctcggggaggcagagaatctcttgggagtcttgggtggcgctggtgcattctgtttcctcttgatctcaaagcacaatgtggatttggggaccaaaggtcagggacacatccccttagaggacctgagtttgggagagtggtgagtggaagggaggagcagcaagaagcagcctgttttcactcagcttaattctccttcccagataaggcaagccagtcatggaatcttgctgcaggccctccctctactcttcctgtcctaaaaataggggccgttttcttacacacccccagagagaggagggactgtcacactggtgctgagtgaccgggggctgctgggcgtctgttctttaccaaaaccatccatccctagaagagcacagagccctgaggggctgggctgggctgggctgagcccctggtcttctctacagttcacagaggtctttcagctcatttaatcccaggaaagaggcatcaaagctagaatgtgaatataacttttgtggaccaatactaagaataacaagaagcccagtggtgaggaaagtgcgttctcccagcactgcctcctgttttctccctctcatgtccctccagggaaaatgactttattgcttaatttctgcctttcccccctcacacatgcacttttgggcctttttttatagctggaaaaaacaaaataccaccctacaaacctgtatttaaaaagaaacagaaatgaccacgtgaaatttgcctctgtccaaacatttcatccgtgtgtatgtgtatgtgtgtgagtgtgtgaagccgccagttcatctttttatatggggttgttgtctcattttggtctgttttggtcccctccctcgtgggcttgtgctcgggatcaaacctttctggcctgttatgattctgaacatttgacttgaaccacaagtgaatctttctcctggtgactcaaataaaagtataatttttacctgcgga

SEQ ID NO: 16241 - DNA, 762 bp, Homo sapiens
  source 1..762: mol_type = unassigned DNA
gtgccaggctgcaggcacagtgacacgaagcttgccacatcccccccaacccagagccacagagggacaggctgtcccaagtgaggggtatccttgcaggcttctgcccctaccagcctgtttacctttctttagagtgggttgcaggtaggcaagggaagatcaagatgaccctgccttggagcctcggatccaggctgagaggcctctaacaggcagcagagttctggcataaagcatgcttccattgcgagacctgcaagatgacactgaacatgaagaactacaagggctacgagaagaagccctactgcaacgcacactaccccaagcagtccttcaccatggtggcggacaccccggaaaaccttcgcctcaagcaacagagtgagctccagagtcaggtgcgctacaaggaggagtttgagaagaacaagggcaaaggtttcagcgtagtggcagacacgcccgagctccagagaatcaagaagacccaggaccagatcagtaacataaaataccatgaggagtttgagaagagccgcatgggccctagcgggggcgagggcatggagccagagcgtcgggattcacaggacggcagcagctaccggcggcccctggagcagcagcagcctcaccacatcccgaccagtgccccggtttaccagcagccccagcagcagccggtggcccagtcctatggtggctacaaggagcctgcagccccagtctccatacagcgcagcgccccaggtggtg

SEQ ID NO: 16242 - DNA, 1408 bp, Homo sapiens
  source 1..1408: mol_type = unassigned DNA
attaggggaaggagggcggaggcggaggccagttccccagctccagccgccgtcgctgctgcctgtgtagttgcagccgcggccgcctcccgccagctcgcctcggggaacaggacgcgcgtgagctcaggcgtccccgccccagcttttctcggaaccatgaaccccaactgcgcccggtgcggcaagatcgtgtatcccacggagaaggtgaactgtctggataagttctggcataaagcatgcttccattgcgagacctgcaagatgacactgaacatgaagaactacaagggctacgagaagaagccctactgcaacgcgtgcgctacaaggaggagtttgagaagaacaagggcaaaggtttcagcgtagtggcagacacgcccgagctccagagaatcaagaagacccaggaccagatcagtaacataaaataccatgaggagtttgagaagagccgcatgggccctagcgggggcgagggcatggagccagagcgtcgggattcacaggacggcagcagctaccggcggcccctggagcagcagcagcctcaccacatcccgaccagtgccccggtttaccagcagccccagcagcagccggtggcccagtcctatggtggctacaaggagcctgcagccccagtctccatacagcgcagcgccccaggtggtggcgggaagcggtaccgcgcggtgtatgactacagcgccgccgacgaggacgaggtctccttccaggacggggacaccatcgtcaacgtgcagcagatcgacgacggctggatgtacgggacggtggagcgcaccggcgacacggggatgctgccggccaactacgtggaggccatctgaacccgcagcgcccccatctgtcttcagcacattccacggcatcgcatccgtcctgggcgtgacccgtccattcttcagtgtctctgttttttaaaacctgcgacagcttgtgattcctacccctcttccagcttcttttgccaactgaagccttcttctgccacttctgcgggctccctcctctggcaggcttcccccttgatcgacttcttggttttctctctggatggaacgggcatgggcctctctgggggaggcagggctggaatgggagacctgttggcctgtgggcctcacctgcccctctgttctctcccctcacatcctcctgcccagctcctcacatacccacacattccagggctggggtgagcctgactgccaggaccccaggtcaggggctccctacattccccagagtgggatccacttcttggttcctgggatggcgatggggactctgccgctgtgtagggaccagtgggatgggctctacctctctttctcaaagagggggctctgcccacctggggtctctctccctacct

SEQ ID NO: 16243 - DNA, 3492 bp, Homo sapiens
  source 1..3492: mol_type = unassigned DNA
ggacgcgcgtgagctcaggcgtccccgccccagcttttctcggaaccatgaaccccaactgcgcccggtgcggcaagatcgtgtatcccacggagaaggtgaactgtctggataagttctggcataaagcatgcttccattgcgagacctgcaagatgacactgaacatgaagaactacaagggctacgagaagaagccctactgcaacgcacactaccccaagcagtccttcaccatggtggcggacaccccggaaaaccttcgcctcaagcaacagagtgagctccagagtcaggtgcgctacaaggaggagtttgagaagaacaagggcaaaggtttcagcgtagtggcagacacgcccgagctccagagaatcaagaagacccaggaccagatcagtaacataaaataccatgaggagtttgagaagagccgcatgggccctagcgggggcgagggcatggagccagagcgtcgggattcacaggacggcagcagctaccggcggcccctggagcagcagcagcctcaccacatcccgaccagtgccccggtttaccagcagccccagcagcagccggtggcccagtcctatggtggctacaaggagcctgcagccccagtctccatacagcgcagcgccccaggtggtggcgggaagcggtaccgcgcggtgtatgactacagcgccgccgacgaggacgaggtctccttccaggacggggacaccatcgtcaacgtgcagcagatcgacgacggctggatgtacgggacggtggagcgcaccggcgacacggggatgctgccggccaactacgtggaggccatctgaacccgcagcgcccccatctgtcttcagcacattccacggcatcgcatccgtcctgggcgtgacccgtccattcttcagtgtctctgttttttaaaacctgcgacagcttgtgattcctacccctcttccagcttcttttgccaactgaagccttcttctgccacttctgcgggctccctcctctggcaggcttcccccttgatcgacttcttggttttctctctggatggaacgggcatgggcctctctgggggaggcagggctggaatgggagacctgttggcctgtgggcctcacctgcccctctgttctctcccctcacatcctcctgcccagctcctcacatacccacacattccagggctggggtgagcctgactgccaggaccccaggtcaggggctccctacattccccagagtgggatccacttcttggttcctgggatggcgatggggactctgccgctgtgtagggaccagtgggatgggctctacctctctttctcaaagagggggctctgcccacctggggtctctctccctacctccctcctcaggggcaacaacaggagaatggggttcctgctgtggggcgaattcatcccctccccgcgcgttccttcgcacactgtgattttgccctcctgcccacgcagacctgcagcgggcaaagagctcccgaggaagcacagcttgggtcaggttcttgcctttcttaattttagggacagctaccggaaggaggggaacaaggagttctcttccgcagcccctttccccacgcccacccccagtctccagggacccttgcctgcctcctaggctggaagccatggtcccgaagtgtagggcaagggtgcctcaggaccttttggtcttcagcctccctcagcccccaggatctgggttaggtggccgctcctccctgctcctcatgggaagatgtctcagagccttccatgacctcccctccccagcccaatgccaagtggacttggagctgcacaaagtcagcagggaccactaaatctccaagacctggtgtgcggaggcaggagcatgtatgtctgcaggtgtctgacacgcaagtgtgtgagtgtgagtgtgagagatggggcgggggtgtgtctgtaggtgtctctgggcctgtgtgtgggtggggttatgtgagggtatgaagagctgtcttcccctgagagtttcctcacttacataaagctcccttgaagcaagaaagagggtcccagggctgcaaaactggaagcacagcctcggggatggggagggaaagacggtgctatatccagttcctgctctctgctcatgggtggctgtgacaaccctggcctcacttgattcatctctggttttcttgccaccctctgggagtccccatcccattttcatcctgagcccaaccaggccctgccattggcctcttgtcccttggcacacttgtacccacaggtgaggggcaggacctgaaggtattggcctgttcaacaatcagtcatcatgggtgtttttgtcaactgcttgttaattgatttggggatgtttgccccgaatgagaggttgaggaaaagactgtgggtggggaggccctgcctgacccatcccttttcctttctggccccagcctaggtggaggcaagtggaatatcttatattgggcgatttgggggctcggggaggcagagaatctcttgggagtcttgggtggcgctggtgcattctgtttcctcttgatctcaaagcacaatgtggatttggggaccaaaggtcagggacacatccccttagaggacctgagtttgggagagtggtgagtggaagggaggagcagcaagaagcagcctgttttcactcagcttaattctccttcccagataaggcaagccagtcatggaatcttgctgcaggccctccctctactcttcctgtcctaaaaataggggccgttttcttacacacccccagagagaggagggactgtcacactggtgctgagtgaccgggggctgctgggcgtctgttctttaccaaaaccatccatccctagaagagcacagagccctgaggggctgggctgggctgggctgagcccctggtcttctctacagttcacagaggtctttcagctcatttaatcccaggaaagaggcatcaaagctagaatgtgaatataacttttgtggaccaatactaagaataacaagaagcccagtggtgaggaaagtgcgttctcccagcactgcctcctgttttctccctctcatgtccctccagggaaaatgactttattgcttaatttctgcctttcccccctcacacatgcacttttgggcctttttttatagctggaaaaaacaaaataccaccctacaaacctgtatttaaaaagaaacagaaatgaccacgtgaaatttgcctctgtccaaacatttcatccgtgtgtatgtgtatgtgtgtgagtgtgtgaagccgccagttcatctttttatatggggttgttgtctcattttggtctgttttggtcccctccctcgtgggcttgtgctcgggatcaaacctttctggcctgttatgattctgaacatttgacttgaaccacaagtgaatctttctcctggtgactcaaataaaagtataattttt

SEQ ID NO: 16244 - DNA, 984 bp, Homo sapiens
  source 1..984: mol_type = unassigned DNA
agttccccagctccagccgccgtcgctgctgcctgtgtagttgcagccgcggccgcctcccgccagctcgcctcggggaacaggacgcgcgtgagctcaggcgtccccgccccagcttttctcggaaccatgaaccccaactgcgcccggtgcggcaagatcgtgtatcccacggagaaggtgaactgtctggataagttctggcataaagcatgcttccattgcgagacctgcaagatgacactgaacatgaagaactacaagggctacgagaagaagccctactgcaacgcacactaccccaagcagtccttcaccatggtggcggacaccccggaaaaccttcgcctcaagcaacagagtgagctccagagtcaggtgcgctacaaggaggagtttgagaagaacaagggcaaaggtttcagcgtagtggcagacacgcccgagctccagagaagttccttaggttttctttggaatgaaattcctccttccccccatctctgagtggaggaagcccaccaatctgccctttgcagtgtgcagggtggaaggtaagaggttggtgtggagttggggctgccatagggtctgcagcctgctggggctaagcggtggaggaaggctctgtcactccaggcatatgtttccccatctctgtctggggctacagaatagggtggcagaagtgtcaccctgtgggtgtctccctcgggggctcttcccctagacctccccctcacttacataaagctcccttgaagcaagaaagagggtcccagggctgcaaaactggaagcacagcctcggggatggggagggaaagacggtgctatatccagttcctgctctctgctcatgggtggctgtgacaaccctggcctcacttgattcatctctggttttcttgccaccctctgggagtccccatcccattttcatcctgagcccaaccaggccctgccattggcctcttgtcccttg

SEQ ID NO: 16245 - DNA, 7233 bp, Homo sapiens
  source 1..7233: mol_type = unassigned DNA
ggaaagaagtggaataattaggaacctagggtggggtagggtagcaggacatttcaaacattaatgagcatatgagattccaggtcttgttaaaatgcaaattctgattcagctggtaggtgaggtctgagattgtgcatttctaacaagcactcagataatcttaaggctgttggccccagggtcacacttatagtgattttctagaacccagttggggaagtgaatcttgggcaggagaaatacacacctcttgcattgagtttggagatctcatctgatataactttttaagaaagaaaaataattttccaaatatccaattgataagctttcccactaagtggctttcccactaagtggctgcgttatgaaaattgcttcactttgaaacttctggtcttggtaatatagaatttctgtgttctcacagtgcttgattgagaatatgatattgagattatggcataaaatatagtggctgtacaaaaaaaaatacattattaggatctctaacaattatgtaaaagtcattgcttcatgggtagagctcaaactttggtgtgagacctggttttattcttggcacttactctgagttgtcttaggcaaattaataccttaagcaaaaatattctcatgtacattttacatgagaattataaatgaagtacataaagtccagcagtcacaaatgttatctattattaccatcgtcctaagactgcaatcagctatagtgaaagtagtctcaaagattgtttcataaatcatcagattcacctaattttctaaagaatttaaataaggagatggaatgaatagattgcattttgtttccatgcacaggggaactgtgcatatttcttctgtgactcggaaatggtttaacttttaaaaatcccaaaatagctgaagttagcagacatgcaatttaccaaggatgattggaatttttatctttcctgtaataatactatacccaagcacactgctcatgaggaaaacatttttatgtgaatcttttactcttgggggcaaagaatgctgtttttctttttgataactatgtttatagaatctaaatcaccctgagcaattatttcaacatctaaagttattattaccattcatgtttcatttatagctatttgaattttgatgaatttcaatatggtgctacagtgatagggcaagtgcaaataagttcaatatatgggtacggtctaaagctattttaatttttttattacaactgctatgaagaaaattaggatatgccatattttcacgttttacagttggatgtcctatgatgttctcttccagagaacagagctcggagctctggaaatttggaggcaactgatatgtgctcatgtctgcatctgtgtgggttggctgtatctcagggacagagtctgcagcaaaaaagatataattttgaggactgaacaaaattcaggaaggactattctcattaaggcagtaacagagaagaattttgaaacaaaagattttcgagcctctctagaaaatggtgttctgctgtgtgatttgattaataagcttaaacctggcgtcattaagaagatcaatagactgtctacaccaatagcaggattggataatataaacgttttcttgaaagcttgtgaacagattggattgaaagaagcccagcttttccatcctggagatctacaggatttatcaaatcgagtcactgtcaagcaagaagagactgacaggagagtgaaaaatgttttgataacattgtactggctgggaagaaaagcacaaagcaacccgtactataatggtccccatcttaatttgaaagcgtttgagaatcttttaggacaagcactgacgaaggcactcgaagactccagcttcctgaaaagaagtggcagggacagtggctacggtgacatctggtgtcctgaacgtggagaatttcttgctcctccaaggcaccataagagagaagattcctttgaaagcttggactctttgggctcgaggtcattgacaagctgctcctctgatatcacgttgagaggggggcgtgaaggttttgaaagtgacacagattcggaatttacatttaagatgcaggattataataaagatgatatgtcgtatcgaaggatttcggctgttgagccaaagactgcgttacccttcaatcgttttttacccaacaaaagtagacagccatcctatgtaccagcacctctgagaaagaaaaagccagacaaacatgaggataacagaagaagttgggcaagcccggtttatacagaagcagatggaacattttcaagactctttcaaaagatttatggtgagaatgggagtaagtccatgagtgatgtcagcgcagaagatgttcaaaacttgcgtcagctgcgttacgaggagatgcagaaaataaaatcacaattaaaagaacaagatcagaaatggcaggatgaccttgcaaaatggaaagatcgtcgaaaaagttacacttcagatctgcagaagaaaaaagaagagagagaagaaattgaaaagcaggcacttgagaagtctaagagaagctctaagacgtttaaggaaatgctgcaggacagggaatcccaaaatcaaaagtctacagttccgtcaagaaggagaatgtattcttttgatgatgtgctggaggaaggaaagcgaccccctacaatgactgtgtcagaagcaagttaccagagtgagagagtagaagagaagggagcaacttatccttcagaaattcccaaagaagattctaccacttttgcaaaaagagaggaccgtgtaacaactgaaattcagcttccttctcaaagtcctgtggaagaacaaagcccagcctctttgtcttctctgcgttcacggagcacacaaatggaatcaactcgtgtttcagcttctctccccagaagttaccggaaaactgatacagtcaggttaacatctgtggtcacaccaagaccctttggctctcagacaaggggaatctcatcactccccagatcttacacgatggatgatgcttggaagtataatggagatgttgaagacattaagagaactccaaacaatgtggtcagcacccctgcaccaagcccggacgcaagccaactggcttcaagcttatctagccagaaagaggtagcagcaacagaagaagatgtgacaaggctgccctctcctacatcccccttctcatctctttcccaagaccaggctgccacttctaaagccacattgtcttccacatctggtcttgatttaatgtctgaatctggagaaggggaaatctccccacaaagagaagtctcaagatcccaggatcagttcagtgatatgagaatcagcataaaccagacgcctgggaagagtcttgactttgggtttacaataaaatgggatattcctgggatcttcgtagcatcagttgaagcaggtagcccagcagaattttctcagctacaagtagatgatgaaattattgctattaacaacaccaagttttcatataacgattcaaaagagtgggaggaagccatggctaaggctcaagaaactggacacctagtgatggatgtgaggcgctatggaaaggctggttcacctgaaacaaagtggattgatgcaacttctggaatttacaactcagaaaaatcttcaaatctatctgtaacaactgatttctccgaaagccttcagagttctaatattgaatccaaagaaatcaatggaattcatgatgaaagcaatgcttttgaatcaaaagcatctgaatccatttctttgaaaaacttaaaaaggcgatcacaattttttgaacaaggaagctctgattcggtggttcctgatcttccagttccaaccatcagtgccccgagtcgctgggtgtgggatcaagaggaggagcggaagcggcaggagaggtggcagaaggagcaggaccgcctactgcaggaaaaatatcaacgtgagcaggagaaactgagggaagagtggcaaagggccaaacaggaggcagagagagagaattccaagtacttggatgaggaactgatggtcctaagctcaaacagcatgtctctgaccacacgggagccctctcttgccacctgggaagctacctggagtgaagggtccaagtcttcagacagagaaggaacccgagcaggagaagaggagaggagacagccacaagaggaagttgttcatgaggaccaaggaaagaagccgcaggatcagcttgttattgagagagagaggaaatgggagcaacagcttcaggaagagcaagagcaaaagcggcttcaggctgaggctgaggagcagaagcgtcctgcggaggagcagaagcgccaggcagagatagagcgggaaacatcagtcagaatataccagtacaggaggcctgttgattcctatgatataccaaagacagaagaagcatcttcaggttttcttcctggtgacaggaataaatccagatctactactgaactggatgattactccacaaataaaaatggaaacaataaatatttagaccaaattgggaacatgacctcttcacagaggagatccaagaaagaacaagtaccatcaggagcagaattggagaggcaacaaatccttcaggaaatgaggaagagaacaccccttcacaatgacaacagctggatccgacagcgcagtgccagtgtcaacaaagagcctgttagtcttcctgggatcatgagaagaggcgaatctttagataacctggactccccccgatccaattcttggagacagcctccttggctcaatcagcccacaggattctatgcttcttcctctgtgcaagactttagtcgcccaccacctcagctggtgtccacatcaaaccgtgcctacatgcggaacccctcctccagcgtgcccccaccttcagctggctccgtgaagacctccaccacaggtgtggccaccacacagtcccccaccccgagaagccattccccttcagcttcacagtcaggctctcagctgcgtaacaggtcagtcagtgggaagcgcatatgctcctactgcaataacattctgggcaaaggagccgccatgatcatcgagtccctgggtctttgttatcatttgcattgttttaagtgtgttgcctgtgagtgtgacctcggaggctcttcctcaggagctgaagtcaggatcagaaaccaccaactgtactgcaacgactgctatctcagattcaaatctggacggccaaccgccatgtgatgtaagcctccatacgaaagcactgttgcagatagaagaagaggtggttgctgctcatgtagatctataaatatgtgttgtatgtcttttttgctttttttttaaaaaaaagaataactttttttgcctctttagattacatagaagcattgtagtcttggtagaaccagtatttttgttgtttatttataaggtaattgtgtgtggggaaaagtgcagtatttacctgttgaattcagcatcttgagagcacaagggaaaaaataagaacctacgaatatttttgaggcagataatgatctagtttgactttctagttagtggtgttttgaagagggtattttattgttttttaaaaaaaggttcttaaacattatttgaaatagttaatataaatacataattgcatttgctctgtttattgtaatgtattctaaattaatgcagaaccatatggaaaatttcattaaaatctatccccaaatgtgctttctgtatccttccttctacctattattctgatttttaaaaatgcagttaatgtaccatttatttgcttgatgaagggagctctattttctttaccagaaatgttgctaagtaattcccaatagaaagctgcttattttcattaatgaaaaataaccatggtttgtatactagaagtcttcttcagaaactggtgagcctttctgttcaattgcatttgtaaataaacttgctgatgcatttaacgagtgggtcgtctttttcttaggtgtatgtgtctgacctcaggccttttagccatatttcagtatgtggccttttttgatgttatgttttatccagtagctttactaaggtataattgatgtaataaactgcatatatttaaagtgtatactttgacaaattttgacatggtgtataccttcgaaactatgccacagtctggatgtgtttactgaaacattttaataaggaagtttatttttgataaagttatgtttttggatacaatatatttgtatggtgagagtgatgaattgttggatcatttgaataaaatcttttactaaccccatgataaaaggagaagacaacagtgagcttagaatatctataaagcaaaaaatgtagtctcttgtttaaaaaatctggagcgggaatgcaaggatacaaaactttagcatgctttgagcaaaaatttaaacttactggaatcttttataataatgtaagtggaatggaggattctaggaactgagaactgtattggaataggttcaaaatatgtaagaaatgctaatgtgggagataaaaattttatttagtacttattctgattattattaaagtaataatgtgttccttgaggataacttgtcaaatgccccaaagcataaagaatataattctgaatcccaaattccaaagacaagaactctgtgtttgaattcattctgcatataattatttataagtatagattgtgaatttttccatgttcttaaaattatttttatcttttttcatggttgcatagtgctccattgtttggccttggtaatatttagttgataattccattactgtgtatttttcacttgtttctaagatcaaacattttaatatgtgcatgttatatataaatatgtaaattctgtgatactctatgatcatctctttctttatattattttcatagacatgaaatagttgctcagagattatgcattttaagacactcatagtatatattgccaaagtggtttccagaaaggcactgctggcttcgactcctataagcagcacgtgggcttgttcatctcactgcatgtttatgaagatacagttcttttgccttgttctctgcctgatgtgtatgcagaggcagccctcaatatgcagtggttgaataaatgaatgaagaaaccacta

SEQ ID NO: 16246 - DNA, 8128 bp, Homo sapiens
  source 1..8128: mol_type = unassigned DNA
ggaaagaagtggaataattaggaacctagggtggggtagggtagcaggacatttcaaacattaatgagcatatgagattccaggtcttgttaaaatgcaaattctgattcagctggtaggtgaggtctgagattgtgcatttctaacaagcactcagataatcttaaggctgttggccccagggtcacacttatagtgattttctagaacccagttggggaagtgaatcttgggcaggagaaatacacacctcttgcattgagtttggagatctcatctgatataactttttaagaaagaaaaataattttccaaatatccaattgataagctttcccactaagtggctttcccactaagtggctgcgttatgaaaattgcttcactttgaaacttctggtcttggtaatatagaatttctgtgttctcacagtgcttgattgagaatatgatattgagattatggcataaaatatagtggctgtacaaaaaaaaatacattattaggatctctaacaattatgtaaaagtcattgcttcatgggtagagctcaaactttggtgtgagacctggttttattcttggcacttactctgagttgtcttaggcaaattaataccttaagcaaaaatattctcatgtacattttacatgagaattataaatgaagtacataaagtccagcagtcacaaatgttatctattattaccatcgtcctaagactgcaatcagctatagtgaaagtagtctcaaagattgtttcataaatcatcagattcacctaattttctaaagaatttaaataaggagatggaatgaatagattgcattttgtttccatgcacaggggaactgtgcatatttcttctgtgactcggaaatggtttaacttttaaaaatcccaaaatagctgaagttagcagacatgcaatttaccaaggatgattggaatttttatctttcctgtaataatactatacccaagcacactgctcatgaggaaaacatttttatgtgaatcttttactcttgggggcaaagaatgctgtttttctttttgataactatgtttatagaatctaaatcaccctgagcaattatttcaacatctaaagttattattaccattcatgtttcatttatagctatttgaattttgatgaatttcaatatggtgctacagtgatagggcaagtgcaaataagttcaatatatgggtacggtctaaagctattttaatttttttattacaactgctatgaagaaaattaggatatgccatattttcacgttttacagttggatgtcctatgatgttctcttccagagaacagagctcggagctctggaaatttggaggcaactgatatgtgctcatgtctgcatctgtgtgggttggctgtatctcagggacagagtctgcagcaaaaaagatataattttgaggactgaacaaaattcaggaaggactattctcattaaggcagtaacagagaagaattttgaaacaaaagattttcgagcctctctagaaaatggtgttctgctgtgtgatttgattaataagcttaaacctggcgtcattaagaagatcaatagactgtctacaccaatagcaggattggataatataaacgttttcttgaaagcttgtgaacagattggattgaaagaagcccagcttttccatcctggagatctacaggatttatcaaatcgagtcactgtcaagcaagaagagactgacaggagagtgaaaaatgttttgataacattgtactggctgggaagaaaagcacaaagcaacccgtactataatggtccccatcttaatttgaaagcgtttgagaatcttttaggacaagcactgacgaaggcactcgaagactccagcttcctgaaaagaagtggcagggacagtggctacggtgacatctggtgtcctgaacgtggagaatttcttgctcctccaaggcaccataagagagaagattcctttgaaagcttggactctttgggctcgaggtcattgacaagctgctcctctgatatcacgttgagaggggggcgtgaaggttttgaaagtgacacagattcggaatttacatttaagatgcaggattataataaagatgatatgtcgtatcgaaggatttcggctgttgagccaaagactgcgttacccttcaatcgttttttacccaacaaaagtagacagccatcctatgtaccagcacctctgagaaagaaaaagccagacaaacatgaggataacagaagaagttgggcaagcccggtttatacagaagcagatggaacattttcaagtaatcagaggaggatttggggcaccaatgtggagaactggccaactgtacaaggaacttcaaagtcctcttgttatttggaagaggaaaaagcaaagacaagaagcatacccaacattgtaaaggatgatctttatgtgcgcaagctcagtccagtcatgccaaacccagggaatgcttttgatcagtttcttcccaaatgttggaccccagaagatgtgaactggaaaagaataaaaagggaaacttataagccatggtataaagaatttcagggattcagtcagtttttactgcttcaggccctccaaacatactctgatgacatcttgtcttctgaaacacataccaaaattgatcccacttctggcccaaggctcataacccgcaggaagaatctctcttatgcaccaggctatagaagagatgacctcgagatggcagccctggatcctgacttagagaatgatgatttctttgtcagaaagactggggctttccatgcaaatccatatgttctccgagcttttgaagactttagaaagttctctgagcaagatgattctgtagagcgagatataattttacagtgtagagaaggtgaacttgtacttccggatttggaaaaagatgatatgattgttcgccgaattccagcacagaagaaagaagtgccgctgtctggggccccagatagataccacccagtcccttttcccgaaccctggactcttcctccagaaattcaagcaaaatttctctgtgtacttgaaaggacatgcccatccaaagaaaaaagtaatagctgtagaatattagttccttcatatcggcagaagaaagatgacatgctgacacgtaagattcagtcctggaaactgggaactaccgtgcctcccatcagtttcacccctggcccctgcagtgaggctgacttgaagagatgggaggccatccgggaggccagcagacttaggcacaagaaaaggctgatggtggagagactctttcaaaagatttatggtgagaatgggagtaagtccatgagtgatgtcagcgcagaagatgttcaaaacttgcgtcagctgcgttacgaggagatgcagaaaataaaatcacaattaaaagaacaagatcagaaatggcaggatgaccttgcaaaatggaaagatcgtcgaaaaagttacacttcagatctgcagaagaaaaaagaagagagagaagaaattgaaaagcaggcacttgagaagtctaagagaagctctaagacgtttaaggaaatgctgcaggacagggaatcccaaaatcaaaagtctacagttccgtcaagaaggagaatgtattcttttgatgatgtgctggaggaaggaaagcgaccccctacaatgactgtgtcagaagcaagttaccagagtgagagagtagaagagaagggagcaacttatccttcagaaattcccaaagaagattctaccacttttgcaaaaagagaggaccgtgtaacaactgaaattcagcttccttctcaaagtcctgtggaagaacaaagcccagcctctttgtcttctctgcgttcacggagcacacaaatggaatcaactcgtgtttcagcttctctccccagaagttaccggaaaactgatacagtcaggttaacatctgtggtcacaccaagaccctttggctctcagacaaggggaatctcatcactccccagatcttacacgatggatgatgcttggaagtataatggagatgttgaagacattaagagaactccaaacaatgtggtcagcacccctgcaccaagcccggacgcaagccaactggcttcaagcttatctagccagaaagaggtagcagcaacagaagaagatgtgacaaggctgccctctcctacatcccccttctcatctctttcccaagaccaggctgccacttctaaagccacattgtcttccacatctggtcttgatttaatgtctgaatctggagaaggggaaatctccccacaaagagaagtctcaagatcccaggatcagttcagtgatatgagaatcagcataaaccagacgcctgggaagagtcttgactttgggtttacaataaaatgggatattcctgggatcttcgtagcatcagttgaagcaggtagcccagcagaattttctcagctacaagtagatgatgaaattattgctattaacaacaccaagttttcatataacgattcaaaagagtgggaggaagccatggctaaggctcaagaaactggacacctagtgatggatgtgaggcgctatggaaaggctggttcacctgaaacaaagtggattgatgcaacttctggaatttacaactcagaaaaatcttcaaatctatctgtaacaactgatttctccgaaagccttcagagttctaatattgaatccaaagaaatcaatggaattcatgatgaaagcaatgcttttgaatcaaaagcatctgaatccatttctttgaaaaacttaaaaaggcgatcacaattttttgaacaaggaagctctgattcggtggttcctgatcttccagttccaaccatcagtgccccgagtcgctgggtgtgggatcaagaggaggagcggaagcggcaggagaggtggcagaaggagcaggaccgcctactgcaggaaaaatatcaacgtgagcaggagaaactgagggaagagtggcaaagggccaaacaggaggcagagagagagaattccaagtacttggatgaggaactgatggtcctaagctcaaacagcatgtctctgaccacacgggagccctctcttgccacctgggaagctacctggagtgaagggtccaagtcttcagacagagaaggaacccgagcaggagaagaggagaggagacagccacaagaggaagttgttcatgaggaccaaggaaagaagccgcaggatcagcttgttattgagagagagaggaaatgggagcaacagcttcaggaagagcaagagcaaaagcggcttcaggctgaggctgaggagcagaagcgtcctgcggaggagcagaagcgccaggcagagatagagcgggaaacatcagtcagaatataccagtacaggaggcctgttgattcctatgatataccaaagacagaagaagcatcttcaggttttcttcctggtgacaggaataaatccagatctactactgaactggatgattactccacaaataaaaatggaaacaataaatatttagaccaaattgggaacatgacctcttcacagaggagatccaagaaagaacaagtaccatcaggagcagaattggagaggcaacaaatccttcaggaaatgaggaagagaacaccccttcacaatgacaacagctggatccgacagcgcagtgccagtgtcaacaaagagcctgttagtcttcctgggatcatgagaagaggcgaatctttagataacctggactccccccgatccaattcttggagacagcctccttggctcaatcagcccacaggattctatgcttcttcctctgtgcaagactttagtcgcccaccacctcagctggtgtccacatcaaaccgtgcctacatgcggaacccctcctccagcgtgcccccaccttcagctggctccgtgaagacctccaccacaggtgtggccaccacacagtcccccaccccgagaagccattccccttcagcttcacagtcaggctctcagctgcgtaacagtgtgttgcctgtgagtgtgacctcggaggctcttcctcaggagctgaagtcaggatcagaaaccaccaactgtactgcaacgactgctatctcagattcaaatctggacggccaaccgccatgtgatgtaagcctccatacgaaagcactgttgcagatagaagaagaggtggttgctgctcatgtagatctataaatatgtgttgtatgtcttttttgctttttttttaaaaaaaagaataactttttttgcctctttagattacatagaagcattgtagtcttggtagaaccagtatttttgttgtttatttataaggtaattgtgtgtggggaaaagtgcagtatttacctgttgaattcagcatcttgagagcacaagggaaaaaataagaacctacgaatatttttgaggcagataatgatctagtttgactttctagttagtggtgttttgaagagggtattttattgttttttaaaaaaaggttcttaaacattatttgaaatagttaatataaatacataattgcatttgctctgtttattgtaatgtattctaaattaatgcagaaccatatggaaaatttcattaaaatctatccccaaatgtgctttctgtatccttccttctacctattattctgatttttaaaaatgcagttaatgtaccatttatttgcttgatgaagggagctctattttctttaccagaaatgttgctaagtaattcccaatagaaagctgcttattttcattaatgaaaaataaccatggtttgtatactagaagtcttcttcagaaactggtgagcctttctgttcaattgcatttgtaaataaacttgctgatgcatttaacgagtgggtcgtctttttcttaggtgtatgtgtctgacctcaggccttttagccatatttcagtatgtggccttttttgatgttatgttttatccagtagctttactaaggtataattgatgtaataaactgcatatatttaaagtgtatactttgacaaattttgacatggtgtataccttcgaaactatgccacagtctggatgtgtttactgaaacattttaataaggaagtttatttttgataaagttatgtttttggatacaatatatttgtatggtgagagtgatgaattgttggatcatttgaataaaatcttttactaaccccatgataaaaggagaagacaacagtgagcttagaatatctataaagcaaaaaatgtagtctcttgtttaaaaaatctggagcgggaatgcaaggatacaaaactttagcatgctttgagcaaaaatttaaacttactggaatcttttataataatgtaagtggaatggaggattctaggaactgagaactgtattggaataggttcaaaatatgtaagaaatgctaatgtgggagataaaaattttatttagtacttattctgattattattaaagtaataatgtgttccttgaggataacttgtcaaatgccccaaagcataaagaatataattctgaatcccaaattccaaagacaagaactctgtgtttgaattcattctgcatataattatttataagtatagattgtgaatttttccatgttcttaaaattatttttatcttttttcatggttgcatagtgctccattgtttggccttggtaatatttagttgataattccattactgtgtatttttcacttgtttctaagatcaaacattttaatatgtgcatgttatatataaatatgtaaattctgtgatactctatgatcatctctttctttatattattttcatagacatgaaatagttgctcagagattatgcattttaagacactcatagtatatattgccaaagtggtttccagaaaggcactgctggcttcgactcctataagcagcacgtgggcttgttcatctcactgcatgtttatgaagatacagttcttttgccttgttctctgcctgatgtgtatgcagaggcagccctcaatatgcagtggttgaataaatgaatgaagaaaccactatc

SEQ ID NO: 16247 - DNA, 8025 bp, Homo sapiens
  source 1..8025: mol_type = unassigned DNA
ggaaagaagtggaataattaggaacctagggtggggtagggtagcaggacatttcaaacattaatgagcatatgagattccaggtcttgttaaaatgcaaattctgattcagctggtaggtgaggtctgagattgtgcatttctaacaagcactcagataatcttaaggctgttggccccagggtcacacttatagtgattttctagaacccagttggggaagtgaatcttgggcaggagaaatacacacctcttgcattgagtttggagatctcatctgatataactttttaagaaagaaaaataattttccaaatatccaattgataagctttcccactaagtggctttcccactaagtggctgcgttatgaaaattgcttcactttgaaacttctggtcttggtaatatagaatttctgtgttctcacagtgcttgattgagaatatgatattgagattatggcataaaatatagtggctgtacaaaaaaaaatacattattaggatctctaacaattatgtaaaagtcattgcttcatgggtagagctcaaactttggtgtgagacctggttttattcttggcacttactctgagttgtcttaggcaaattaataccttaagcaaaaatattctcatgtacattttacatgagaattataaatgaagtacataaagtccagcagtcacaaatgttatctattattaccatcgtcctaagactgcaatcagctatagtgaaagtagtctcaaagattgtttcataaatcatcagattcacctaattttctaaagaatttaaataaggagatggaatgaatagattgcattttgtttccatgcacaggggaactgtgcatatttcttctgtgactcggaaatggtttaacttttaaaaatcccaaaatagctgaagttagcagacatgcaatttaccaaggatgattggaatttttatctttcctgtaataatactatacccaagcacactgctcatgaggaaaacatttttatgtgaatcttttactcttgggggcaaagaatgctgtttttctttttgataactatgtttatagaatctaaatcaccctgagcaattatttcaacatctaaagttattattaccattcatgtttcatttatagctatttgaattttgatgaatttcaatatggtgctacagtgatagggcaagtgcaaataagttcaatatatgggtacggtctaaagctattttaatttttttattacaactgctatgaagaaaattaggatatgccatattttcacgttttacagttggatgtcctatgatgttctcttccagagaacagagctcggagctctggaaatttggaggcaactgatatgtgctcatgtctgcatctgtgtgggttggctgtatctcagggacagagtctgcagcaaaaaagatataattttgaggactgaacaaaattcaggaaggactattctcattaaggcagtaacagagaagaattttgaaacaaaagattttcgagcctctctagaaaatggtgttctgctgtgtgatttgattaataagcttaaacctggcgtcattaagaagatcaatagactgtctacaccaatagcaggattggataatataaacgttttcttgaaagcttgtgaacagattggattgaaagaagcccagcttttccatcctggagatctacaggatttatcaaatcgagtcactgtcaagcaagaagagactgacaggagagtgaaaaatgttttgataacattgtactggctgggaagaaaagcacaaagcaacccgtactataatggtccccatcttaatttgaaagcgtttgagaatcttttaggacaagcactgacgaaggcactcgaagactccagcttcctgaaaagaagtggcagggacagtggctacggtgacatctggtgtcctgaacgtggagaatttcttgctcctccaaggcaccataagagagaagattcctttgaaagcttggactctttgggctcgaggtcattgacaagctgctcctctgatatcacgttgagaggggggcgtgaaggttttgaaagtgacacagattcggaatttacatttaagatgcaggattataataaagatgatatgtcgtatcgaaggatttcggctgttgagccaaagactgcgttacccttcaatcgttttttacccaacaaaagtagacagccatcctatgtaccagcacctctgagaaagaaaaagccagacaaacatgaggataacagaagaagttgggcaagcccggtttatacagaagcagatggaacattttcaagtaatcagaggaggatttggggcaccaatgtggagaactggccaactgtacaaggaacttcaaagtcctcttgttatttggaagaggaaaaagcaaagacaagaagcatacccaacattgtaaaggatgatctttatgtgcgcaagctcagtccagtcatgccaaacccagggaatgcttttgatcagtttcttcccaaatgttggaccccagaagatgtgaactggaaaagaataaaaagggaaacttataagccatggtataaagaatttcagggattcagtcagtttttactgcttcaggccctccaaacatactctgatgacatcttgtcttctgaaacacataccaaaattgatcccacttctggcccaaggctcataacccgcaggaagaatctctcttatgcaccaggctatagaagagatgacctcgagatggcagccctggatcctgacttagagaatgatgatttctttgtcagaaagactggggctttccatgcaaatccatatgttctccgagcttttgaagactttagaaagttctctgagcaagatgattctgtagagcgagatataattttacagtgtagagaaggtgaacttgtacttccggatttggaaaaagatgatatgattgttcgccgaattccagcacagaagaaagaagtgccgctgtctggggccccagatagataccacccagtcccttttcccgaaccctggactcttcctccagaaattcaagcaaaatttctctgtgtacttgaaaggacatgcccatccaaagaaaaaagtaatagctgtagaatattagttccttcatatcggcagaagaaagatgacatgctgacacgtaagattcagtcctggaaactgggaactaccgtgcctcccatcagtttcacccctggcccctgcagtgaggctgacttgaagagatgggaggccatccgggaggccagcagacttaggcacaagaaaaggctgatggtggagagactctttcaaaagatttatggtgagaatgggagtaagtccatgagtgatgtcagcgcagaagatgttcaaaacttgcgtcagctgcgttacgaggagatgcagaaaataaaatcacaattaaaagaacaagatcagaaatggcaggatgaccttgcaaaatggaaagatcgtcgaaaaagttacacttcagatctgcagaagaaaaaagaagagagagaagaaattgaaaagcaggcacttgagaagtctaagagaagctctaagacgtttaaggaaatgctgcaggacagggaatcccaaaatcaaaagtctacagttccgtcaagaaggagaatgtattcttttgatgatgtgctggaggaaggaaagcgaccccctacaatgactgtgtcagaagcaagttaccagagtgagagagtagaagagaagggagcaacttatccttcagaaattcccaaagaagattctaccacttttgcaaaaagagaggaccgtgtaacaactgaaattcagcttccttctcaaagtcctgtggaagaacaaagcccagcctctttgtcttctctgcgttcacggagcacacaaatggaatcaactcgtgtttcagcttctctccccagaagttaccggaaaactgatacagtcaggttaacatctgtggtcacaccaagaccctttggctctcagacaaggggaatctcatcactccccagatcttacacgatggatgatgcttggaagtataatggagatgttgaagacattaagagaactccaaacaatgtggtcagcacccctgcaccaagcccggacgcaagccaactggcttcaagcttatctagccagaaagaggtagcagcaacagaagaagatgtgacaaggctgccctctcctacatcccccttctcatctctttcccaagaccaggctgccacttctaaagccacattgtcttccacatctggtcttgatttaatgtctgaatctggagaaggggaaatctccccacaaagagaagtctcaagatcccaggatcagttcagtgatatgagaatcagcataaaccagacgcctgggaagagtcttgactttgggtttacaataaaatgggatattcctgggatcttcgtagcatcagttgaagcaggtagcccagcagaattttctcagctacaagtagatgatgaaattattgctattaacaacaccaagttttcatataacgattcaaaagagtgggaggaagccatggctaaggctcaagaaactggacacctagtgatggatgtgaggcgctatggaaaggctggttcacctgaaacaaagtggattgatgcaacttctggaatttacaactcagaaaaatcttcaaatctatctgtaacaactgatttctccgaaagccttcagagttctaatattgaatccaaagaaatcaatggaattcatgatgaaagcaatgcttttgaatcaaaagcatctgaatccatttctttgaaaaacttaaaaaggcgatcacaattttttgaacaaggaagctctgattcggtggttcctgatcttccagttccaaccatcagtgccccgagtcgctgggtgtgggatcaagaggaggagcggaagcggcaggagaggtggcagaaggagcaggaccgcctactgcaggaaaaatatcaacgtgagcaggagaaactgagggaagagtggcaaagggccaaacaggaggcagagagagagaattccaagtacttggatgaggaactgatggtcctaagctcaaacagcatgtctctgaccacacgggagccctctcttgccacctgggaagctacctggagtgaagggtccaagtcttcagacagagaaggaacccgagcaggagaagaggagaggagacagccacaagaggaagttgttcatgaggaccaaggaaagaagccgcaggatcagcttgttattgagagagagaggaaatgggagcaacagcttcaggaagagcaagagcaaaagcggcttcaggctgaggctgaggagcagaagcgtcctgcggaggagcagaagcgccaggcagagatagagcgggaaacatcagtcagaatataccagtacaggaggcctgttgattcctatgatataccaaagacagaagaagcatcttcaggttttcttcctggtgacaggaataaatccagatctactactgaactggatgattactccacaaataaaaatggaaacaataaatatttagaccaaattgggaacatgacctcttcacagaggagatccaagaaagaacaagtaccatcaggagcagaattggagaggcaacaaatccttcaggaaatgaggaagagaacaccccttcacaatgacaacagctggatccgacagcgcagtgccagtgtcaacaaagagcctgttagtcttcctgggatcatgagaagaggcgaatctttagataacctggactccccccgatccaattcttggagacagcctccttggctcaatcagcccacaggattctatgcttcttcctctgtgcaagactttagtcgcccaccacctcagctggtgtccacatcaaaccgtgcctacatgcggaacccctcctccagcgtgcccccaccttcagctggctccgtgaagacctccaccacaggtgtggccaccacacagtcccccaccccgagaagccattccccttcagcttcacagtcaggctctcagctgcgtaacagctggacggccaaccgccatgtgatgtaagcctccatacgaaagcactgttgcagatagaagaagaggtggttgctgctcatgtagatctataaatatgtgttgtatgtcttttttgctttttttttaaaaaaaagaataactttttttgcctctttagattacatagaagcattgtagtcttggtagaaccagtatttttgttgtttatttataaggtaattgtgtgtggggaaaagtgcagtatttacctgttgaattcagcatcttgagagcacaagggaaaaaataagaacctacgaatatttttgaggcagataatgatctagtttgactttctagttagtggtgttttgaagagggtattttattgttttttaaaaaaaggttcttaaacattatttgaaatagttaatataaatacataattgcatttgctctgtttattgtaatgtattctaaattaatgcagaaccatatggaaaatttcattaaaatctatccccaaatgtgctttctgtatccttccttctacctattattctgatttttaaaaatgcagttaatgtaccatttatttgcttgatgaagggagctctattttctttaccagaaatgttgctaagtaattcccaatagaaagctgcttattttcattaatgaaaaataaccatggtttgtatactagaagtcttcttcagaaactggtgagcctttctgttcaattgcatttgtaaataaacttgctgatgcatttaacgagtgggtcgtctttttcttaggtgtatgtgtctgacctcaggccttttagccatatttcagtatgtggccttttttgatgttatgttttatccagtagctttactaaggtataattgatgtaataaactgcatatatttaaagtgtatactttgacaaattttgacatggtgtataccttcgaaactatgccacagtctggatgtgtttactgaaacattttaataaggaagtttatttttgataaagttatgtttttggatacaatatatttgtatggtgagagtgatgaattgttggatcatttgaataaaatcttttactaaccccatgataaaaggagaagacaacagtgagcttagaatatctataaagcaaaaaatgtagtctcttgtttaaaaaatctggagcgggaatgcaaggatacaaaactttagcatgctttgagcaaaaatttaaacttactggaatcttttataataatgtaagtggaatggaggattctaggaactgagaactgtattggaataggttcaaaatatgtaagaaatgctaatgtgggagataaaaattttatttagtacttattctgattattattaaagtaataatgtgttccttgaggataacttgtcaaatgccccaaagcataaagaatataattctgaatcccaaattccaaagacaagaactctgtgtttgaattcattctgcatataattatttataagtatagattgtgaatttttccatgttcttaaaattatttttatcttttttcatggttgcatagtgctccattgtttggccttggtaatatttagttgataattccattactgtgtatttttcacttgtttctaagatcaaacattttaatatgtgcatgttatatataaatatgtaaattctgtgatactctatgatcatctctttctttatattattttcatagacatgaaatagttgctcagagattatgcattttaagacactcatagtatatattgccaaagtggtttccagaaaggcactgctggcttcgactcctataagcagcacgtgggcttgttcatctcactgcatgtttatgaagatacagttcttttgccttgttctctgcctgatgtgtatgcagaggcagccctcaatatgcagtggttgaataaatgaatgaagaaaccactatc

SEQ ID NO: 16248 - DNA, 5580 bp, Homo sapiens
  source 1..5580: mol_type = unassigned DNA
aacaggtaatgtttaacgtgccagtcacaaagatcacagaaacagtgtatgcccgggcataagatagcacgactgtgtatgctctggaggactgaaaggctgtacaagccctatgtattttttttcaaatatacatatgcatgggtcttgctgctgcctcttttgctgactgtaattggactttgaagcttcgaagttatatcataaaaatttgtaacctttgtctgagagagagctcagctaagcaatcactttccacttcttttcacaggataatataaacgttttcttgaaagcttgtgaacagattggattgaaagaagcccagcttttccatcctggagatctacaggatttatcaaatcgagtcactgtcaagcaagaagagactgacaggagagtgaaaaatgttttgataacattgtactggctgggaagaaaagcacaaagcaacccgtactataatggtccccatcttaatttgaaagcgtttgagaatcttttaggacaagcactgacgaaggcactcgaagactccagcttcctgaaaagaagtggcagggacagtggctacggtgacatctggtgtcctgaacgtggagaatttcttgctcctccaaggcaccataagagagaagattcctttgaaagcttggactctttgggctcgaggtcattgacaagctgctcctctgatatcacgttgagaggggggcgtgaaggttttgaaagtgacacagattcggaatttacatttaagatgcaggattataataaagatgatatgtcgtatcgaaggatttcggctgttgagccaaagactgcgttacccttcaatcgttttttacccaacaaaagtagacagccatcctatgtaccagcacctctgagaaagaaaaagccagacaaacatgaggataacagaagaagttgggcaagcccggtttatacagaagcagatggaacattttcaagtaatcagaggaggatttggggcaccaatgtggagaactggccaactgtacaaggaacttcaaagtcctcttgttatttggaagaggaaaaagcaaagacaagaagcatacccaacattgtaaaggatgatctttatgtgcgcaagctcagtccagtcatgccaaacccagggaatgcttttgatcagtttcttcccaaatgttggaccccagaagatgtgaactggaaaagaataaaaagggaaacttataagccatggtataaagaatttcagggattcagtcagtttttactgcttcaggccctccaaacatactctgatgacatcttgtcttctgaaacacataccaaaattgatcccacttctggcccaaggctcataacccgcaggaagaatctctcttatgcaccaggctatagaagagatgacctcgagatggcagccctggatcctgacttagagaatgatgatttctttgtcagaaagactggggctttccatgcaaatccatatgttctccgagcttttgaagactttagaaagttctctgagcaagatgattctgtagagcgagatataattttacagtgtagagaaggtgaacttgtacttccggatttggaaaaagatgatatgattgttcgccgaattccagcacagaagaaagaagtgccgctgtctggggccccagatagataccacccagtcccttttcccgaaccctggactcttcctccagaaattcaagcaaaatttctctgtgtacttgaaaggacatgcccatccaaagaaaaaagtaatagctgtagaatattagttccttcatatcggcagaagaaagatgacatgctgacacgtaagattcagtcctggaaactgggaactaccgtgcctcccatcagtttcacccctggcccctgcagtgaggctgacttgaagagatgggaggccatccgggaggccagcagacttaggcacaagaaaaggctgatggtggagagactctttcaaaagatttatggtgagaatgggagtaagtccatgagtgatgtcagcgcagaagatgttcaaaacttgcgtcagctgcgttacgaggagatgcagaaaataaaatcacaattaaaagaacaagatcagaaatggcaggatgaccttgcaaaatggaaagatcgtcgaaaaagttacacttcagatctgcagaagaaaaaagaagagagagaagaaattgaaaagcaggcacttgagaagtctaagagaagctctaagacgtttaaggaaatgctgcaggacagggaatcccaaaatcaaaagtctacagttccgtcaagaaggagaatgtattcttttgatgatgtgctggaggaaggaaagcgaccccctacaatgactgtgtcagaagcaagttaccagagtgagagagtagaagagaagggagcaacttatccttcagaaattcccaaagaagattctaccacttttgcaaaaagagaggaccgtgtaacaactgaaattcagcttccttctcaaagtcctgtggaagaacaaagcccagcctctttgtcttctctgcgttcacggagcacacaaatggaatcaactcgtgtttcagcttctctccccagaagttaccggaaaactgatacagtcaggttaacatctgtggtcacaccaagaccctttggctctcagacaaggggaatctcatcactccccagatcttacacgatggatgatgcttggaagtataatggagatgttgaagacattaagagaactccaaacaatgtggtcagcacccctgcaccaagcccggacgcaagccaactggcttcaagcttatctagccagaaagaggtagcagcaacagaagaagatgtgacaaggctgccctctcctacatcccccttctcatctctttcccaagaccaggctgccacttctaaagccacattgtcttccacatctggtcttgatttaatgtctgaatctggagaaggggaaatctccccacaaagagaagtctcaagatcccaggatcagttcagtgatatgagaatcagcataaaccagacgcctgggaagagtcttgactttgggtttacaataaaatgggatattcctgggatcttcgtagcatcagttgaagcaggtagcccagcagaattttctcagctacaagtagatgatgaaattattgctattaacaacaccaagttttcatataacgattcaaaagagtgggaggaagccatggctaaggctcaagaaactggacacctagtgatggatgtgaggcgctatggaaaggctggttcacctgaaacaaagtggattgatgcaacttctggaatttacaactcagaaaaatcttcaaatctatctgtaacaactgatttctccgaaagccttcagagttctaatattgaatccaaagaaatcaatggaattcatgatgaaagcaatgcttttgaatcaaaagcatctgaatccatttctttgaaaaacttaaaaaggcgatcacaattttttgaacaaggaagctctgattcggtggttcctgatcttccagttccaaccatcagtgccccgagtcgctgggtgtgggatcaagaggaggagcggaagcggcaggagaggtggcagaaggagcaggaccgcctactgcaggaaaaatatcaacgtgagcaggagaaactgagggaagagtggcaaagggccaaacaggaggcagagagagagaattccaagtacttggatgaggaactgatggtcctaagctcaaacagcatgtctctgaccacacgggagccctctcttgccacctgggaagctacctggagtgaagggtccaagtcttcagacagagaaggaacccgagcaggagaagaggagaggagacagccacaagaggaagttgttcatgaggaccaaggaaagaagccgcaggatcagcttgttattgagagagagaggaaatgggagcaacagcttcaggaagagcaagagcaaaagcggcttcaggctgaggctgaggagcagaagcgtcctgcggaggagcagaagcgccaggcagagatagagcgggaaacatcagtcagaatataccagtacaggaggcctgttgattcctatgatataccaaagacagaagaagcatcttcaggttttcttcctggtgacaggaataaatccagatctactactgaactggatgattactccacaaataaaaatggaaacaataaatatttagaccaaattgggaacatgacctcttcacagaggagatccaagaaagaacaagtaccatcaggagcagaattggagaggcaacaaatccttcaggaaatgaggaagagaacaccccttcacaatgacaacagctggatccgacagcgcagtgccagtgtcaacaaagagcctgttagtcttcctgggatcatgagaagaggcgaatctttagataacctggactccccccgatccaattcttggagacagcctccttggctcaatcagcccacaggattctatgcttcttcctctgtgcaagactttagtcgcccaccacctcagctggtgtccacatcaaaccgtgcctacatgcggaacccctcctccagcgtgcccccaccttcagctggctccgtgaagacctccaccacaggtgtggccaccacacagtcccccaccccgagaagccattccccttcagcttcacagtcaggctctcagctgcgtaacagtgtgttgcctgtgagtgtgacctcggaggctcttcctcaggagctgaagtcaggatcagaaaccaccaactgtactgcaacgactgctatctcagattcaaatctggacggccaaccgccatgtgatgtaagcctccatacgaaagcactgttgcagatagaagaagaggtggttgctgctcatgtagatctataaatatgtgttgtatgtcttttttgctttttttttaaaaaaaagaataactttttttgcctctttagattacatagaagcattgtagtcttggtagaaccagtatttttgttgtttatttataaggtaattgtgtgtggggaaaagtgcagtatttacctgttgaattcagcatcttgagagcacaagggaaaaaataagaacctacgaatatttttgaggcagataatgatctagtttgactttctagttagtggtgttttgaagagggtattttattgttttttaaaaaaaggttcttaaacattatttgaaatagttaatataaatacataattgcatttgctctgtttattgtaatgtattctaaattaatgcagaaccatatggaaaatttcattaaaatctatccccaaatgtgctttctgtatccttccttctacctattattctgatttttaaaaatgcagttaatgtaccatttatttgcttgatgaagggagctctattttctttaccagaaatgttgctaagtaattcccaatagaaagctgcttattttcattaatgaaaaataaccatggtttgtatactagaagtcttcttcagaaactggtgagcctttctgttcaattgcatttgtaaataaacttgctgatgcattt

SEQ ID NO: 16249 - DNA, 3706 bp, Homo sapiens
  source 1..3706: mol_type = unassigned DNA
ggggtccggggcggggccgcaggagcagtaggtgttagcagcttggtcgcgacaggtgcgctaggtagagcgccgggacctgtgacagggctggtagcagcgcagaggaaaggcggcttttagccaggtatttcagtgtctgtagacaagatggaatcatctccatttaatagacggcaatggacctcactatcattgagggtaacagccaaagaactttctcttgtcaacaagaacaagtcatcggctattgtggaaatattctccaagtaccagaaagcagctgaagaaacaaacatggagaagaagagaagtaacaccgaaaatctctcccagcactttagaaaggggaccctgactgtgttaaagaagaagtgggagaacccagggctgggagcagagtctcacacagactctctacggaacagcagcactgagattaggcacagagcagaccatcctcctgctgaagtgacaagccacgctgcttctggagccaaagctgaccaagaagaacaaatccaccccagatctagactcaggtcacctcctgaagccctcgttcagggtcgatatccccacatcaaggacggtgaggatcttaaagaccactcaacagaaagtaaaaaaatggaaaattgtctaggagaatccaggcatgaagtagaaaaatcagaaatcagtgaaaacacagatgcttcgggcaaaatagagaaatataatgttccgctgaacaggcttaagatgatgtttgagaaaggtgaaccaactcaaactaagattctccgggcccaaagccgaagtgcaagtggaaggaagatctctgaaaacagctattctctagatgacctggaaataggcccaggtcagttgtcatcttctacatttgactcggagaaaaatgagagtagacgaaatctggaacttccacgcctctcagaaacctctataaaggatcgaatggccaagtaccaggcagctgtgtccaaacaaagcagctcaaccaactatacaaatgagctgaaagccagtggtggcgaaatcaaaattcataaaatggagcaaaaggagaatgtgcccccaggtcctgaggtctgcatcacccatcaggaaggggaaaagatttctgcaaatgagaatagcctggcagtccgttccacccctgccgaagatgactcccgtgactcccaggttaagagtgaggttcaacagcctgtccatcccaagccactaagtccagattccagagcctccagtctttctgaaagttctcctcccaaagcaatgaagaagtttcaggcacctgcaagagagacctgcgtggaatgtcagaagacagtctatccaatggagcgtctcttggccaaccagcaggtgtttcacatcagctgcttccgttgctcctattgcaacaacaaactcagtctaggaacatatgcatctttacatggaagaatctattgtaagcctcacttcaatcaactctttaaatctaagggcaactatgatgaaggctttgggcacagaccacacaaggatctatgggcaagcaaaaatgaaaacgaagagattttggagagaccagcccagcttgcaaatgcaagggagacccctcacagcccaggggtagaagatgcccctattgctaaggtgggtgtcctggctgcaagtatggaagccaaggcctcctctcagcaggagaaggaagacaagccagctgaaaccaagaagctgaggatcgcctggccaccccccactgaacttggaagttcaggaagtgccttggaggaagggatcaaaatgtcaaagcccaaatggcctcctgaagacgaaatcagcaagcccgaagttcctgaggatgtcgatctagatctgaagaagctaagacgatcttcttcactgaaggaaagaagccgcccattcactgtagcagcttcatttcaaagcacctctgtcaagagcccaaaaactgtgtccccacctatcaggaaaggctggagcatgtcagagcagagtgaagagtctgtgggtggaagagttgcagaaaggaaacaagtggaaaatgccaaggcttctaagaagaatgggaatgtgggaaaaacaacctggcaaaacaaagaatctaaaggagagacagggaagagaagtaaggaaggtcatagtttggagatggagaatgagaatcttgtagaaaatggtgcagactccgatgaagatgataacagcttcctcaaacaacaatctccacaagaacccaagtctctgaattggtcgagttttgtagacaacacctttgctgaagaattcactactcagaatcagaaatcccaggatgtggaactctgggagggagaagtggtcaaagagctctctgtggaagaacagataaagagaaatcggtattatgatgaggatgaggatgaagagtgacaaattgcaatgatgctgggccttaaattcatgttagtgttagcgagccactgccctttgtcaaaatgtgatgcacataagcaggtatcccagcatgaaatgtaatttacttggaagtaactttggaaaagaattccttcttaaaatcaaaaacaaaacaaaaaaacacaaaaaacacattctaaatactagagataactttacttaaattcttcattttagcagtgatgatatgcataagtgctgtaaggcttgtaactggggaaatattccacctgataatagcccagattctactgtattcccaaaaggcaatattaaggtagacagatgattagtagtatattgttacacactattttggaattagagaacatacagaaggaatttaggggcttaaacattacgactgaatgcactttagtataaagggcacagtttgtatatttttaaatgaataccaatttaattttttagtatttacctgttaagagattatttagtctttaaattttttaggttaattttcttgctgtgatatatatgaggaatttactactttatgtcctgctctctaaactacatcctgaactcgacgtcctgaggtataatacaacagagcactttttgaggcaattgaaaaaccaacctacactcttcggtgcttagagagatctgctgtctcccaaataagcttttgtatctgccagtgaatttactgtactccaaatgattgctttcttttctggtgatatctgtgcttctcataattactgaaagctgcaatattttagtaataccttcgggatcactgtcccccatcttccgtgttagagcaaagtgaagagtttaaaggaggaagaagaaagaactgtcttacaccacttgagctcagacctctaaaccctgtatttcccttatgatgtcccctttttgagacactaatttttaaatacttactagctctgaaatatattgatttttatcacagtattctcagggtgaaattaaaccaactataggcctttttcttgggatgattttctagtcttaaggtttggggacattataaacttgagtacatttgttgtacacagttgatattccaaattgtatggatgggagggagaggtgtcttaagctgtaggcttttctttgtactgcatttatagagatttagctttaatattttttagagatgtaaaacattctgctttcttagtcttacctagtctgaaacatttttattcaataaagattttaattaaaatttgaa

SEQ ID NO: 16250 - DNA, 3669 bp, Homo sapiens
  source 1..3669: mol_type = unassigned DNA
gcttggtcgcgacaggtgcgctaggtagagcgccgggacctgtgacagggctggtagcagcgcagaggaaaggcggcttttagccaggtatttcagtgtctgtagacaagatggaatcatctccatttaatagacggcaatggacctcactatcattgagggtaacagccaaagaactttctcttgtcaacaagaacaagtcatcggctattgtggaaatattctccaagtaccagaaagcagctgaagaaacaaacatggagaagaagagaagtaacaccgaaaatctctcccagcactttagaaaggggaccctgactgtgttaaagaagaagtgggagaacccagggctgggagcagagtctcacacagactctctacggaacagcagcactgagattaggcacagagcagaccatcctcctgctgaagtgacaagccacgctgcttctggagccaaagctgaccaagaagaacaaatccaccccagatctagactcaggtcacctcctgaagccctcgttcagggtcgatatccccacatcaaggacggtgaggatcttaaagaccactcaacagaaagtaaaaaaatggaaaattgtctaggagaatccaggcatgaagtagaaaaatcagaaatcagtgaaaacacagatgcttcgggcaaaatagagaaatataatgttccgctgaacaggcttaagatgatgtttgagaaaggtgaaccaactcaaactaagattctccgggcccaaagccgaagtgcaagtggaaggaagatctctgaaaacagctattctctagatgacctggaaataggcccaggtcagttgtcatcttctacatttgactcggagaaaaatgagagtagacgaaatctggaacttccacgcctctcagaaacctctataaaggatcgaatggccaagtaccaggcagctgtgtccaaacaaagcagctcaaccaactatacaaatgagctgaaagccagtggtggcgaaatcaaaattcataaaatggagcaaaaggagaatgtgcccccaggtcctgaggtctgcatcacccatcaggaaggggaaaagatttctgcaaatgagaatagcctggcagtccgttccacccctgccgaagatgactccccaggtgactcccaggttaagagtgaggttcaacagcctgtccatcccaagccactaagtccagattccagagcctccagtctttctgaaagttctcctcccaaagcaatgaagaagtttcaggcacctgcaagagagacctgcgtggaatgtcagaagacagtctatccaatggagcgtctcttggccaaccagcaggtgtttcacatcagctgcttccgttgctcctattgcaacaacaaactcagtctaggaacatatgcatctttacatggaagaatctattgtaagcctcacttcaatcaactctttaaatctaagggcaactatgatgaaggctttgggcacagaccacacaaggatctatgggcaagcaaaaatgaaaacgaagagattttggagagaccagcccagcttgcaaatgcaagggagacccctcacagcccaggggtagaagatgcccctattgctaaggtgggtgtcctggctgcaagtatggaagccaaggcctcctctcagcaggagaaggaagacaagccagctgaaaccaagaagctgaggatcgcctggccaccccccactgaacttggaagttcaggaagtgccttggaggaagggatcaaaatgtcaaagcccaaatggcctcctgaagacgaaatcagcaagcccgaagttcctgaggatgtcgatctagatctgaagaagctaagacgatcttcttcactgaaggaaagaagccgcccattcactgtagcagcttcatttcaaagcacctctgtcaagagcccaaaaactgtgtccccacctatcaggaaaggctggagcatgtcagagcagagtgaagagtctgtgggtggaagagttgcagaaaggaaacaagtggaaaatgccaaggcttctaagaagaatgggaatgtgggaaaaacaacctggcaaaacaaagaatctaaaggagagacagggaagagaagtaaggaaggtcatagtttggagatggagaatgagaatcttgtagaaaatggtgcagactccgatgaagatgataacagcttcctcaaacaacaatctccacaagaacccaagtctctgaattggtcgagttttgtagacaacacctttgctgaagaattcactactcagaatcagaaatcccaggatgtggaactctgggagggagaagtggtcaaagagctctctgtggaagaacagataaagagaaatcggtattatgatgaggatgaggatgaagagtgacaaattgcaatgatgctgggccttaaattcatgttagtgttagcgagccactgccctttgtcaaaatgtgatgcacataagcaggtatcccagcatgaaatgtaatttacttggaagtaactttggaaaagaattccttcttaaaatcaaaaacaaaacaaaaaaacacaaaaaacacattctaaatactagagataactttacttaaattcttcattttagcagtgatgatatgcataagtgctgtaaggcttgtaactggggaaatattccacctgataatagcccagattctactgtattcccaaaaggcaatattaaggtagacagatgattagtagtatattgttacacactattttggaattagagaacatacagaaggaatttaggggcttaaacattacgactgaatgcactttagtataaagggcacagtttgtatatttttaaatgaataccaatttaattttttagtatttacctgttaagagattatttagtctttaaattttttaggttaattttcttgctgtgatatatatgaggaatttactactttatgtcctgctctctaaactacatcctgaactcgacgtcctgaggtataatacaacagagcactttttgaggcaattgaaaaaccaacctacactcttcggtgcttagagagatctgctgtctcccaaataagcttttgtatctgccagtgaatttactgtactccaaatgattgctttcttttctggtgatatctgtgcttctcataattactgaaagctgcaatattttagtaataccttcgggatcactgtcccccatcttccgtgttagagcaaagtgaagagtttaaaggaggaagaagaaagaactgtcttacaccacttgagctcagacctctaaaccctgtatttcccttatgatgtcccctttttgagacactaatttttaaatacttactagctctgaaatatattgatttttatcacagtattctcagggtgaaattaaaccaactataggcctttttcttgggatgattttctagtcttaaggtttggggacattataaacttgagtacatttgttgtacacagttgatattccaaattgtatggatgggagggagaggtgtcttaagctgtaggcttttctttgtactgcatttatagagatttagctttaatattttttagagatgtaaaacattctgctttcttagtcttacctagtctgaaacatttttattcaataaagattttaattaaaatttgaa

SEQ ID NO: 16251 - DNA, 2198 bp, Homo sapiens
  source 1..2198: mol_type = unassigned DNA
ggatgctttctccatgtggcaaggctgtaactgttcacagctgtctgaaacagcagtggaccaggagcagcttggagttttaactttcattttacaaagaacaacatgtttgaatgtttcagcagaccaagaagaacaaatccaccccagatctagactcaggtcacctcctgaagccctcgttcagggtcgatatccccacatcaaggacggtgaggatcttaaagaccactcaacagaaagtaaaaaaatggaaaattgtctaggagaatccaggcatgaagtagaaaaatcagaaatcagtgaaaacacagatgcttcgggcaaaatagagaaatataatgttccgctgaacaggcttaagatgatgtttgagaaaggtgaaccaactcaaactaagattctccgggcccaaagccgaagtgcaagtggaaggaagatctctgaaaacagctattctctagatgacctggaaataggcccaggtcagttgtcatcttctacatttgactcggagaaaaatgagagtagacgaaatctggaacttccacgcctctcagaaacctctataaaggatcgaatggccaagtaccaggcagctgtgtccaaacaaagcagctcaaccaactatacaaatgagctgaaagccagtggtggcgaaatcaaaattcataaaatggagcaaaaggagaatgtgcccccaggtcctgaggtctgcatcacccatcaggaaggggaaaagatttctgcaaatgagaatagcctggcagtccgttccacccctgccgaagatgactcccgtgactcccaggttaagagtgaggttcaacagcctgtccatcccaagccactaagtccagattccagagcctccagtctttctgaaagttctcctcccaaagcaatgaagaagtttcaggcacctgcaagagagacctgcgtggaatgtcagaagacagtctatccaatggagcgtctcttggccaaccagcaggtgtttcacatcagctgcttccgttgctcctattgcaacaacaaactcagtctaggaacatatgcatctttacatggaagaatctattgtaagcctcacttcaatcaactctttaaatctaagggcaactatgatgaaggctttgggcacagaccacacaaggatctatgggcaagcaaaaatgaaaacgaagagattttggagagaccagcccagcttgcaaatgcaagggagacccctcacagcccaggggtagaagatgcccctattgctaaggtgggtgtcctggctgcaagtatggaagccaaggcctcctctcagcaggagaaggaagacaagccagctgaaaccaagaagctgaggatcgcctggccaccccccactgaacttggaagttcaggaagtgccttggaggaagggatcaaaatgtcaaagcccaaatggcctcctgaagacgaaatcagcaagcccgaagttcctgaggatgtcgatctagatctgaagaagctaagacgatcttcttcactgaaggaaagaagccgcccattcactgtagcagcttcatttcaaagcacctctgtcaagagcccaaaaactgtgtccccacctatcaggaaaggctggagcatgtcagagcagagtgaagagtctgtgggtggaagagttgcagaaaggaaacaagtggaaaatgccaaggcttctaagaagaatgggaatgtgggaaaaacaacctggcaaaacaaagaatctaaaggagagacagggaagagaagtaaggaaggtcatagtttggagatggagaatgagaatcttgtagaaaatggtgcagactccgatgaagatgataacagcttcctcaaacaacaatctccacaagaacccaagtctctgaattggtcgagttttgtagacaacacctttgctgaagaattcactactcagaatcagaaatcccaggatgtggaactctgggagggagaagtggtcaaagagctctctgtggaagaacagataaagagaaatcggtattatgatgaggatgaggatgaagagtgacaaattgcaatgatgctgggccttaaattcatgttagtgttagcgagccactgccctttgtcaaaatgtgatgcacataagcaggtatcccagcatgaaatgtaatttacttggaagtaactttggaaaagaattccttcttaaaatc

SEQ ID NO: 16252 - DNA, 3920 bp, Homo sapiens
  source 1..3920: mol_type = unassigned DNA
tgggtcgtaatctagaataccatcactaggtgactaagtcatactcacattcctttcattgacctggtggccataaattgtttcctcccatgcctaaagattcacagagaacagaaaagtactagattactacattattagcagactaatggtgggaaatgtctatagtcatcgacctctatgtttattttattttattttatttttttattttgagatggagtttcactcttgttccccaggctggagtgcagtggcgtgatctcggctcactgcaacctctgcctccctgattcaagcgattctcctgcctcagcctcccaagtaactgggattacaagtgtgcaccaccacacgtggctaattttttgtatttttagtagagacaggatttcaccatgttcgccaggctggtcttgaactcctgacctcaggcgatccacccgcctcagcttcccaaagtgctgggattacaggcgtgagccactgcacccaggttctatgttgattttagatgtaatagatgagttaattgtaatattcaccccagtgtcctttgcaaggaaaaaaatgcaattatccttattccttatgacaataaaatgcatgttcttttatgttgaggctctgttttgagaagtaaaataaattatgtctttagtacaatatatgaattgtatatggaaaaacatgctttttgaaagtcccaccaaaaaggtttctttatggtatcattaaatataatttcagtttttatatgtatacatcatccctgtctctctttccaggccgggcatttatatatgtatggtcagtatattttctattattggcacttggcatctcctttcccctgctccagaatggtcttttctgataaaactcacaagctttgcattaccacaagctctgctgctagaagagtgaatcacaagaatgttgtatgcttggggtgttctgtgtgcctgtgttgatgtgtctgtattctaatgagcaatccagttttacactagcatacagatatttaactctgaggtatgtgtccacaaagctgcttttgtcatttcactagtcagtgggttttgcttgtgagagttagggggttgatttgacccgaggcttcttagaagaattttttaacattccaagtttatctaatagatgtgctatgaagagaacagaatgatgggactttaaaaaaatttttacagttatttttattttgtagaatgagctgaaagccagtggtggcgaaatcaaaattcataaaatggagcaaaaggagaatgtgcccccaggtcctgaggtctgcatcacccatcaggaaggggaaaagatttctgcaaatgagaatagcctggcagtccgttccacccctgccgaagatgactcccgtgactcccaggttaagagtgaggttcaacagcctgtccatcccaagccactaagtccagattccagagcctccagtctttctgaaagttctcctcccaaagcaatgaagaagtttcaggcacctgcaagagagacctgcgtggaatgtcagaagacagtctatccaatggagcgtctcttggccaaccagcaggtgtttcacatcagctgcttccgttgctcctattgcaacaacaaactcagtctaggaacatatgcatctttacatggaagaatctattgtaagcctcacttcaatcaactctttaaatctaagggcaactatgatgaaggctttgggcacagaccacacaaggatctatgggcaagcaaaaatgaaaacgaagagattttggagagaccagcccagcttgcaaatgcaagggagacccctcacagcccaggggtagaagatgcccctattgctaaggtgggtgtcctggctgcaagtatggaagccaaggcctcctctcagcaggagaaggaagacaagccagctgaaaccaagaagctgaggatcgcctggccaccccccactgaacttggaagttcaggaagtgccttggaggaagggatcaaaatgtcaaagcccaaatggcctcctgaagacgaaatcagcaagcccgaagttcctgaggatgtcgatctagatctgaagaagctaagacgatcttcttcactgaaggaaagaagccgcccattcactgtagcagcttcatttcaaagcacctctgtcaagagcccaaaaactgtgtccccacctatcaggaaaggctggagcatgtcagagcagagtgaagagtctgtgggtggaagagttgcagaaaggaaacaagtggaaaatgccaaggcttctaagaagaatgggaatgtgggaaaaacaacctggcaaaacaaagaatctaaaggagagacagggaagagaagtaaggaaggtcatagtttggagatggagaatgagaatcttgtagaaaatggtgcagactccgatgaagatgataacagcttcctcaaacaacaatctccacaagaacccaagtctctgaattggtcgagttttgtagacaacacctttgctgaagaattcactactcagaatcagaaatcccaggatgtggaactctgggagggagaagtggtcaaagagctctctgtggaagaacagataaagagaaatcggtattatgatgaggatgaggatgaagagtgacaaattgcaatgatgctgggccttaaattcatgttagtgttagcgagccactgccctttgtcaaaatgtgatgcacataagcaggtatcccagcatgaaatgtaatttacttggaagtaactttggaaaagaattccttcttaaaatcaaaaacaaaacaaaaaaacacaaaaaacacattctaaatactagagataactttacttaaattcttcattttagcagtgatgatatgcataagtgctgtaaggcttgtaactggggaaatattccacctgataatagcccagattctactgtattcccaaaaggcaatattaaggtagacagatgattagtagtatattgttacacactattttggaattagagaacatacagaaggaatttaggggcttaaacattacgactgaatgcactttagtataaagggcacagtttgtatatttttaaatgaataccaatttaattttttagtatttacctgttaagagattatttagtctttaaattttttaggttaattttcttgctgtgatatatatgaggaatttactactttatgtcctgctctctaaactacatcctgaactcgacgtcctgaggtataatacaacagagcactttttgaggcaattgaaaaaccaacctacactcttcggtgcttagagagatctgctgtctcccaaataagcttttgtatctgccagtgaatttactgtactccaaatgattgctttcttttctggtgatatctgtgcttctcataattactgaaagctgcaatattttagtaataccttcgggatcactgtcccccatcttccgtgttagagcaaagtgaagagtttaaaggaggaagaagaaagaactgtcttacaccacttgagctcagacctctaaaccctgtatttcccttatgatgtcccctttttgagacactaatttttaaatacttactagctctgaaatatattgatttttatcacagtattctcagggtgaaattaaaccaactataggcctttttcttgggatgattttctagtcttaaggtttggggacattataaacttgagtacatttgttgtacacagttgatattccaaattgtatggatgggagggagaggtgtcttaagctgtaggcttttctttgtactgcatttatagagatttagctttaatattttttagagatgtaaaacattctgctttcttagtcttacctagtctgaaacatttttattcaataaagattttaattaaaatttgaa

SEQ ID NO: 16253 - DNA, 567 bp, Homo sapiens
  source 1..567: mol_type = unassigned DNA
agatcagttatgctcttcggttgccaagagctgcaagtagtactttatttttcttttacttctggtaagctgtgaattagcagtactttattattatttttttttagttttcaagactcctggatcagaaacaaagtggtactttatatttttcactcttcaaataaggaaactgttgactcatttctaatctctcgtcttctggacaaaggtatttcagtgtctgtagacaagatggaatcatctccatttaatagacggcaatggacctcactatcattgagggtaacagccaaagaactttctcttgtcaacaagaacaagtcatcggctattgtggaaatattctccaagtaccagaaagcagctgaagaaacaaacatggagaagaagagaagtaacaccgaaaatctctcccagcactttagaaaggggaccctgactgtgttaaagaagaagtgggagaacccagggctgggagcagagtctcacacagactctctacggaacagcagcactgagattaggcacagagcagaccatcctcctgctgaagtgacaagccac

SEQ ID NO: 16254 - DNA, 583 bp, Homo sapiens
  source 1..583: mol_type = unassigned DNA
aggtagagcgccgggacctgtgacagggctggtagcagcgcagaggaaaggcggcttttagccagttttcaagactcctggatcagaaacaaagtggtactttatatttttcactcttcaaataaggaaactgttgactcatttctaatctctcgtcttctggacaaaggtatttcagtgtctgtagacaagatggaatcatctccatttaatagacggcaatggacctcactatcattgagggtaacagccaaagaactttctcttgtcaacaagaacaagtcatcggctattgtggaaatattctccaagtaccagaaagcagctgaagaaacaaacatggagaagaagagaagtaacaccgaaaatctctcccagcactttagaaaggggaccctgactgtgttaaagaagaagtgggagaacccagggctgggagcagagtctcacacagactctctacggaacagcagcactgagattaggcacagagcagaccatcctcctgctgaagtgacaagccacgctgcttctggagccaaagctgaccaagaagaacaaatccaccccagatctagactca

SEQ ID NO: 16255 - DNA, 2652 bp, Homo sapiens
  source 1..2652: mol_type = unassigned DNA
ataaaatggagcaaaaggagaatgtgcccccaggtcctgaggtctgcatcacccatcaggaaggggaaaagatttctgcaaatgagaatagcctggcagtccgttccacccctgccgaagatgactcccgtgactcccaggttaagagtgaggttcaacagcctgtccatcccaagccactaagtccagattccagagcctccagtctttctgaaagttctcctcccaaagcaatgaagtttcaggcacctgcaagagagacctgcgtggaatgtcagaagacagtctatccaatggagcgtctcttggccaaccagcaggtgtttcacatcagctgcttccgttgctcctattgcaacaacaaactcagtctaggaacatatgcatctttacatggaagaatctattgtaagcctcacttcaatcaactctttaaatctaagggcaactatgatgaaggctttgggcacagaccacacaaggatctatgggcaagcaaaaatgaaaacgaagagattttggagagaccagcccagcttgcaaatgcaagggagacccctcacagcccaggggtagaagatgcccctattgctaaggtgggtgtcctggctgcaagtatggaagccaaggcctcctctcagcaggagaaggaagacaagccagctgaaaccaagaagctgaggatcgcctggccaccccccactgaacttggaagttcaggaagtgccttggaggaagggatcaaaatgtcaaagcccaaatggcctcctgaagacgaaatcagcaagcccgaagttcctgaggatgtcgatctagatctgaagaagctaagacgatcttcttcactgaaggaaagaagccgcccattcactgtagcagcttcatttcaaagcacctctgtcaagagcccaaaaactgtgtccccacctatcaggaaaggctggagcatgtcagagcagagtgaagagtctgtgggtggaagagttgcagaaaggaaacaagtggaaaatgccaaggcttctaagaagaatgggaatgtgggaaaaacaacctggcaaaacaaagaatctaaaggagagacagggaagagaagtaaggaaggtcatagtttggagatggagaatgagaatcttgtagaaaatggtgcagactccgatgaagatgataacagcttcctcaaacaacaatctccacaagaacccaagtctctgaattggtcgagttttgtagacaacacctttgctgaagaattcactactcagaatcagaaatcccaggatgtggaactctgggagggagaagtggtcaaagagctctctgtggaagaacagataaagagaaatcggtattatgatgaggatgaggatgaagagtgacaaattgcaatgatgctgggccttaaattcatgttagtgttagcgagccactgccctttgtcaaaatgtgatgcacataagcaggtatcccagcatgaaatgtaatttacttggaagtaactttggaaaagaattccttcttaaaatcaaaaacaaaacaaaaaaacacaaaaaacacattctaaatactagagataactttacttaaattcttcattttagcagtgatgatatgcataagtgctgtaaggcttgtaactggggaaatattccacctgataatagcccagattctactgtattcccaaaaggcaatattaaggtagacagatgattagtagtatattgttacacactattttggaattagagaacatacagaaggaatttaggggcttaaacattacgactgaatgcactttagtataaagggcacagtttgtatatttttaaatgaataccaatttaattttttagtatttacctgttaagagattatttagtctttaaattttttaggttaattttcttgctgtgatatatatgaggaatttactactttatgtcctgctctctaaactacatcctgaactcgacgtcctgaggtataatacaacagagcactttttgaggcaattgaaaaaccaacctacactcttcggtgcttagagagatctgctgtctcccaaataagcttttgtatctgccagtgaatttactgtactccaaatgattgctttcttttctggtgatatctgtgcttctcataattactgaaagctgcaatattttagtaataccttcgggatcactgtcccccatcttccgtgttagagcaaagtgaagagtttaaaggaggaagaagaaagaactgtcttacaccacttgagctcagacctctaaaccctgtatttcccttatgatgtcccctttttgagacactaatttttaaatacttactagctctgaaatatattgatttttatcacagtattctcagggtgaaattaaaccaactataggcctttttcttgggatgattttctagtcttaaggtttggggacattataaacttgagtacatttgttgtacacagttgatattccaaattgtatggatgggagggagaggtgtcttaagctgtaggcttttctttgtactgcatttatagagatttagctttaatattttttagagatgtaaaacattctgctttcttagtcttacctagtctgaaacatttttattcaataaagattttaattaaaatttgaa

SEQ ID NO: 16256 - DNA, 3612 bp, Homo sapiens
  source 1..3612: mol_type = unassigned DNA
ttcctgcttcagctcctgagtttttctctcttcccctctccctctccctctgccgggtggatgctttctccatgtggcaaggctgtaactgttcacagctgtctgaaacagcagtggaccaggagcagcttggagttttaactttcattttacaaagaacaacatgtttgaatgtttcagcaggcaagttataactggcatctacttcttgttcttctagaacaccgaaaatctctcccagcactttagaaaggggaccctgactgtgttaaagaagaagtgggagaacccagggctgggagcagagtctcacacagactctctacggaacagcagcactgagattaggcacagagcagaccatcctcctgctgaagtgacaagccacgctgcttctggagccaaagctgaccaagaagaacaaatccaccccagatctagactcaggtcacctcctgaagccctcgttcagggtcgatatccccacatcaaggacggtgaggatcttaaagaccactcaacagaaagtaaaaaaatggaaaattgtctaggagaatccaggcatgaagtagaaaaatcagaaatcagtgaaaacacagatgcttcgggcaaaatagagaaatataatgttccgctgaacaggcttaagatgatgtttgagaaaggtgaaccaactcaaactaagattctccgggcccaaagccgaagtgcaagtggaaggaagatctctgaaaacagctattctctagatgacctggaaataggcccaggtcagttgtcatcttctacatttgactcggagaaaaatgagagtagacgaaatctggaacttccacgcctctcagaaacctctataaaggatcgaatggccaagtaccaggcagctgtgtccaaacaaagcagctcaaccaactatacaaatgagctgaaagccagtggtggcgaaatcaaaattcataaaatggagcaaaaggagaatgtgcccccaggtcctgaggtctgcatcacccatcaggaaggggaaaagatttctgcaaatgagaatagcctggcagtccgttccacccctgccgaagatgactccccaggtgactcccaggttaagagtgaggttcaacagcctgtccatcccaagccactaagtccagattccagagcctccagtctttctgaaagttctcctcccaaagcaatgaagaagtttcaggcacctgcaagagagacctgcgtggaatgtcagaagacagtctatccaatggagcgtctcttggccaaccagcaggtgtttcacatcagctgcttccgttgctcctattgcaacaacaaactcagtctaggaacatatgcatctttacatggaagaatctattgtaagcctcacttcaatcaactctttaaatctaagggcaactatgatgaaggctttgggcacagaccacacaaggatctatgggcaagcaaaaatgaaaacgaagagattttggagagaccagcccagcttgcaaatgcaagggagacccctcacagcccaggggtagaagatgcccctattgctaaggtgggtgtcctggctgcaagtatggaagccaaggcctcctctcagcaggagaaggaagacaagccagctgaaaccaagaagctgaggatcgcctggccaccccccactgaacttggaagttcaggaagtgccttggaggaagggatcaaaatgtcaaagcccaaatggcctcctgaagacgaaatcagcaagcccgaagttcctgaggatgtcgatctagatctgaagaagctaagacgatcttcttcactgaaggaaagaagccgcccattcactgtagcagcttcatttcaaagcacctctgtcaagagcccaaaaactgtgtccccacctatcaggaaaggctggagcatgtcagagcagagtgaagagtctgtgggtggaagagttgcagaaaggaaacaagtggaaaatgccaaggcttctaagaagaatgggaatgtgggaaaaacaacctggcaaaacaaagaatctaaaggagagacagggaagagaagtaaggaaggtcatagtttggagatggagaatgagaatcttgtagaaaatggtgcagactccgatgaagatgataacagcttcctcaaacaacaatctccacaagaacccaagtctctgaattggtcgagttttgtagacaacacctttgctgaagaattcactactcagaatcagaaatcccaggatgtggaactctgggagggagaagtggtcaaagagctctctgtggaagaacagataaagagaaatcggtattatgatgaggatgaggatgaagagtgacaaattgcaatgatgctgggccttaaattcatgttagtgttagcgagccactgccctttgtcaaaatgtgatgcacataagcaggtatcccagcatgaaatgtaatttacttggaagtaactttggaaaagaattccttcttaaaatcaaaaacaaaacaaaaaaacacaaaaaacacattctaaatactagagataactttacttaaattcttcattttagcagtgatgatatgcataagtgctgtaaggcttgtaactggggaaatattccacctgataatagcccagattctactgtattcccaaaaggcaatattaaggtagacagatgattagtagtatattgttacacactattttggaattagagaacatacagaaggaatttaggggcttaaacattacgactgaatgcactttagtataaagggcacagtttgtatatttttaaatgaataccaatttaattttttagtatttacctgttaagagattatttagtctttaaattttttaggttaattttcttgctgtgatatatatgaggaatttactactttatgtcctgctctctaaactacatcctgaactcgacgtcctgaggtataatacaacagagcactttttgaggcaattgaaaaaccaacctacactcttcggtgcttagagagatctgctgtctcccaaataagcttttgtatctgccagtgaatttactgtactccaaatgattgctttcttttctggtgatatctgtgcttctcataattactgaaagctgcaatattttagtaataccttcgggatcactgtcccccatcttccgtgttagagcaaagtgaagagtttaaaggaggaagaagaaagaactgtcttacaccacttgagctcagacctctaaaccctgtatttcccttatgatgtcccctttttgagacactaatttttaaatacttactagctctgaaatatattgatttttatcacagtattctcagggtgaaattaaaccaactataggcctttttcttgggatgattttctagtcttaaggtttggggacattataaacttgagtacatttgttgtacacagttgatattccaaattgtatggatgggagggagaggtgtcttaagctgtaggcttttctttgtactgcatttatagagatttagctttaatattttttagagatgtaaaacattctgctttcttagtcttacctagtctgaaacatttttattcaataaagattttaattaaaatttg

SEQ ID NO: 16257 - DNA, 3254 bp, Homo sapiens
  source 1..3254: mol_type = unassigned DNA
agaccatcctcctgctgaagtgacaagccacgctgcttctggagccaaagctgaccaagaagaacaaatccaccccagatctagactcaggtcacctcctgaagccctcgttcagggtcgatatccccacatcaaggacggtgaggatcttaaagaccactcaacagaaagtaaaaaaatggaaaattgtctaggagaatccaggcatgaagtagaaaaatcagaaatcagtgaaaacacagatgcttcgggcaaaatagagaaatataatgttccgctgaacaggcttaagatgatgtttgagaaaggtgaaccaactcaaactaagattctccgggcccaaagccgaagtgcaagtggaaggaagatctctgaaaacagctattctctagatgacctggaaataggcccaggtcagttgtcatcttctacatttgactcggagaaaaatgagagtagacgaaatctggaacttccacgcctctcagaaacctctataaaggatcgaatggccaagtaccaggcagctgtgtccaaacaaagcagctcaaccaactatacaaatgagctgaaagccagtggtggcgaaatcaaaattcataaaatggagcaaaaggagaatgtgcccccaggtcctgaggtctgcatcacccatcaggaaggggaaaagatttctgcaaatgagaatagcctggcagtccgttccacccctgccgaagatgactcccgtgactcccaggttaagagtgaggttcaacagcctgtccatcccaagccactaagtccagattccagagcctccagtctttctgaaagttctcctcccaaagcaatgaagaagtttcaggcacctgcaagagagacctgcgtggaatgtcagaagacagtctatccaatggagcgtctcttggccaaccagcaggtgtttcacatcagctgcttccgttgctcctattgcaacaacaaactcagtctaggaacatatgcatctttacatggaagaatctattgtaagcctcacttcaatcaactctttaaatctaagggcaactatgatgaaggctttgggcacagaccacacaaggatctatgggcaagcaaaaatgaaaacgaagagattttggagagaccagcccagcttgcaaatgcaagggagacccctcacagcccaggggtagaagatgcccctattgctaaggtgggtgtcctggctgcaagtatggaagccaaggcctcctctcagcaggagaaggaagacaagccagctgaaaccaagaagctgaggatcgcctggccaccccccactgaacttggaagttcaggaagtgccttggaggaagggatcaaaatgtcaaagcccaaatggcctcctgaagacgaaatcagcaagcccgaagttcctgaggatgtcgatctagatctgaagaagctaagacgatcttcttcactgaaggaaagaagccgcccattcactgtagcagcttcatttcaaagcacctctgtcaagagcccaaaaactgtgtccccacctatcaggaaaggctggagcatgtcagagcagagtgaagagtctgtgggtggaagagttgcagaaaggaaacaagtggaaaatgccaaggcttctaagaagaatgggaatgtgggaaaaacaacctggcaaaacaaagaatctaaaggagagacagggaagagaagtaaggaaggtcatagtttggagatggagaatgagaatcttgtagaaaatggtgcagactccgatgaagatgataacagcttcctcaaacaacaatctccacaagaacccaagtctctgaattggtcgagttttgtagacaacacctttgctgaagaattcactactcagaatcagaaatcccaggatgtggaactctgggagggagaagtggtcaaagagctctctgtggaagaacagataaagagaaatcggtattatgatgaggatgaggatgaagagtgacaaattgcaatgatgctgggccttaaattcatgttagtgttagcgagccactgccctttgtcaaaatgtgatgcacataagcaggtatcccagcatgaaatgtaatttacttggaagtaactttggaaaagaattccttcttaaaatcaaaaacaaaacaaaaaaacacaaaaaacacattctaaatactagagataactttacttaaattcttcattttagcagtgatgatatgcataagtgctgtaaggcttgtaactggggaaatattccacctgataatagcccagattctactgtattcccaaaaggcaatattaaggtagacagatgattagtagtatattgttacacactattttggaattagagaacatacagaaggaatttaggggcttaaacattacgactgaatgcactttagtataaagggcacagtttgtatatttttaaatgaataccaatttaattttttagtatttacctgttaagagattatttagtctttaaattttttaggttaattttcttgctgtgatatatatgaggaatttactactttatgtcctgctctctaaactacatcctgaactcgacgtcctgaggtataatacaacagagcactttttgaggcaattgaaaaaccaacctacactcttcggtgcttagagagatctgctgtctcccaaataagcttttgtatctgccagtgaatttactgtactccaaatgattgctttcttttctggtgatatctgtgcttctcataattactgaaagctgcaatattttagtaataccttcgggatcactgtcccccatcttccgtgttagagcaaagtgaagagtttaaaggaggaagaagaaagaactgtcttacaccacttgagctcagacctctaaaccctgtatttcccttatgatgtcccctttttgagacactaatttttaaatacttactagctctgaaatatattgatttttatcacagtattctcagggtgaaattaaaccaactataggcctttttcttgggatgattttctagtcttaaggtttggggacattataaacttgagtacatttgttgtacacagttgatattccaaattgtatggatgggagggagaggtgtcttaagctgtaggcttttctttgtactgcatttatagagatttagctttaatattttttagagatgtaaaacattctgctttcttagtcttacctagtctgaaacatttttattcaataaagattttaattaaaatttgaa

SEQ ID NO: 16258 - DNA, 2285 bp, Homo sapiens
  source 1..2285: mol_type = unassigned DNA
gggagaaaggcaggcagccggcgggcgctgcgtgtgtgtttgagtgtgcgagtgtgagtgagtgtgagtgccgggtcctgcctctcctggtgcccccagcagaggggcccggtggcctggggagggcgggcgggctgctcggaggcagaggcagcaagaggcggcggcggggagagccgagaaggaggaggaggagagaggaaagagcggagcagccattgttgagggaaaccttgcaaacaaagaaggctccggactccccgcggccccccgccccccaggccggccccctggcccccggcccccggcccagtggccattgtaactttcccccgggacagcggccgccgcggggcgggccgaggcagtgcgtgcgagtctttgtgcggccggcggactggagctcccagtcgggcctgcccgtcccactcgggacatgagctgctgaagttgtccccccgtcagccctcacccctgccaggactcctctgggcttgcagtcgctcccccgtacctctcctggccccctcagttctcccaggttgttcctcaaagtcattcaagctgtactcgccgaaggagcccccgaacggcaacgcctttccccccttccatcccggcaccatgctggatagggatgtgggcccaactcccatgtatccgcctacatacctggagccagggattgggaggcacacaccatatggcaaccaaactgactacagaatatttgagcttaacaaacggcttcagaactggacagaggagtgtgacaatctctggtgggatgcattcacgactgagttctttgaggatgatgccatgttgaccatcactttctgcctggaggatggaccaaagagatataccattggccggaccctgatcccacgctacttccgcagcatctttgaggggggtgctacggagctgtactatgttcttaagcaccccaaggaggcattccacagcaactttgtgtccctcgactgtgaccagggcagcatggtgacccagcatggcaagcccatgttcacccaggtgtgtgtggagggccggttgtacctggagttcatgtttgacgacatgatgcggataaagacgtggcacttcagcatccggcagcaccgagagctcatcccccgcagcatccttgccatgcatgcccaagacccccagatgttggatcagctctccaaaaacatcactcggtgtgggctgtccaattccactctcaactacctccgactctgtgtgatactcgagcccatgcaagagctcatgtcacgccacaagacctacagcctcagcccccgcgactgcctcaagacctgccttttccagaagtggcagcgcatggtagcaccccctgcggagcccacacgtcagcagcccagcaaacggcggaaacggaagatgtcagggggcagcaccatgagctctggtggtggcaacaccaacaacagcaacagcaagaagaagagcccagctagcaccttcgccctctccagccaggtacctgatgtgatggtggtgggggagcccaccctgatgggcggggagttcggggacgaggacgagaggctcatcacccggctggagaacacccagtttgacgcagccaacggcattgacgacgaggacagctttaacaactcccctgcactgggcgccaacagcccctggaacagcaagcctccgtccagccaagaaagcaaatcggagaaccccacgtcacaggcctcccagtaaaaggccctgctgtggccacccagtgctctgcctacctgccccacccctcacagccccagggagcagaagacagaatgaagagactgagcatctaaaatgggcagcctccatccacccgcttcagggaggaactggactctctgggggcaggtgccaagatttgcccccccagtggccctgggctgggcctggcctctacagagccttttagggggagggggtactcatgtggatgcctacttggaacctgggcctctgagacatgtcctgaccaccccccagggcatttgcctccatcttcaccccagattgtgggtttcccatccccctgactttacccctttcaagcctggggttgtctatacccacagcccttagggacttaaagttacggggcttcgttgaatgctccttcccctaggcagctggtaatagaggggtaaagctctgggcccctcctccctgctgccacttatcccagctccaagtttttttaaaaataatattattaaaaatgtaagttaaaaaaaaaa

SEQ ID NO: 16259 - DNA, 2089 bp, Homo sapiens
  source 1..2089: mol_type = unassigned DNA
cgagggcggagaggggggcgctcggcgacggcggcgggagcgcacagacacgcacacgcacacgcgcacacacgcacacacggacacacactccgcggactcacacccgcgcgcacacacgcagaggccgctcgccttcctgcctggcttccttcctgtctgctccgcgcctgacaggcccctcgccgcagccaggggccgcccgcaccgggccgaggccgggccgggccggcggcgagcgcagcgggggccgcgggcggcggcggcggctcatgcccggcctgtccccgcgaggggcgggcaccgtgactcggctgggcccccagaggcgggcgatgtgaagatgtcagtgggctgtgcctgtcctggttgttcctcaaagtcattcaagctgtactcgccgaaggagcccccgaacggcaacgcctttccccccttccatcccggcaccatgctggatagggatgtgggcccaactcccatgtatccgcctacatacctggagccagggattgggaggcacacaccatatggcaaccaaactgactacagaatatttgagcttaacaaacggcttcagaactggacagaggagtgtgacaatctctggtgggatgcattcacgactgagttctttgaggatgatgccatgttgaccatcactttctgcctggaggatggaccaaagagatataccattggccggaccctgatcccacgctacttccgcagcatctttgaggggggtgctacggagctgtactatgttcttaagcaccccaaggaggcattccacagcaactttgtgtccctcgactgtgaccagggcagcatggtgacccagcatggcaagcccatgttcacccaggtgtgtgtggagggccggttgtacctggagttcatgtttgacgacatgatgcggataaagacgtggcacttcagcatccggcagcaccgagagctcatcccccgcagcatccttgccatgcatgcccaagacccccagatgttggatcagctctccaaaaacatcactcggtgtgggctgtccaattccactctcaactacctccgactctgtgtgatactcgagcccatgcaagagctcatgtcacgccacaagacctacagcctcagcccccgcgactgcctcaagacctgccttttccagaagtggcagcgcatggtagcaccccctgcggagcccacacgtcagcagcccagcaaacggcggaaacggaagatgtcagggggcagcaccatgagctctggtggtggcaacaccaacaacagcaacagcaagaagaagagcccagctagcaccttcgccctctccagccaggtacctgatgtgatggtggtgggggagcccaccctgatgggcggggagttcggggacgaggacgagaggctcatcacccggctggagaacacccagtttgacgcagccaacggcattgacgacgaggacagctttaacaactcccctgcactgggcgccaacagcccctggaacagcaagcctccgtccagccaagaaagcaaatcggagaaccccacgtcacaggcctcccagtaaaaggccctgctgtggccacccagtgctctgcctacctgccccacccctcacagccccagggagcagaagacagaatgaagagactgagcatctaaaatgggcagcctccatccacccgcttcagggaggaactggactctctgggggcaggtgccaagatttgcccccccagtggccctgggctgggcctggcctctacagagccttttagggggagggggtactcatgtggatgcctacttggaacctgggcctctgagacatgtcctgaccaccccccagggcatttgcctccatcttcaccccagattgtgggtttcccatccccctgactttacccctttcaagcctggggttgtctatacccacagcccttagggacttaaagttacggggcttcgttgaatgctccttcccctaggcagctggtaatagaggggtaaagctctgggcccctcctccctgctgccacttatcccagctccaagtttttttaaaaataatattatt

SEQ ID NO: 16260 - DNA, 2548 bp, Homo sapiens
  source 1..2548: mol_type = unassigned DNA
ccctccctcccttcttccctcccttcctccataccaacctccctccctctctggagctcctgctctctccctctccctcctctcccgtgctccctccctccctccctctttccctccctcctctcctctccctctcctctcctgctatagagggctccgacagcagttcccagccagcgtgttcagcctgcctgcctgcctgcctctgtgtgtgtgtgagcgtgtgtgcgtgcgtctactttgtactgggaagaacacagcccatgtgctctgcatggacgttactgatactctgtttagcttgattttcgaaaagcaggcaagatgtccagcacaccacatgaccccttctattcttctcctttcggcccattttataggaggcatacaccatacatggtacagccagagtaccgaatctatgagatgaacaagagactgcagtctcgcacagaggatagtgacaacctctggtgggacgcctttgccactgaattttttgaagatgacgccacattaaccctttcattttgtttggaagatggaccaaagcgatacactatcggcaggaccctcatcccccgttactttagcactgtgtttgaaggaggggtgaccgacctgtattacattctcaaacactcgaaagagtcataccacaactcatccatcacggtggactgcgaccagtgtaccatggtcacccagcacgggaagcccatgtttaccaaggtatgtacagaaggcagactgatcttggagttcacctttgatgatctcatgagaatcaaaacatggcactttaccattagacaataccgagagttagtcccgagaagcatcctagccatgcatgcacaagatcctcaggtcctggatcagctgtccaaaaacatcaccaggatggggctaacaaacttcaccctcaactacctcaggttgtgtgtaatattggagccaatgcaggaactgatgtcgagacataaaacttacaacctcagtccccgagactgcctgaagacctgcttgtttcagaagtggcagaggatggtggctccgccagcagaacccacaaggcaaccaacaaccaaacggagaaaaaggaaaaattccaccagcagcacttccaacagcagcgctgggaacaatgcaaacagcactggcagcaagaagaagaccacagctgcaaacctgagtctgtccagtcaggtacctgatgtgatggtggtaggagagccaactctgatgggaggtgagtttggggacgaggacgaaaggctaatcactagattagaaaacacgcaatatgatgcggccaacggcatggacgacgaggaggacttcaacaattcacccgcgctggggaacaacagcccgtggaacagtaaacctcccgccactcaagagaccaaatcagaaaaccccccaccccaggcttcccaataagatgatcggcaccagaatccactgtcaataggcccgtgggtgatcattacaattgcaaatctttacttacaggagaggaaacagaagagataaaaacttttccatgcaaatatctatttctaaaccacaatgatctgattttctttcttctttctttttttctaattgagaggattattcccagtaagcttccatgaccctttcttggaggccttcacaggtaatacagatactggcactgattgtaattaaaatgagagaaaactctagcgcatcttctggcacggttttaacaacgtgtttgtgttgaatttcctttttatgcatcaaacgaaggccatattgtccataaatgctcagtgctcaggatctcattaatatgccgaacctaactacagatgactttttaatattgtaaaatattttctgctttttgacttgcatctgagagtttcttgtttcagtaaaaaaagaaaagacaaaaaaatcagctttggaaagtaatttaaatgtaccttattttttttttctttatgttttctttcattgggcaacagctaagagggcccagcaaggtaatttatggttgagctgatgtcaattggttcttgtcttgagtcgactcaatttagcccaagtgctgaaacaagaaatgtcatttttttcatcaaagacaccagggcagatttttaagtaaagaaagacaattggacccttaagaatttatgcatttgtaaagttgctgttgatccaaatattttcaagccatgtaatccattggttttgtgggcagtttaataaacctgaacctttgtgtgttttctaattgtacctgagttgaccatcctttctttttatagtatatttcttgtatgatattttgtaaagctctcacctggttcttttatggggacttttcgtttttgggcaactccagtgtatttatgtgaaactttataagagaattaatttttccatttgcatattaatatgttcctccacacatgtaaaggcacagtggctccgtgtgttaaaaaacagctgtattttatgtatgctttactgataagtgtgccaataataaactgtgttaatgaccaaa

SEQ ID NO: 16261 - DNA, 2476 bp, Homo sapiens
  source 1..2476: mol_type = unassigned DNA
gtgagcgtgtgtgcgtgcgtctactttgtactgggaagaacacagcccatgtgctctgcatggacgttactgatactctgtttagcttgattttcgaaaagcaggcaagatgtccagcacaccacatgaccccttctattcttctcctttcggcccattttataggaggcatacaccatacatggtacagccagagtaccgaatctatgagatgaacaagagactgcagtctcgcacagaggatagtgacaacctctggtgggacgcctttgccactgaattttttgaagatgacgccacattaaccctttcattttgtttggaagatggaccaaagcgatacactatcggcaggaccctcatcccccgttactttagcactgtgtttgaaggaggggtgaccgacctgtattacattctcaaacactcgaaagagtcataccacaactcatccatcacggtggactgcgaccagtgtaccatggtcacccagcacgggaagcccatgtttaccaaggtatgtacagaaggcagactgatcttggagttcacctttgatgatctcatgagaatcaaaacatggcactttaccattagacaataccgagagttagtcccgagaagcatcctagccatgcatgcacaagatcctcaggtcctggatcagctgtccaaaaacatcaccaggatggggctaacaaacttcaccctcaactacctcaggttgtgtgtaatattggagccaatgcaggaactgatgtcgagacataaaacttacaacctcagtccccgagactgcctgaagacctgcttgtttcagaagtggcagaggatggtggctccgccagcagaacccacaaggcaaccaacaaccaaacggagaaaaaggaaaaattccaccagcagcacttccaacagcagcgctgggaacaatgcaaacagcactggcagcaagaagaagaccacagctgcaaacctgagtctgtccagtcaggtacctgggctaggagcgatcccgaactgcagcctcaaccctgggagggatggagacctgtgtcattcaacagcagtgaccccttctggccaatttaaggagaagcattgaggggccctgaaaggagtcacttccagtcctcctcagaggatgtgatggtggtaggagagccaactctgatgggaggtgagtttggggacgaggacgaaaggctaatcactagattagaaaacacgcaatatgatgcggccaacggcatggacgacgaggaggacttcaacaattcacccgcgctggggaacaacagcccgtggaacagtaaacctcccgccactcaagagaccaaatcagaaaaccccccaccccaggcttcccaataagatgatcggcaccagaatccactgtcaataggcccgtgggtgatcattacaattgcaaatctttacttacaggagaggaaacagaagagataaaaacttttccatgcaaatatctatttctaaaccacaatgatctgattttctttcttctttctttttttctaattgagaggattattcccagtaagcttccatgaccctttcttggaggccttcacaggtaatacagatactggcactgattgtaattaaaatgagagaaaactctagcgcatcttctggcacggttttaacaacgtgtttgtgttgaatttcctttttatgcatcaaacgaaggccatattgtccataaatgctcagtgctcaggatctcattaatatgccgaacctaactacagatgactttttaatattgtaaaatattttctgctttttgacttgcatctgagagtttcttgtttcagtaaaaaaagaaaagacaaaaaaatcagctttggaaagtaatttaaatgtaccttattttttttttctttatgttttctttcattgggcaacagctaagagggcccagcaaggtaatttatggttgagctgatgtcaattggttcttgtcttgagtcgactcaatttagcccaagtgctgaaacaagaaatgtcatttttttcatcaaagacaccagggcagatttttaagtaaagaaagacaattggacccttaagaatttatgcatttgtaaagttgctgttgatccaaatattttcaagccatgtaatccattggttttgtgggcagtttaataaacctgaacctttgtgtgttttctaattgtacctgagttgaccatcctttctttttatagtatatttcttgtatgatattttgtaaagctctcacctggttcttttatggggacttttcgtttttgggcaactccagtgtatttatgtgaaactttataagagaattaatttttccatttgcatattaatatgttcctccacacatgtaaaggcacagtggctccgtgtgttaaaaaacagctgtattttatgtatgctttactgataagtgtgccaataataaactgtgttaatgaccaaa

SEQ ID NO: 16262 - DNA, 2626 bp, Homo sapiens
  source 1..2626: mol_type = unassigned DNA
agcgtgttcagcctgcctgcctgcctgcctctgtgtgtgtgtgagcgtgtgtgcgtgcgtctactttgtactgggaagaacacagcccatgtgctctgcatggacgttactgatactctgtttagcttgattttcgaaaagcaggcaagatgtccagcacaccacatgaccccttctattcttctcctttcggcccattttataggaggcatacaccatacatggtacagccagagtaccgaatctatgagatgaacaagagactgcagtctcgcacagaggatagtgacaacctctggtgggacgcctttgccactgaattttttgaagatgacgccacattaaccctttcattttgtttggaagatggaccaaagcgatacactatcggcaggaccctcatcccccgttactttagcactgtgtttgaaggaggggtgaccgacctgtattacattctcaaacactcgaaagagtcataccacaactcatccatcacggtggactgcgaccagtgtaccatggtcacccagcacgggaagcccatgtttaccaaggtatgtacagaaggcagactgatcttggagttcacctttgatgatctcatgagaatcaaaacatggcactttaccattagacaataccgagagttagtcccgagaagcatcctagccatgcatgcacaagatcctcaggtcctggatcagctgtccaaaaacatcaccaggatggggctaacaaacttcaccctcaactacctcaggttgtgtgtaatattggagccaatgcaggaactgatgtcgagacataaaacttacaacctcagtccccgagactgcctgaagacctgcttgtttcagaagtggcagaggatggtggctccgccagcagaacccacaaggcaaccaacaaccaaacggagaaaaaggaaaaattccaccagcagcacttccaacagcagcgctgggaacaatgcaaacagcactggcagcaagaagaagaccacagctgcaaacctgagtctgtccagtcaggtacctattgctagcattgctcgttctccagtgtcaggctgcgcactaaggacataaactcgcgtggttgttacacatcaggaggcgatgtttatttcctgtagaaatcaaatatgcgtctcggcccccgacattgagacttgaccccgttgtacagtacacgagtgtgtctgtcctagattccccgactcctcccactgttattttaagctgagcttctctctcccaaggtttccctgtaataatgtcagctgctgttcacaggatgtgatggtggtaggagagccaactctgatgggaggtgagtttggggacgaggacgaaaggctaatcactagattagaaaacacgcaatatgatgcggccaacggcatggacgacgaggaggacttcaacaattcacccgcgctggggaacaacagcccgtggaacagtaaacctcccgccactcaagagaccaaatcagaaaaccccccaccccaggcttcccaataagatgatcggcaccagaatccactgtcaataggcccgtgggtgatcattacaattgcaaatctttacttacaggagaggaaacagaagagataaaaacttttccatgcaaatatctatttctaaaccacaatgatctgattttctttcttctttctttttttctaattgagaggattattcccagtaagcttccatgaccctttcttggaggccttcacaggtaatacagatactggcactgattgtaattaaaatgagagaaaactctagcgcatcttctggcacggttttaacaacgtgtttgtgttgaatttcctttttatgcatcaaacgaaggccatattgtccataaatgctcagtgctcaggatctcattaatatgccgaacctaactacagatgactttttaatattgtaaaatattttctgctttttgacttgcatctgagagtttcttgtttcagtaaaaaaagaaaagacaaaaaaatcagctttggaaagtaatttaaatgtaccttattttttttttctttatgttttctttcattgggcaacagctaagagggcccagcaaggtaatttatggttgagctgatgtcaattggttcttgtcttgagtcgactcaatttagcccaagtgctgaaacaagaaatgtcatttttttcatcaaagacaccagggcagatttttaagtaaagaaagacaattggacccttaagaatttatgcatttgtaaagttgctgttgatccaaatattttcaagccatgtaatccattggttttgtgggcagtttaataaacctgaacctttgtgtgttttctaattgtacctgagttgaccatcctttctttttatagtatatttcttgtatgatattttgtaaagctctcacctggttcttttatggggacttttcgtttttgggcaactccagtgtatttatgtgaaactttataagagaattaatttttccatttgcatattaatatgttcctccacacatgtaaaggcacagtggctccgtgtgttaaaaaacagctgtattttatgtatgctttactgataagtgtgccaataataaactgtgttaatga

SEQ ID NO: 16263 - DNA, 1108 bp, Homo sapiens
  source 1..1108: mol_type = unassigned DNA
attcagcggcagatgccagaggaaactgcaaccagctcggggattcggaaccagatgcctgtgatggattattacaatttcctatcatgtaattgcttttctgtttgaccaaagctatcggcaggaccctcatcccccgttactttagcactgtgtttgaaggaggggtgaccgacctgtattacattctcaaacactcgaaagagtcataccacaactcatccatcacggtggactgcgaccagtgtaccatggtcacccagcacgggaagcccatgtttaccaaggtatgtacagaaggcagactgatcttggagttcacctttgatgatctcatgagaatcaaaacatggcactttaccattagacaataccgagagttagtcccgagaagcatcctagccatgcatgcacaagatcctcaggtcctggatcagctgtccaaaaacatcaccaggatggggctaacaaacttcaccctcaactacctcaggttgtgtgtaatattggagccaatgcaggaactgatgtcgagacataaaacttacaacctcagtccccgagactgcctgaagacctgcttgtttcagaagtggcagaggatggtggctccgccagcagaacccacaaggcaaccaacaaccaaacggagaaaaaggaaaaattccaccagcagcacttccaacagcagcgctgggaacaatgcaaacagcactggcagcaagaagaagaccacagctgcaaacctgagtctgtccagtcaggtacctattgctagcattgctcgttctccagtgtcaggctgcgcactaaggacataaactcgcgtggttgttacacatcaggaggcgatgtttatttcctgtagaaatcaaatatgcgtctcggcccccgacattgagacttgaccccgttgtacagtacacgagtgtgtctgtcctagattccccgactcctcccactgttattttaagctgagcttctctctcccaaggtttccctgtaataatgtcagctgctgttcacaggatgtgatggtggtaggagagccaactctgatgggaggtgagtttggggacgaggacgaaaggctaatcactagattaga

SEQ ID NO: 16264 - DNA, 567 bp, Homo sapiens
  source 1..567: mol_type = unassigned DNA
gagggctccgacagcagttcccagccagcgtgttcagcctgcctgcctgcctgcctctgaggcatacaccatacatggtacagccagagtaccgaatctatgagatgaacaagagactgcagtctcgcacagaggatagtgacaacctctggtgggacgcctttgccactgaattttttgaagatgacgccacattaaccctttcattttgtttggaagatggaccaaagcgatacactatcggcaggaccctcatcccccgttactttagcactgtgtttgaaggaggggtgaccgacctgtattacattctcaaacactcgaaagagtcataccacaactcatccatcacggtggactgcgaccagtgtaccatggtcacccagcacgggaagcccatgtttaccaaggtatgtacagaaggcagactgatcttggagttcacctttgatgatctcatgagaatcaaaacatggcactttaccattagacaataccgagagttagtcccgagaagcatcctagccatgcatgcacaagatcctcaggtcctggatcagctgtcca

SEQ ID NO: 16265 - DNA, 1498 bp, Homo sapiens
  source 1..1498: mol_type = unassigned DNA
agcgtgttcagcctgcctgcctgcctgcctctgtgtgtgtgtgagcgtgtgtgcgtgcgtctactttgtactgggaagaacacagcccatgtgctctgcatggacgttactgatactctgtttagcttgattttcgaaaagcaggcaagatgtccagcacaccacatgaccccttctattcttctcctttcggcccattttataggaggcatacaccatacatggtacagccagagtaccgaatctatgagatgaacaagagactgcagtctcgcacagaggatagtgacaacctctggtgggacgcctttgccactgaattttttgaagatgacgccacattaaccctttcattttgtttggaagatggaccaaagcgatacattgtgcattcagcggcagatgccagaggaaactgcaaccagctcggggattcggaaccagatgcctgtgatggattattacaatttcctatcatgtaattgcttttctgtttgaccaaagctatcggcaggaccctcatcccccgttactttagcactgtgtttgaaggaggggtgaccgacctgtattacattctcaaacactcgaaagagtcataccacaactcatccatcacggtggactgcgaccagtgtaccatggtcacccagcacgggaagcccatgtttaccaaggtatgtacagaaggcagactgatcttggagttcacctttgatgatctcatgagaatcaaaacatggcactttaccattagacaataccgagagttagtcccgagaagcatcctagccatgcatgcacaagatcctcaggtcctggatcagctgtccaaaaacatcaccaggatggggctaacaaacttcaccctcaactacctcaggttgtgtgtaatattggagccaatgcaggaactgatgtcgagacataaaacttacaacctcagtccccgagactgcctgaagacctgcttgtttcagaagtggcagaggatggtggctccgccagcagaacccacaaggcaaccaacaaccaaacggagaaaaaggaaaaattccaccagcagcacttccaacagcagcgctgggaacaatgcaaacagcactggcagcaagaagaagaccacagctgcaaacctgagtctgtccagtcaggtacctattgctagcattgctcgttctccagtgtcaggctgcgcactaaggacataaactcgcgtggttgttacacatcaggaggcgatgtttatttcctgtagaaatcaaatatgcgtctcggcccccgacattgagacttgaccccgttgtacagtacacgagtgtgtctgtcctagattccccgactcctcccactgttattttaagctgagcttctctctcccaaggtttccctgtaataatgtcagctgctgttcacaggatgtgatggtggtaggagagccaactctgatgggaggtgagtttggggacgaggacgaaaggctaatcactagattaga

SEQ ID NO: 16266 - DNA, 923 bp, Homo sapiens
  source 1..923: mol_type = unassigned DNA
tgcctgcctgcctgcctctgtgtgtgtgtgagcgtgtgtgcgtgcgtctactttgtactgggaagaacacagcccatgtgctctgcatggacgttactgatactctgtttagcttgattttcgaaaagcaggcaagatgtccagcacaccacatgaccccttctattcttctcctttcggcccattttataggaggcatacaccatacatggtacagccagagtaccgaatctatgagatgaacaagagactgcagtctcgcacagaggatagtgacaacctctggtgggacgcctttgccactgaattttttgaagatgacgccacattaaccctttcattttgtttggaagatggaccaaagcgatacagaaccaagaatttaagaccaattggggaaaaaatgaatattaatggaaaatgctatcggcaggaccctcatcccccgttactttagcactgtgtttgaaggaggggtgaccgacctgtattacattctcaaacactcgaaagagtcataccacaactcatccatcacggtggactgcgaccagtgtaccatggtcacccagcacgggaagcccatgtttaccaaggtatgtacagaaggcagactgatcttggagttcacctttgatgatctcatgagaatcaaaacatggcactttaccattagacaataccgagagttagtcccgagaagcatcctagccatgcatgcacaagatcctcaggtcctggatcagctgtccaaaaacatcaccaggatggggctaacaaacttcaccctcaactacctcaggttgtgtgtaatattggagccaatgcaggaactgatgtcgagacataaaacttacaacctcagtccccgagactgcctgaagacctgcttgtttcagaagtggcagaggatggtggctccg

SEQ ID NO: 16267 - DNA, 2295 bp, Homo sapiens
  source 1..2295: mol_type = unassigned DNA
gggaagaacacagcccatgtgctctgcatggacgttactgatactctgtttagcttgattttcgaaaagcaggcaagatgtccagcacaccacatgaccccttctattcttctcctttcggcccattttataggaggcatacaccatacatggtacagccagagtaccgaatctatgagatgaacaagagactgcagtctcgcacagaggatagtgacaacctctggtgggacgcctttgccactgaattttttgaagatgacgccacattaaccctttcattttgtttggaagatggaccaaagcgatacactatcggcaggaccctcatcccccgttactttagcactgtgtttgaaggaggggtgaccgacctgtattacattctcaaacactcgaaagagtcataccacaactcatccatcacggtggactgcgaccagtgtaccatggtcacccagcacgggaagcccatgtttaccaaggtatgtacagaaggcagactgatcttggagttcacctttgatgatctcatgagaatcaaaacatggcactttaccattagacaataccgagagttagtcccgagaagcatcctagccatgcatgcacaagatcctcaggtcctggatcagctgtccaaaaacatcaccaggatggggctaacaaacttcaccctcaactacctcaggttgtgtgtaatattggagccaatgcaggaactgatgtcgagacataaaacttacaacctcagtccccgagactgcctgaagacctgcttgtttcagaagtggcagaggatggtggctccgccagcagaacccacaaggcaaccaacaaccaaacggagaaaaaggaaaaattccaccagcagcacttccaacagcagcgctgggaacaatgcaaacagcactggcagcaagaagaagaccacagctgcaaacctgagtctgtccagtcaggatgtgatggtggtaggagagccaactctgatgggaggtgagtttggggacgaggacgaaaggctaatcactagattagaaaacacgcaatatgatgcggccaacggcatggacgacgaggaggacttcaacaattcacccgcgctggggaacaacagcccgtggaacagtaaacctcccgccactcaagagaccaaatcagaaaaccccccaccccaggcttcccaataagatgatcggcaccagaatccactgtcaataggcccgtgggtgatcattacaattgcaaatctttacttacaggagaggaaacagaagagataaaaacttttccatgcaaatatctatttctaaaccacaatgatctgattttctttcttctttctttttttctaattgagaggattattcccagtaagcttccatgaccctttcttggaggccttcacaggtaatacagatactggcactgattgtaattaaaatgagagaaaactctagcgcatcttctggcacggttttaacaacgtgtttgtgttgaatttcctttttatgcatcaaacgaaggccatattgtccataaatgctcagtgctcaggatctcattaatatgccgaacctaactacagatgactttttaatattgtaaaatattttctgctttttgacttgcatctgagagtttcttgtttcagtaaaaaaagaaaagacaaaaaaatcagctttggaaagtaatttaaatgtaccttattttttttttctttatgttttctttcattgggcaacagctaagagggcccagcaaggtaatttatggttgagctgatgtcaattggttcttgtcttgagtcgactcaatttagcccaagtgctgaaacaagaaatgtcatttttttcatcaaagacaccagggcagatttttaagtaaagaaagacaattggacccttaagaatttatgcatttgtaaagttgctgttgatccaaatattttcaagccatgtaatccattggttttgtgggcagtttaataaacctgaacctttgtgtgttttctaattgtacctgagttgaccatcctttctttttatagtatatttcttgtatgatattttgtaaagctctcacctggttcttttatggggacttttcgtttttgggcaactccagtgtatttatgtgaaactttataagagaattaatttttccatttgcatattaatatgttcctccacacatgtaaaggcacagtggctccgtgtgttaaaaaacagctgtattttatgtatgctttactgataagtgtgccaataataaactgtgttaatgaccaaa

SEQ ID NO: 16268 - DNA, 4966 bp, Homo sapiens
  source 1..4966: mol_type = unassigned DNA
aggcggccgctgacagcaccagcatgtcttacagtgtgaccctgactgggcccgggccctggggcttccgtctgcaggggggcaaggacttcaacatgcccctcactatctcccggatcacaccaggcagcaaggcagcccagtcccagctcagccagggtgacctcgtggtggccattgacggcgtcaacacagacaccatgacccacctggaagcccagaacaagatcaagtctgccagctacaacttgagcctcaccctgcagaaatcaaagcgtcccattcccatctccacgacagcacctccagtccagacccctctgccggtgatccctcaccagaaggtggtagtcaactctccagccaacgccgactaccaggaacgcttcaaccccagtgccctgaaggactcggccctgtccacccacaagcccatcgaggtgaaggggctgggcggcaaggccaccatcatccatgcgcagtacaacacgcccatcagcatgtattcccaggatgccatcatggatgccatcgctgggcaggcccaagcccaaggcagtgacttcagtgggagcctccctattaaggaccttgccgtagacagcgcctctcccgtctaccaggctgtgattaagagccagaacaagccagaagatgaggctgacgagtgggcacgccgttcctccaacctgcagtctcgctccttccgcatcctggcccagatgacggggacagaattcatgcaagaccctgatgaagaagctctgcgaaggtcaaggccccaggcctcttcctacagccccgcagtggccgcctcttcagcacctgccacccacaccagctacagtgagggccccgccgcccctgcacccaagccccgggttgtcaccactgccagcatccggccttctgtctaccagccagtgcctgcatctacctacagcccgtccccaggggccaattacagtcccactccctacaccccctcccctgcccctgcctacaccccctcccctgcccctgcctacaccccctcacctgtccccacctacactccatccccagcaccagcctataccccctcacctgcccccaactataaccctgcaccctcggtggcctacagcgggggccctgcggagcctgccagccgtccaccctgggtgacagatgatagcttctcccagaagtttgccccgggcaagagcaccacctccatcagcaagcagaccctgccccggggaggcccagcctacaccccagcgggtcctcaggtgccaccacttgccagggggaccgtccagagggctgagcgattcccagccagcagccggactccactctgcggtcactgcaacaatgtcatccggggcccatttctggtagccatgggccgttcttggcaccctgaagagttcacctgtgcctactgcaagacttccctggcagatgtgtgctttgtggaagagcagaacaacgtttactgtgagcgatgttatgagcaattctttgccccgctgtgtgccaagtgcaacaccaaaattatgggggaagtaatgcatgccttgagacagacatggcacaccacctgcttcgtctgtgcggcctgcaagaagccttttgggaacagcctcttccacatggaagacggggagccctactgcgagaaagactacatcaatctgttcagcaccaagtgccatggctgcgatttccccgtggaggctggcgacaagtttatcgaagccctgggccacacttggcacgacacctgcttcatttgcgcagtctgccatgtgaatctggaggggcagccgttctactccaagaaggacagacccctgtgcaagaagcacgcacacaccatcaacttgtaggcggccaaggccgcctgtgctgacgaggcccggagctgctcctgctgctggcaacaaaggattcgggaggctgatgtttcttctgaggggaatggggagagagaggaagcgactgagccctttggaagtataattttaggttttttcttctgtacacagatcgtgcatttgcatagttcagactaggagccaaatgaagactcaaaaccaagctagttattaatccaagactggaattgtacttcagacatttagagcagaattccaagaactcaaaagtgaaaagcaacaagcagctttcccaaagcgatacacttgctttggtcaccagaggaggacagagcttagagcagctgtggagaatctgaagcattctgcggagttcttaagcgctcccctggcaaacaaattgaagtgccaaacagcactcgctgcagggtatttttagagtcatagctgagagcttgttagctaagacccattgggctttcctcaccaaaaaaggaagtgttattccattactagcgtcatggagctacctctgcgcatcagacttcagaccttgaacaaacttaaaaccttcttgggagcccggacgtccaaagagatgtcttctgggagccactgggcaattgccagggctccaggaagggctctggctcaggttgcagacagctgagaaaagatggccctgtcagccaccctctctcagtctgaaacatccaacatccccagaaggcttagctcctttttgaattgtgatgggaaagtagagttgggtttttccagttttgctctgtggtgtgtgagagatttttttaaaggctttgggttgtctttggcctttgtttagctttaagggttcgttagcatgagtgtccagtcgtgtgcatgaatttcaccccaacttgtgactgctcacttatgacgtctcccccagtaccctccatctcaaataggcttggtggcctgtggaaaagaagagagacagagagacagtgtctgaaacaggatggcagaataggctcacatgcccaaactctgggtggggaagaggaaacttactttctgccaccctcagtaagaacacacgaggaggcaggacctcccaccttcaggtctgcatcatccttttcaaatgttcctttaaatgcagcacactgagtttgtacaattgtgttaactgctggaagggacagatgcactgatatatatgcatttgctgttttggccaatattttgaaaatgtatgagctgagttgatctagctattatttaagtatttattgaagtagaggggccttcaaactactttatactagtgatagtttgagttaggtaagcatcttaaagctgtttggtgataaagaaggcagcttagattctgtggttggaaacagtgtagtcgcttccctttttaggaagccctgttaatatgctcattgaaaacatggcattgaagcaggcacttgcgtggatgtttctcacttgagcacgatatttaggctctcttccaactcactctattctgtcctcactcctgttttggatttttctctttgcatgtttgaaatgttttatgggaatgtattagaactcttttcttctaaggactgagacttccaggggattgccatcttacctgtctcttctccatgagggagaaggaagcagctagctatgtccctagctgcaggaagcccctattttttccaagcacgaagccaccagtctcccccagggagcatcaggaagggacatggatgtgctcctgccacagggcccttcctacctttggatctgtgagaaggtgaatacaaagcagcaggcagagtaaaatctgctgggactgcctggagatttgtcaggagctgcagacaagtaccttggagcattctgttatttttggaaagttcaaatatgcagggacaaggaggttgctgactgtactgacaggctctaagtcattttctccaaaaactatctattcaattatcaggggctggtcttgaggaaggaaaaaaaaaaaaaaacgttcccagaattcagtttccaaaatctctttttaaagggtttacacacacacacacacacacacacacacacacacacacacacacacacgatcattaaaaagtgtatgctctttaagaagaaaagtaaaatatctcaaaggacggtttcaccaccgtcctttattgaatcaatttttctacatttcagagcaagtgtagattctgagggactcctatttgccaaaaagacaaaactagcaaaaaaaaaacaaaaaaacaaaaaaaaaaccacttaaaaggtagcaggaaaagaaggtagttttgagtgtggttcactcagtgtctgtgagtctggtgtagtgtcaggagtaaggccgtgtctagctcaagtttacatttggatgtcctacaacactaaacaaaatttttcataatccatggtggggagcacactttggagctacatttcttgtctcctcattgttgacattaattaaacatttataggccaggcacagtggctcacgcctgttatcccagcactttgggaggccgaggcaggtgaatcacctgaggtcaggagtttgaaaccagcctggccaatatggtgaaaccccatctctactaaaaatacacaaaattagccaggtgtggtggcaggcgcctgtagttccagctacttgggaggctgaggcaggaatctcctgaatcctggaggcggaggttgcagtgagccgagattatgccattgcactccagcctgggcaacaggagcgaaactccgttgcaaaaaaaaaaaaaaaaaaaaaattataatcacaactttttgcaatggagtgacttatatctgcagcttatatctgcagtgtttgtgttaggaacctagcttttataatgtgttaactttttaactcagtattctggctttgggattttttgttttgtttttggaaacatttcagaagtggaatgtagcctgttaaaggtgtgcacaaaaatattttgcatgtgtttttttttttgcctgtgtgaattctactttttagcaaaaataaagccccccaaaggatgtgc

SEQ ID NO: 16269 - DNA, 1695 bp, Homo sapiens
  source 1..1695: mol_type = unassigned DNA
aggcggccgctgacagcaccagcatgtcttacagtgtgaccctgactgggcccgggccctggggcttccgtctgcaggggggcaaggacttcaacatgcccctcactatctcccggatcacaccaggcagcaaggcagcccagtcccagctcagccagggtgacctcgtggtggccattgacggcgtcaacacagacaccatgacccacctggaagcccagaacaagatcaagtctgccagctacaacttgagcctcaccctgcagaaatcaaagcgtcccattcccatctccacgacagcacctccagtccagacccctctgccggtgatccctcaccagaaggaccccgctctggacacgaacggcagcctggtggcacccagccccagccctgaggcgagggccagcccaggcaccccaggcaccccggagctcaggcccacctttagccctgccttctcccggccctccgccttctcctcactcgccgaggcctctgaccctggccctccgcgggccagcctgagggccaagaccagcccagagggggcccgggacctactcggcccaaaagccctgccgggctcgagccagccgaggcaatataacaaccccattggcctgtactcggcagagaccctgagggagatggctcagatgtaccagatgagcctccgagggaaggcctcgggtgtcggactcccaggagggagcctccctattaaggaccttgccgtagacagcgcctctcccgtctaccaggctgtgattaagagccagaacaagccagaagatgaggctgacgagtgggcacgccgttcctccaacctgcagtctcgctccttccgcatcctggcccagatgacggggacagaattcatgcaagaccctgatgaagaagctctgcgaaggtcaagggaaaggtttgaaacggaacgtaacagcccacgttttgccaaattgcgcaactggcaccatggcctttcagcccaaatccttaatgttaaaagctaaaaggctgcctggaatccccccaccccaacaggctggactccctccatccttacccccacacagatctggcatgtgagccccacggtgatgcttgacaatgtataactctgctgggggcacctctgatggccaaccgcagcatttctgtcctctgcccaccccagagctgatgctggggcccagccccctgcagctctgtacccaccaaacctccccagggcaaccctcgccaccccccaaatagcccgtagcccaatcccctgccctctgcacagggccttagctgtagaccagagagggcaggaggggtttgctggcataacaccccagaaccaagggaaatggatgggccgctgctcagtttcccaccatcctcagctcctggcctcatcccctcctagaatgagtcacccgtagatcagggtctggggaagaggctgatccctggcgctgcccggctccctcgctgccctctggagctcagggcagcccggaatagggctctttgaagaggaagtagaagccccagggtaatgaggcagagacccctcctggcagtggtgaggtgggggcatgcaccctcctttctgtaccgtgtgtgctggctccatagttctctcttctgtacatataagcatgcttgttctgaaataaagaagatttgaagtgaaccacacca

SEQ ID NO: 16270 - DNA, 4650 bp, Homo sapiens
  source 1..4650: mol_type = unassigned DNA
acagtccatttatgggcgcagccgaaggcagatatcagtgtcgatggcattcgctcccagctattcttaggagcctctcaagagctccacgcagcccggctgggcagcaagggacagaacagaggcggccgctgacagcaccagcatgtcttacagtgtgaccctgactgggcccgggccctggggcttccgtctgcaggggggcaaggacttcaacatgcccctcactatctcccggatcacaccaggcagcaaggcagcccagtcccagctcagccagggtgacctcgtggtggccattgacggcgtcaacacagacaccatgacccacctggaagcccagaacaagatcaagtctgccagctacaacttgagcctcaccctgcagaaatcaaagcgtcccattcccatctccacgacagcacctccagtccagacccctctgccggtgatccctcaccagaaggcctcttcctacagccccgcagtggccgcctcttcagcacctgccacccacaccagctacagtgagggccccgccgcccctgcacccaagccccgggttgtcaccactgccagcatccggccttctgtctaccagccagtgcctgcatctacctacagcccgtccccaggggccaattacagtcccactccctacaccccctcccctgcccctgcctacaccccctcccctgcccctgcctacaccccctcacctgtccccacctacactccatccccagcaccagcctataccccctcacctgcccccaactataaccctgcaccctcggtggcctacagcgggggccctgcggagcctgccagccgtccaccctgggtgacagatgatagcttctcccagaagtttgccccgggcaagagcaccacctccatcagcaagcagaccctgccccggggaggcccagcctacaccccagcgggtcctcaggtgccaccacttgccagggggaccgtccagagggctgagcgattcccagccagcagccggactccactctgcggtcactgcaacaatgtcatccggggcccatttctggtagccatgggccgttcttggcaccctgaagagttcacctgtgcctactgcaagacttccctggcagatgtgtgctttgtggaagagcagaacaacgtttactgtgagcgatgttatgagcaattctttgccccgctgtgtgccaagtgcaacaccaaaattatgggggaagtaatgcatgccttgagacagacatggcacaccacctgcttcgtctgtgcggcctgcaagaagccttttgggaacagcctcttccacatggaagacggggagccctactgcgagaaagactacatcaatctgttcagcaccaagtgccatggctgcgatttccccgtggaggctggcgacaagtttatcgaagccctgggccacacttggcacgacacctgcttcatttgcgcagtctgccatgtgaatctggaggggcagccgttctactccaagaaggacagacccctgtgcaagaagcacgcacacaccatcaacttgtaggcggccaaggccgcctgtgctgacgaggcccggagctgctcctgctgctggcaacaaaggattcgggaggctgatgtttcttctgaggggaatggggagagagaggaagcgactgagccctttggaagtataattttaggttttttcttctgtacacagatcgtgcatttgcatagttcagactaggagccaaatgaagactcaaaaccaagctagttattaatccaagactggaattgtacttcagacatttagagcagaattccaagaactcaaaagtgaaaagcaacaagcagctttcccaaagcgatacacttgctttggtcaccagaggaggacagagcttagagcagctgtggagaatctgaagcattctgcggagttcttaagcgctcccctggcaaacaaattgaagtgccaaacagcactcgctgcagggtatttttagagtcatagctgagagcttgttagctaagacccattgggctttcctcaccaaaaaaggaagtgttattccattactagcgtcatggagctacctctgcgcatcagacttcagaccttgaacaaacttaaaaccttcttgggagcccggacgtccaaagagatgtcttctgggagccactgggcaattgccagggctccaggaagggctctggctcaggttgcagacagctgagaaaagatggccctgtcagccaccctctctcagtctgaaacatccaacatccccagaaggcttagctcctttttgaattgtgatgggaaagtagagttgggtttttccagttttgctctgtggtgtgtgagagatttttttaaaggctttgggttgtctttggcctttgtttagctttaagggttcgttagcatgagtgtccagtcgtgtgcatgaatttcaccccaacttgtgactgctcacttatgacgtctcccccagtaccctccatctcaaataggcttggtggcctgtggaaaagaagagagacagagagacagtgtctgaaacaggatggcagaataggctcacatgcccaaactctgggtggggaagaggaaacttactttctgccaccctcagtaagaacacacgaggaggcaggacctcccaccttcaggtctgcatcatccttttcaaatgttcctttaaatgcagcacactgagtttgtacaattgtgttaactgctggaagggacagatgcactgatatatatgcatttgctgttttggccaatattttgaaaatgtatgagctgagttgatctagctattatttaagtatttattgaagtagaggggccttcaaactactttatactagtgatagtttgagttaggtaagcatcttaaagctgtttggtgataaagaaggcagcttagattctgtggttggaaacagtgtagtcgcttccctttttaggaagccctgttaatatgctcattgaaaacatggcattgaagcaggcacttgcgtggatgtttctcacttgagcacgatatttaggctctcttccaactcactctattctgtcctcactcctgttttggatttttctctttgcatgtttgaaatgttttatgggaatgtattagaactcttttcttctaaggactgagacttccaggggattgccatcttacctgtctcttctccatgagggagaaggaagcagctagctatgtccctagctgcaggaagcccctattttttccaagcacgaagccaccagtctcccccagggagcatcaggaagggacatggatgtgctcctgccacagggcccttcctacctttggatctgtgagaaggtgaatacaaagcagcaggcagagtaaaatctgctgggactgcctggagatttgtcaggagctgcagacaagtaccttggagcattctgttatttttggaaagttcaaatatgcagggacaaggaggttgctgactgtactgacaggctctaagtcattttctccaaaaactatctattcaattatcaggggctggtcttgaggaaggaaaaaaaaaaaaaaacgttcccagaattcagtttccaaaatctctttttaaagggtttacacacacacacacacacacacacacacacacacacacacacacacacgatcattaaaaagtgtatgctctttaagaagaaaagtaaaatatctcaaaggacggtttcaccaccgtcctttattgaatcaatttttctacatttcagagcaagtgtagattctgagggactcctatttgccaaaaagacaaaactagcaaaaaaaaaacaaaaaaacaaaaaaaaaaccacttaaaaggtagcaggaaaagaaggtagttttgagtgtggttcactcagtgtctgtgagtctggtgtagtgtcaggagtaaggccgtgtctagctcaagtttacatttggatgtcctacaacactaaacaaaatttttcataatccatggtggggagcacactttggagctacatttcttgtctcctcattgttgacattaattaaacatttataggccaggcacagtggctcacgcctgttatcccagcactttgggaggccgaggcaggtgaatcacctgaggtcaggagtttgaaaccagcctggccaatatggtgaaaccccatctctactaaaaatacacaaaattagccaggtgtggtggcaggcgcctgtagttccagctacttgggaggctgaggcaggaatctcctgaatcctggaggcggaggttgcagtgagccgagattatgccattgcactccagcctgggcaacaggagcgaaactccgttgcaaaaaaaaaaaaaaaaaaaaaattataatcacaactttttgcaatggagtgacttatatctgcagcttatatctgcagtgtttgtgttaggaacctagcttttataatgtgttaactttttaactcagtattctggctttgggattttttgttttgtttttggaaacatttcagaagtggaatgtagcctgttaaaggtgtgcacaaaaatattttgcatgtgtttttttttttgcctgtgtgaattctactttttagcaaaaataaagccccccaaaggatgtgcaaa

SEQ ID NO: 16271 - DNA, 4223 bp, Homo sapiens
  source 1..4223: mol_type = unassigned DNA
gcggccgctgacagcaccagcatgtcttacagtgtgaccctgactgggcccgggccctggggcttccgtctgcaggggggcaaggacttcaacatgcccctcactatctcccggatcacaccaggcagcaaggcagcccagtcccagctcagccagggtgacctcgtggtggccattgacggcgtcaacacagacaccatgacccacctggaagcccagaacaagatcaagtctgccagctacaacttgagcctcaccctgcagaaatcaaagcgtcccattcccatctccacgacagcacctccagtccagacccctctgccggtgatccctcaccagaaggaccccgctctggacacgaacggcagcctggtggcacccagccccagccctgaggcgagggccagcccaggcaccccaggcaccccggagctcaggcccacctttagccctgccttctcccggccctccgccttctcctcactcgccgaggcctctgaccctggccctccgcgggccagcctgagggccaagaccagcccagagggggcccgggacctactcggcccaaaagccctgccgggctcgagccagccgaggcaatataacaaccccattggcctgtactcggcagagaccctgagggagatggctcagatgtaccagatgagcctccgagggaaggcctcgggtgtcggactcccaggagggagcctccctattaaggaccttgccgtagacagcgcctctcccgtctaccaggctgtgattaagagccagaacaagccagaagatgaggctgacgagtgggcacgccgttcctccaacctgcagtctcgctccttccgcatcctggcccagatgacggggacagaattcatgcaagaccctgatgaagaagctctgcgaaggtcaagcacccctattgagcatgcgccggtgtgcaccagccaggccaccaccccgctgctgcccgcttctgcccagccacctgctgctgcctctcccagtgcggcttcgccacccctggccacagctgctgcccacactgccatcgcctccgcctccaccacagcccctgcttcaagtcctgccgacagcccaaggccccaggcctcttcctacagccccgcagtggccgcctcttcagcacctgccacccacaccagctacagtgagggccccgccgcccctgcacccaagccccgggttgtcaccactgccagcatccggccttctgtctaccagccagtgcctgcatctacctacagcccgtccccaggggccaattacagtcccactccctacaccccctcccctgcccctgcctacaccccctcccctgcccctgcctacaccccctcacctgtccccacctacactccatccccagcaccagcctataccccctcacctgcccccaactataaccctgcaccctcggtggcctacagcgggggccctgcggagcctgccagccgtccaccctgggtgacagatgatagcttctcccagaagtttgccccgggcaagagcaccacctccatcagcaagcagaccctgccccggggaggcccagcctacaccccagcgggtcctcaggtgccaccacttgccagggggaccgtccagagggctgagcgattcccagccagcagccggactccactctgcggtcactgcaacaatgtcatccggggcccatttctggtagccatgggccgttcttggcaccctgaagagttcacctgtgcctactgcaagacttccctggcagatgtgtgctttgtggaagagcagaacaacgtttactgtgagcgatgttatgagcaattctttgccccgctgtgtgccaagtgcaacaccaaaattatgggggaagtaatgcatgccttgagacagacatggcacaccacctgcttcgtctgtgcggcctgcaagaagccttttgggaacagcctcttccacatggaagacggggagccctactgcgagaaagactacatcaatctgttcagcaccaagtgccatggctgcgatttccccgtggaggctggcgacaagtttatcgaagccctgggccacacttggcacgacacctgcttcatttgcgcagtctgccatgtgaatctggaggggcagccgttctactccaagaaggacagacccctgtgcaagaagcacgcacacaccatcaacttgtaggcggccaaggccgcctgtgctgacgaggcccggagctgctcctgctgctggcaacaaaggattcgggaggctgatgtttcttctgaggggaatggggagagagaggaagcgactgagccctttggaagtataattttaggttttttcttctgtacacagatcgtgcatttgcatagttcagactaggagccaaatgaagactcaaaaccaagctagttattaatccaagactggaattgtacttcagacatttagagcagaattccaagaactcaaaagtgaaaagcaacaagcagctttcccaaagcgatacacttgctttggtcaccagaggaggacagagcttagagcagctgtggagaatctgaagcattctgcggagttcttaagcgctcccctggcaaacaaattgaagtgccaaacagcactcgctgcagggtatttttagagtcatagctgagagcttgttagctaagacccattgggctttcctcaccaaaaaaggaagtgttattccattactagcgtcatggagctacctctgcgcatcagacttcagaccttgaacaaacttaaaaccttcttgggagcccggacgtccaaagagatgtcttctgggagccactgggcaattgccagggctccaggaagggctctggctcaggttgcagacagctgagaaaagatggccctgtcagccaccctctctcagtctgaaacatccaacatccccagaaggcttagctcctttttgaattgtgatgggaaagtagagttgggtttttccagttttgctctgtggtgtgtgagagatttttttaaaggctttgggttgtctttggcctttgtttagctttaagggttcgttagcatgagtgtccagtcgtgtgcatgaatttcaccccaacttgtgactgctcacttatgacgtctcccccagtaccctccatctcaaataggcttggtggcctgtggaaaagaagagagacagagagacagtgtctgaaacaggatggcagaataggctcacatgcccaaactctgggtggggaagaggaaacttactttctgccaccctcagtaagaacacacgaggaggcaggacctcccaccttcaggtctgcatcatccttttcaaatgttcctttaaatgcagcacactgagtttgtacaattgtgttaactgctggaagggacagatgcactgatatatatgcatttgctgttttggccaatattttgaaaatgtatgagctgagttgatctagctattatttaagtatttattgaagtagaggggccttcaaactactttatactagtgatagtttgagttaggtaagcatcttaaagctgtttggtgataaagaaggcagcttagattctgtggttggaaacagtgtagtcgcttccctttttaggaagccctgttaatatgctcattgaaaacatggcattgaagcaggcacttgcgtggatgtttctcacttgagcacgatatttaggctctcttccaactcactctattctgtcctcactcctgttttggatttttctctttgcatgtttgaaatgttttatgggaatgtattagaactcttttcttctaaggactgagacttccaggggattgccatcttacctgtctcttctccatgagggagaaggaagcagctagctatgtccctagctgcaggaagcccctattttttccaagcacgaagccaccagtctcccccagggagcatcaggaagggacatggatgtgctcctgccacagggcccttcctacctttggatctgtgagaaggtgaatacaaagcagcaggcagagtaaaatctgctgggactgcctggagatttgtcaggagctgcagacaagtaccttggagcattctgttatttttggaaagttcaaatatgcagggacaaggaggttgctgactgtactgacaggctctaagtcattttctccaaaaactatctattcaattatcaggggctggtcttgaggaagg

SEQ ID NO: 16272 - DNA, 1899 bp, Homo sapiens
  source 1..1899: mol_type = unassigned DNA
aggcggccgctgacagcaccagcatgtcttacagtgtgaccctgactgggcccgggccctggggcttccgtctgcaggggggcaaggacttcaacatgcccctcactatctcccggatcacaccaggcagcaaggcagcccagtcccagctcagccagggtgacctcgtggtggccattgacggcgtcaacacagacaccatgacccacctggaagcccagaacaagatcaagtctgccagctacaacttgagcctcaccctgcagaaatcaaagcgtcccattcccatctccacgacagcacctccagtccagacccctctgccggtgatccctcaccagaaggaccccgctctggacacgaacggcagcctggtggcacccagccccagccctgaggcgagggccagcccaggcaccccaggcaccccggagctcaggcccacctttagccctgccttctcccggccctccgccttctcctcactcgccgaggcctctgaccctggccctccgcgggccagcctgagggccaagaccagcccagagggggcccgggacctactcggcccaaaagccctgccgggctcgagccagccgaggcaatataacaaccccattggcctgtactcggcagagaccctgagggagatggctcagatgtaccagatgagcctccgagggaaggcctcgggtgtcggactcccaggaggcgccgactaccaggaacgcttcaaccccagtgccctgaaggactcggccctgtccacccacaagcccatcgaggtgaaggggctgggcggcaaggccaccatcatccatgcgcagtacaacacgcccatcagcatgtattcccaggatgccatcatggatgccatcgctgggcaggcccaagcccaaggcagtgacttcagtgggagcctccctattaaggaccttgccgtagacagcgcctctcccgtctaccaggctgtgattaagagccagaacaagccagaagatgaggctgacgagtgggcacgccgttcctccaacctgcagtctcgctccttccgcatcctggcccagatgacggggacagaattcatgcaagaccctgatgaagaagctctgcgaaggtcaagggaaaggtttgaaacggaacgtaacagcccacgttttgccaaattgcgcaactggcaccatggcctttcagcccaaatccttaatgttaaaagctaaaaggctgcctggaatccccccaccccaacaggctggactccctccatccttacccccacacagatctggcatgtgagccccacggtgatgcttgacaatgtataactctgctgggggcacctctgatggccaaccgcagcatttctgtcctctgcccaccccagagctgatgctggggcccagccccctgcagctctgtacccaccaaacctccccagggcaaccctcgccaccccccaaatagcccgtagcccaatcccctgccctctgcacagggccttagctgtagaccagagagggcaggaggggtttgctggcataacaccccagaaccaagggaaatggatgggccgctgctcagtttcccaccatcctcagctcctggcctcatcccctcctagaatgagtcacccgtagatcagggtctggggaagaggctgatccctggcgctgcccggctccctcgctgccctctggagctcagggcagcccggaatagggctctttgaagaggaagtagaagccccagggtaatgaggcagagacccctcctggcagtggtgaggtgggggcatgcaccctcctttctgtaccgtgtgtgctggctccatagttctctcttctgtacatataagcatgcttgttctgaaataaagaagatttgaagtgaaccacacca

SEQ ID NO: 16273 - DNA, 1598 bp, Homo sapiens
  source 1..1598: mol_type = unassigned DNA
gcaggcggagtgcctgagtgccctctcactcaaccctctctaccctttgtctgcagaggcggccgctgacagcaccagcatgtcttacagtgtgaccctgactgggcccgggccctggggcttccgtctgcaggggggcaaggacttcaacatgcccctcactatctcccggatcacaccaggcagcaaggcagcccagtcccagctcagccagggtgacctcgtggtggccattgacggcgtcaacacagacaccatgacccacctggaagcccagaacaagatcaagtctgccagctacaacttgagcctcaccctgcagaaatcaaagcgtcccattcccatctccacgacagcacctccagtccagacccctctgccggtgatccctcaccagaaggtggtagtcaactctccagccaacgccgactaccaggaacgcttcaaccccagtgccctgaaggactcggccctgtccacccacaagcccatcgaggtgaaggggctgggcggcaaggccaccatcatccatgcgcagtacaacacgcccatcagcatgtattcccaggatgccatcatggatgccatcgctgggcaggcccaagcccaaggcagtgacttcagtgggagcctccctattaaggaccttgccgtagacagcgcctctcccgtctaccaggctgtgattaagagccagaacaagccagaagatgaggctgacgagtgggcacgccgttcctccaacctgcagtctcgctccttccgcatcctggcccagatgacggggacagaattcatgcaagaccctgatgaagaagctctgcgaaggtcaagggaaaggtttgaaacggaacgtaacagcccacgttttgccaaattgcgcaactggcaccatggcctttcagcccaaatccttaatgttaaaagctaaaaggctgcctggaatccccccaccccaacaggctggactccctccatccttacccccacacagatctggcatgtgagccccacggtgatgcttgacaatgtataactctgctgggggcacctctgatggccaaccgcagcatttctgtcctctgcccaccccagagctgatgctggggcccagccccctgcagctctgtacccaccaaacctccccagggcaaccctcgccaccccccaaatagcccgtagcccaatcccctgccctctgcacagggccttagctgtagaccagagagggcaggaggggtttgctggcataacaccccagaaccaagggaaatggatgggccgctgctcagtttcccaccatcctcagctcctggcctcatcccctcctagaatgagtcacccgtagatcagggtctggggaagaggctgatccctggcgctgcccggctccctcgctgccctctggagctcagggcagcccggaatagggctctttgaagaggaagtagaagccccagggtaatgaggcagagacccctcctggcagtggtgaggtgggggcatgcaccctcctttctgtaccgtgtgtgctggctccatagttctctcttctgtacatataagcatgcttgttctgaaataaagaagatttgaag

SEQ ID NO: 16274 - DNA, 5436 bp, Homo sapiens
  source 1..5436: mol_type = unassigned DNA
acagtccatttatgggcgcagccgaaggcagatatcagtgtcgatggcattcgctcccagctattcttaggagcctctcaagagctccacgcagcccggctgggcagcaagggacagaacagaggcggccgctgacagcaccagcatgtcttacagtgtgaccctgactgggcccgggccctggggcttccgtctgcaggggggcaaggacttcaacatgcccctcactatctcccggatcacaccaggcagcaaggcagcccagtcccagctcagccagggtgacctcgtggtggccattgacggcgtcaacacagacaccatgacccacctggaagcccagaacaagatcaagtctgccagctacaacttgagcctcaccctgcagaaatcaaagcgtcccattcccatctccacgacagcacctccagtccagacccctctgccggtgatccctcaccagaaggaccccgctctggacacgaacggcagcctggtggcacccagccccagccctgaggcgagggccagcccaggcaccccaggcaccccggagctcaggcccacctttagccctgccttctcccggccctccgccttctcctcactcgccgaggcctctgaccctggccctccgcgggccagcctgagggccaagaccagcccagagggggcccgggacctactcggcccaaaagccctgccgggctcgagccagccgaggcaatataacaaccccattggcctgtactcggcagagaccctgagggagatggctcagatgtaccagatgagcctccgagggaaggcctcgggtgtcggactcccaggaggcgccgactaccaggaacgcttcaaccccagtgccctgaaggactcggccctgtccacccacaagcccatcgaggtgaaggggctgggcggcaaggccaccatcatccatgcgcagtacaacacgcccatcagcatgtattcccaggatgccatcatggatgccatcgctgggcaggcccaagcccaaggcagtgacttcagtgggagcctccctattaaggaccttgccgtagacagcgcctctcccgtctaccaggctgtgattaagagccagaacaagccagaagatgaggctgacgagtgggcacgccgttcctccaacctgcagtctcgctccttccgcatcctggcccagatgacggggacagaattcatgcaagaccctgatgaagaagctctgcgaaggtcaaggccccaggcctcttcctacagccccgcagtggccgcctcttcagcacctgccacccacaccagctacagtgagggccccgccgcccctgcacccaagccccgggttgtcaccactgccagcatccggccttctgtctaccagccagtgcctgcatctacctacagcccgtccccaggggccaattacagtcccactccctacaccccctcccctgcccctgcctacaccccctcccctgcccctgcctacaccccctcacctgtccccacctacactccatccccagcaccagcctataccccctcacctgcccccaactataaccctgcaccctcggtggcctacagcgggggccctgcggagcctgccagccgtccaccctgggtgacagatgatagcttctcccagaagtttgccccgggcaagagcaccacctccatcagcaagcagaccctgccccggggaggcccagcctacaccccagcgggtcctcaggtgccaccacttgccagggggaccgtccagagggctgagcgattcccagccagcagccggactccactctgcggtcactgcaacaatgtcatccggggcccatttctggtagccatgggccgttcttggcaccctgaagagttcacctgtgcctactgcaagacttccctggcagatgtgtgctttgtggaagagcagaacaacgtttactgtgagcgatgttatgagcaattctttgccccgctgtgtgccaagtgcaacaccaaaattatgggggaagtaatgcatgccttgagacagacatggcacaccacctgcttcgtctgtgcggcctgcaagaagccttttgggaacagcctcttccacatggaagacggggagccctactgcgagaaagactacatcaatctgttcagcaccaagtgccatggctgcgatttccccgtggaggctggcgacaagtttatcgaagccctgggccacacttggcacgacacctgcttcatttgcgcagtctgccatgtgaatctggaggggcagccgttctactccaagaaggacagacccctgtgcaagaagcacgcacacaccatcaacttgtaggcggccaaggccgcctgtgctgacgaggcccggagctgctcctgctgctggcaacaaaggattcgggaggctgatgtttcttctgaggggaatggggagagagaggaagcgactgagccctttggaagtataattttaggttttttcttctgtacacagatcgtgcatttgcatagttcagactaggagccaaatgaagactcaaaaccaagctagttattaatccaagactggaattgtacttcagacatttagagcagaattccaagaactcaaaagtgaaaagcaacaagcagctttcccaaagcgatacacttgctttggtcaccagaggaggacagagcttagagcagctgtggagaatctgaagcattctgcggagttcttaagcgctcccctggcaaacaaattgaagtgccaaacagcactcgctgcagggtatttttagagtcatagctgagagcttgttagctaagacccattgggctttcctcaccaaaaaaggaagtgttattccattactagcgtcatggagctacctctgcgcatcagacttcagaccttgaacaaacttaaaaccttcttgggagcccggacgtccaaagagatgtcttctgggagccactgggcaattgccagggctccaggaagggctctggctcaggttgcagacagctgagaaaagatggccctgtcagccaccctctctcagtctgaaacatccaacatccccagaaggcttagctcctttttgaattgtgatgggaaagtagagttgggtttttccagttttgctctgtggtgtgtgagagatttttttaaaggctttgggttgtctttggcctttgtttagctttaagggttcgttagcatgagtgtccagtcgtgtgcatgaatttcaccccaacttgtgactgctcacttatgacgtctcccccagtaccctccatctcaaataggcttggtggcctgtggaaaagaagagagacagagagacagtgtctgaaacaggatggcagaataggctcacatgcccaaactctgggtggggaagaggaaacttactttctgccaccctcagtaagaacacacgaggaggcaggacctcccaccttcaggtctgcatcatccttttcaaatgttcctttaaatgcagcacactgagtttgtacaattgtgttaactgctggaagggacagatgcactgatatatatgcatttgctgttttggccaatattttgaaaatgtatgagctgagttgatctagctattatttaagtatttattgaagtagaggggccttcaaactactttatactagtgatagtttgagttaggtaagcatcttaaagctgtttggtgataaagaaggcagcttagattctgtggttggaaacagtgtagtcgcttccctttttaggaagccctgttaatatgctcattgaaaacatggcattgaagcaggcacttgcgtggatgtttctcacttgagcacgatatttaggctctcttccaactcactctattctgtcctcactcctgttttggatttttctctttgcatgtttgaaatgttttatgggaatgtattagaactcttttcttctaaggactgagacttccaggggattgccatcttacctgtctcttctccatgagggagaaggaagcagctagctatgtccctagctgcaggaagcccctattttttccaagcacgaagccaccagtctcccccagggagcatcaggaagggacatggatgtgctcctgccacagggcccttcctacctttggatctgtgagaaggtgaatacaaagcagcaggcagagtaaaatctgctgggactgcctggagatttgtcaggagctgcagacaagtaccttggagcattctgttatttttggaaagttcaaatatgcagggacaaggaggttgctgactgtactgacaggctctaagtcattttctccaaaaactatctattcaattatcaggggctggtcttgaggaaggaaaaaaaaaaaaaaacgttcccagaattcagtttccaaaatctctttttaaagggtttacacacacacacacacacacacacacacacacacacacacacacacacgatcattaaaaagtgtatgctctttaagaagaaaagtaaaatatctcaaaggacggtttcaccaccgtcctttattgaatcaatttttctacatttcagagcaagtgtagattctgagggactcctatttgccaaaaagacaaaactagcaaaaaaaaaacaaaaaaacaaaaaaaaaaccacttaaaaggtagcaggaaaagaaggtagttttgagtgtggttcactcagtgtctgtgagtctggtgtagtgtcaggagtaaggccgtgtctagctcaagtttacatttggatgtcctacaacactaaacaaaatttttcataatccatggtggggagcacactttggagctacatttcttgtctcctcattgttgacattaattaaacatttataggccaggcacagtggctcacgcctgttatcccagcactttgggaggccgaggcaggtgaatcacctgaggtcaggagtttgaaaccagcctggccaatatggtgaaaccccatctctactaaaaatacacaaaattagccaggtgtggtggcaggcgcctgtagttccagctacttgggaggctgaggcaggaatctcctgaatcctggaggcggaggttgcagtgagccgagattatgccattgcactccagcctgggcaacaggagcgaaactccgttgcaaaaaaaaaaaaaaaaaaaaaattataatcacaactttttgcaatggagtgacttatatctgcagcttatatctgcagtgtttgtgttaggaacctagcttttataatgtgttaactttttaactcagtattctggctttgggattttttgttttgtttttggaaacatttcagaagtggaatgtagcctgttaaaggtgtgcacaaaaatattttgcatgtgtttttttttttgcctgtgtgaattctactttttagcaaaaataaagccccccaaaggatgtgcaaa

SEQ ID NO: 16275 - DNA, 5091 bp, Homo sapiens
  source 1..5091: mol_type = unassigned DNA
acagtccatttatgggcgcagccgaaggcagatatcagtgtcgatggcattcgctcccagctattcttaggagcctctcaagagctccacgcagcccggctgggcagcaagggacagaacagaggcggccgctgacagcaccagcatgtcttacagtgtgaccctgactgggcccgggccctggggcttccgtctgcaggggggcaaggacttcaacatgcccctcactatctcccggatcacaccaggcagcaaggcagcccagtcccagctcagccagggtgacctcgtggtggccattgacggcgtcaacacagacaccatgacccacctggaagcccagaacaagatcaagtctgccagctacaacttgagcctcaccctgcagaaatcaaagcgtcccattcccatctccacgacagcacctccagtccagacccctctgccggtgatccctcaccagaaggtggtagtcaactctccagccaacgccgactaccaggaacgcttcaaccccagtgccctgaaggactcggccctgtccacccacaagcccatcgaggtgaaggggctgggcggcaaggccaccatcatccatgcgcagtacaacacgcccatcagcatgtattcccaggatgccatcatggatgccatcgctgggcaggcccaagcccaaggcagtgacttcagtgggagcctccctattaaggaccttgccgtagacagcgcctctcccgtctaccaggctgtgattaagagccagaacaagccagaagatgaggctgacgagtgggcacgccgttcctccaacctgcagtctcgctccttccgcatcctggcccagatgacggggacagaattcatgcaagaccctgatgaagaagctctgcgaaggtcaaggccccaggcctcttcctacagccccgcagtggccgcctcttcagcacctgccacccacaccagctacagtgagggccccgccgcccctgcacccaagccccgggttgtcaccactgccagcatccggccttctgtctaccagccagtgcctgcatctacctacagcccgtccccaggggccaattacagtcccactccctacaccccctcccctgcccctgcctacaccccctcccctgcccctgcctacaccccctcacctgtccccacctacactccatccccagcaccagcctataccccctcacctgcccccaactataaccctgcaccctcggtggcctacagcgggggccctgcggagcctgccagccgtccaccctgggtgacagatgatagcttctcccagaagtttgccccgggcaagagcaccacctccatcagcaagcagaccctgccccggggaggcccagcctacaccccagcgggtcctcaggtgccaccacttgccagggggaccgtccagagggctgagcgattcccagccagcagccggactccactctgcggtcactgcaacaatgtcatccggggcccatttctggtagccatgggccgttcttggcaccctgaagagttcacctgtgcctactgcaagacttccctggcagatgtgtgctttgtggaagagcagaacaacgtttactgtgagcgatgttatgagcaattctttgccccgctgtgtgccaagtgcaacaccaaaattatgggggaagtaatgcatgccttgagacagacatggcacaccacctgcttcgtctgtgcggcctgcaagaagccttttgggaacagcctcttccacatggaagacggggagccctactgcgagaaagactacatcaatctgttcagcaccaagtgccatggctgcgatttccccgtggaggctggcgacaagtttatcgaagccctgggccacacttggcacgacacctgcttcatttgcgcagtctgccatgtgaatctggaggggcagccgttctactccaagaaggacagacccctgtgcaagaagcacgcacacaccatcaacttgtaggcggccaaggccgcctgtgctgacgaggcccggagctgctcctgctgctggcaacaaaggattcgggaggctgatgtttcttctgaggggaatggggagagagaggaagcgactgagccctttggaagtataattttaggttttttcttctgtacacagatcgtgcatttgcatagttcagactaggagccaaatgaagactcaaaaccaagctagttattaatccaagactggaattgtacttcagacatttagagcagaattccaagaactcaaaagtgaaaagcaacaagcagctttcccaaagcgatacacttgctttggtcaccagaggaggacagagcttagagcagctgtggagaatctgaagcattctgcggagttcttaagcgctcccctggcaaacaaattgaagtgccaaacagcactcgctgcagggtatttttagagtcatagctgagagcttgttagctaagacccattgggctttcctcaccaaaaaaggaagtgttattccattactagcgtcatggagctacctctgcgcatcagacttcagaccttgaacaaacttaaaaccttcttgggagcccggacgtccaaagagatgtcttctgggagccactgggcaattgccagggctccaggaagggctctggctcaggttgcagacagctgagaaaagatggccctgtcagccaccctctctcagtctgaaacatccaacatccccagaaggcttagctcctttttgaattgtgatgggaaagtagagttgggtttttccagttttgctctgtggtgtgtgagagatttttttaaaggctttgggttgtctttggcctttgtttagctttaagggttcgttagcatgagtgtccagtcgtgtgcatgaatttcaccccaacttgtgactgctcacttatgacgtctcccccagtaccctccatctcaaataggcttggtggcctgtggaaaagaagagagacagagagacagtgtctgaaacaggatggcagaataggctcacatgcccaaactctgggtggggaagaggaaacttactttctgccaccctcagtaagaacacacgaggaggcaggacctcccaccttcaggtctgcatcatccttttcaaatgttcctttaaatgcagcacactgagtttgtacaattgtgttaactgctggaagggacagatgcactgatatatatgcatttgctgttttggccaatattttgaaaatgtatgagctgagttgatctagctattatttaagtatttattgaagtagaggggccttcaaactactttatactagtgatagtttgagttaggtaagcatcttaaagctgtttggtgataaagaaggcagcttagattctgtggttggaaacagtgtagtcgcttccctttttaggaagccctgttaatatgctcattgaaaacatggcattgaagcaggcacttgcgtggatgtttctcacttgagcacgatatttaggctctcttccaactcactctattctgtcctcactcctgttttggatttttctctttgcatgtttgaaatgttttatgggaatgtattagaactcttttcttctaaggactgagacttccaggggattgccatcttacctgtctcttctccatgagggagaaggaagcagctagctatgtccctagctgcaggaagcccctattttttccaagcacgaagccaccagtctcccccagggagcatcaggaagggacatggatgtgctcctgccacagggcccttcctacctttggatctgtgagaaggtgaatacaaagcagcaggcagagtaaaatctgctgggactgcctggagatttgtcaggagctgcagacaagtaccttggagcattctgttatttttggaaagttcaaatatgcagggacaaggaggttgctgactgtactgacaggctctaagtcattttctccaaaaactatctattcaattatcaggggctggtcttgaggaaggaaaaaaaaaaaaaaacgttcccagaattcagtttccaaaatctctttttaaagggtttacacacacacacacacacacacacacacacacacacacacacacacacgatcattaaaaagtgtatgctctttaagaagaaaagtaaaatatctcaaaggacggtttcaccaccgtcctttattgaatcaatttttctacatttcagagcaagtgtagattctgagggactcctatttgccaaaaagacaaaactagcaaaaaaaaaacaaaaaaacaaaaaaaaaaccacttaaaaggtagcaggaaaagaaggtagttttgagtgtggttcactcagtgtctgtgagtctggtgtagtgtcaggagtaaggccgtgtctagctcaagtttacatttggatgtcctacaacactaaacaaaatttttcataatccatggtggggagcacactttggagctacatttcttgtctcctcattgttgacattaattaaacatttataggccaggcacagtggctcacgcctgttatcccagcactttgggaggccgaggcaggtgaatcacctgaggtcaggagtttgaaaccagcctggccaatatggtgaaaccccatctctactaaaaatacacaaaattagccaggtgtggtggcaggcgcctgtagttccagctacttgggaggctgaggcaggaatctcctgaatcctggaggcggaggttgcagtgagccgagattatgccattgcactccagcctgggcaacaggagcgaaactccgttgcaaaaaaaaaaaaaaaaaaaaaattataatcacaactttttgcaatggagtgacttatatctgcagcttatatctgcagtgtttgtgttaggaacctagcttttataatgtgttaactttttaactcagtattctggctttgggattttttgttttgtttttggaaacatttcagaagtggaatgtagcctgttaaaggtgtgcacaaaaatattttgcatgtgtttttttttttgcctgtgtgaattctactttttagcaaaaataaagccccccaaaggatgtgcaaa

SEQ ID NO: 16276 - DNA, 2463 bp, Homo sapiens
  source 1..2463: mol_type = unassigned DNA
agaggcgagcttcatcaggcaggagccagaggccagagagacagcgtgcagctccagaggcggccgctgacagcaccagcatgtcttacagtgtgaccctgactgggcccgggccctggggcttccgtctgcaggggggcaaggacttcaacatgcccctcactatctcccggatcacaccaggcagcaaggcagcccagtcccagctcagccagggtgacctcgtggtggccattgacggcgtcaacacagacaccatgacccacctggaagcccagaacaagatcaagtctgccagctacaacttgagcctcaccctgcagaaatcaaagcgtcccattcccatctccacgacagcacctccagtccagacccctctgccggtgatccctcaccagaaggaccccgctctggacacgaacggcagcctggtggcacccagccccagccctgaggcgagggccagcccaggcaccccaggcaccccggagctcaggcccacctttagccctgccttctcccggccctccgccttctcctcactcgccgaggcctctgaccctggccctccgcgggccagcctgagggccaagaccagcccagagggggcccgggacctactcggcccaaaagccctgccgggctcgagccagccgaggcaatataacaaccccattggcctgtactcggcagagaccctgagggagatggctcagatgtaccagatgagcctccgagggaaggcctcgggtgtcggactcccaggagggagcctccctattaaggaccttgccgtagacagcgcctctcccgtctaccaggctgtgattaagagccagaacaagccagaagatgaggctgacgagtgggcacgccgttcctccaacctgcagtctcgctccttccgcatcctggcccagatgacggggacagaattcatgcaagaccctgatgaagaagctctgcgaaggtcaaggccccaggcctcttcctacagccccgcagtggccgcctcttcagcacctgccacccacaccagctacagtgagggccccgccgcccctgcacccaagccccgggttgtcaccactgccagcatccggccttctgtctaccagccagtgcctgcatctacctacagcccgtccccaggggccaattacagtcccactccctacaccccctcacctgtccccacctacactccatccccagcaccagcctataccccctcacctgcccccaactataaccctgcaccctcggtggcctacagcgggggccctgcggagcctgccagccgtccaccctgggtgacagatgatagcttctcccagaagtttgccccgggcaagagcaccacctccatcagcaagcagaccctgccccggggaggcccagcctacaccccagcgggtcctcaggtgccaccacttgccagggggaccgtccagagggctgagcgattcccagccagcagccggactccactctgcggtcactgcaacaatgtcatccggggcccatttctggtagccatgggccgttcttggcaccctgaagagttcacctgtgcctactgcaagacttccctggcagatgtgtgctttgtggaagagcagaacaacgtttactgtgagcgatgttatgagcaattctttgccccgctgtgtgccaagtgcaacaccaaaattatgggggaagtaatgcatgccttgagacagacatggcacaccacctgcttcgtctgtgcggcctgcaagaagccttttgggaacagcctcttccacatggaagacggggagccctactgcgagaaagactacatcaatctgttcagcaccaagtgccatggctgcgatttccccgtggaggctggcgacaagtttatcgaagccctgggccacacttggcacgacacctgcttcatttgcgcagtctgccatgtgaatctggaggggcagccgttctactccaagaaggacagacccctgtgcaagaagcacgcacacaccatcaacttgtaggcggccaaggccgcctgtgctgacgaggcccggagctgctcctgctgctggcaacaaaggattcgggaggctgatgtttcttctgaggggaatggggagagagaggaagcgactgagccctttggaagtataattttaggttttttcttctgtacacagatcgtgcatttgcatagttcagactaggagccaaatgaagactcaaaaccaagctagttattaatccaagactggaattgtacttcagacatttagagcagaattccaagaactcaaaagtgaaaagcaacaagcagctttcccaaagcgatacacttgctttggtcaccagaggaggacagagcttagagcagctgtggagaatctgaagcattctgcggagttcttaagcgctcccctggcaaacaaattgaagtgccaaacagcactcgctgca

SEQ ID NO: 16277 - DNA, 1889 bp, Homo sapiens
  source 1..1889: mol_type = unassigned DNA
atgtcttacagtgtgaccctgactgggcccgggccctggggcttccgtctgcaggggggcaaggacttcaacatgcccctcactatctcccggatcacaccaggcagcaaggcagcccagtcccagctcagccagggtgacctcgtggtggccattgacggcgtcaacacagacaccatgacccacctggaagcccagaacaagatcaagtctgccagctacaacttgagcctcaccctgcagaaatcaaagcgtcccattcccatctccacgacagcacctccagtccagacccctctgccggtgatccctcaccagaaggaccccgctctggacacgaacggcagcctggtggcacccagccccagccctgaggcgagggccagcccaggcaccccaggcaccccggagctcaggcccacctttagccctgccttctcccggccctccgccttctcctcactcgccgaggcctctgaccctggccctccgcgggccagcctgagggccaagaccagcccagagggggcccgggacctactcggcccaaaagccctgccgggctcgagccagccgaggcaatataacaaccccattggcctgtactcggcagagaccctgagggagatggctcagatgtaccagatgagcctccgagggaaggcctcgggtgtcggactcccaggagggtggtagtcaactctccagccaacgccgactaccaggaacgcttcaaccccagtgccctgaaggactcggccctgtccacccacaagcccatcgaggtgaaggggctgggcggcaaggccaccatcatccatgcgcagtacaacacgcccatcagcatgtattcccaggatgccatcatggatgccatcgctgggcaggcccaagcccaaggcagtgacttcagtgggagcctccctattaaggaccttgccgtagacagcgcctctcccgtctaccaggctgtgattaagagccagaacaagccagaagatgaggctgacgagtgggcacgccgttcctccaacctgcagtctcgctccttccgcatcctggcccagatgacggggacagaattcatgcaagaccctgatgaagaagctctgcgaaggtcaagggaaaggtttgaaacggaacgtaacagcccacgttttgccaaattgcgcaactggcaccatggcctttcagcccaaatccttaatgttaaaagctaaaaggctgcctggaatccccccaccccaacaggctggactccctccatccttacccccacacagatctggcatgtgagccccacggtgatgcttgacaatgtataactctgctgggggcacctctgatggccaaccgcagcatttctgtcctctgcccaccccagagctgatgctggggcccagccccctgcagctctgtacccaccaaacctccccagggcaaccctcgccaccccccaaatagcccgtagcccaatcccctgccctctgcacagggccttagctgtagaccagagagggcaggaggggtttgctggcataacaccccagaaccaagggaaatggatgggccgctgctcagtttcccaccatcctcagctcctggcctcatcccctcctagaatgagtcacccgtagatcagggtctggggaagaggctgatccctggcgctgcccggctccctcgctgccctctggagctcagggcagcccggaatagggctctttgaagaggaagtagaagccccagggtaatgaggcagagacccctcctggcagtggtgaggtgggggcatgcaccctcctttctgtaccgtgtgtgctggctccatagttctctcttctgtacatataagcatgcttgttctgaaataaagaagatttgaagtg

SEQ ID NO: 16278 - DNA, 18278 bp, Homo sapiens
  source 1..18278: mol_type = unassigned DNA
gtcacttttatttgggggtgtggacagctgctttcccaggggagtacttcttacagtgggatttcaagacaagatcggcctgaagaaaaattatatttgtatattttttaaaaagtgggaactttgaggctcagagacagagcagaagacagaacctggtcttctgattccctgtgttctgcttttttcattgttccactggacgctcatcagagggaagatctttttcctcaattgattccaacaatgtctcacccatcttggctgccacccaaaagcactggtgagcccctcggccatgtgcctgcacggatggagaccacccattcctttgggaaccccagcatttcagtgtctacacaacagccacccaaaaagtttgccccggtagttgctccaaaacctaagtacaacccatacaaacaacctggaggtgagggtgattttcttccacccccacctccacctctagatgattccagtgcccttccatctatctctggaaactttcctcctccaccacctcttgatgaagaggctttcaaagtacaggggaatcccggaggcaagacacttgaggagaggcgctccagcctggacgctgagattgactccttgaccagcatcttggctgaccttgagtgcagctccccctataagcctcggcctccacagagctccactggttcaacagcctctcctccagtttcgaccccagtcacaggacacaagagaatggtcatcccgaaccaaccccctctaacagcaaccaagaagtctacattgaaaccacagcctgcaccccaggctggacccatccctgtggctccaatcggaacactcaaaccccagcctcagccagtcccagcctcctacaccacggcctccacttcttcaaggcctacctttaatgtgcaggtgaagtcagcccagcccagccctcattatatggctgccccttcatcaggacaaatttatggctcagggccccagggctataacactcagccagttcctgtctctgggcagtgtccacctccttcaacacggggaggcatggattatgcctacattccaccaccaggacttcagccggagcctgggtatgggtatgcccccaaccagggacgctattatgaaggctactatgcagcagggccaggctatgggggcagaaatgactctgaccctacctatggtcaacaaggtcacccaaatacctggaaacgggaaccagggtacactcctcctggagcagggaaccagaaccctcctgggatgtatccagtcactggtcccaagaagacctatatcacagatcctgtttcagccccctgtgcgccaccattgcagccaaagggtggccattcagggcaactggggccttcgtcagttgccccttcattccgcccagaggatgagcttgagcacctgaccaaaaagatgctgtatgacatggaaaatccacctgctgacgaatactttggccgctgtgctcgctgtggagaaaacgtagttggggaaggtacaggatgcactgccatggatcaggtcttccacgtggattgttttacctgcatcatctgcaacaacaagctccgagggcagccattctatgctgtggaaaagaaagcatactgcgagccctgctacattaatactctggagcagtgcaatgtgtgttccaagcccatcatggagcggattctccgagccaccgggaaggcctatcatcctcactgtttcacctgcgtgatgtgccaccgcagcctggatgggatcccattcactgtggatgctggcgggctcattcactgcattgaggacttccacaagaaatttgccccgcgatgttctgtgtgcaaggagcctattatgccagccccgggccaggaggagactgtccgtattgtggctttggatcgagatttccatgttcactgctaccgatgcgaggattgcggtggtctcctgtctgaaggagataaccaaggctgctaccccttggatgggcacatcctctgcaagacctgcaactctgcccgcatcagggtgttgaccgccaaggcgagcactgacctttagattcagtcacctgttcagccggcactgagaagaacgaacacaagaaaaagataagaaatactagagtaaaggccatcaaactacgcgatagtctctgttcttcatctgctattaaccttgccttagaaacacataaattatgagattttttttaaaagttgttaccaaatacacatttcacattgaatcatgtaggatcttgatgggcctttgttcccaaggacttccacatttttgcacagattatgctccatcccattcacttctgcattcctgtaacttttaatccctatgtttgtctcacttttcatctggttgaatggcttttcttagtgtggtatttgctgtcacatagtttttcctgggtgagtctgccaactcacaggtgcttttaggcttgaaatctccatcctatcatttccgttttgcctgtgactgtaaagagtagccattcttttcccatgtattgaagaggatattcttctcttgctttatactactcacgtccttggggagggaaatgcacaatttttttttgttaggctgtaaagaatttaagctgtaaattacataagttagaacaagcccaaatttaatttgcaaccatcagaattcagaatctatagtgaccagtgatcaaggctaattggaaaagagttatcggcccatagctaataagtagtgacagacaaccaagcttcaatatttttctaaagaaattacaggtgggatatgctagaaaaggcattttggggttatgtttaaaaaaacattattgtcccacaatattaccttaagatttttcttttccgcactacctgaacattgtaatacagacaaacttgatttcttctagaagataacattttcaatactgtcccacttctcatcttaaaaatattgtcatgtttattctaatatccaacacaactatcaaaattgcctttttctctagaggatgaaggctgtgaaaaaaccgttcaaattctcttctttttcttttttattaccaggtccattttgcctgacaattgcaaatcagagcatacaaaataaaactgtgcagttttgtttggtttactttcaaaagagtagaaagcttgaaaagattctgaaaccacagtttcattattctcataatccttctgcaactgaaattacatattgcaggagacattttcatatcatcaatgtgacatttacaccacactttcaaagacaatcactgaaacaaaaattgtctttatgagctaaaaatatgcagaatctctgcctagaatctttattcaaacttttattagccagtgaaacacttgcttgccaactgccaagccatacttattaagttcgaacatgtttcacttaaggagagacacctagcttagtcatggcaagttgccattttgtaaactaaggattttggactgagatttcttaaatctttcttcaaatctcccacaagtatatacttttaaattatggagtattttaagtctacaaaaaggtataaataataatataatgaattcctatatacctaatacccagtttaagacaccaaatataacaagtataattacatcctccaatgtaccgtttccttattccacagatatctttttcattattgtgaagtgatgttcagatttctagttttttttctagtttttaattttaacatcagaactgaaataaaaaattatggatacgtgttttgaattgcaaactattcctcaggaattccaattaaatttattttacttgaataggaatgatcataaaagtgattctttttttgtgactagaaattcttaagccgatggtcactatagctcatccttaatgtatggctcatttgcttttgtcactaaacggttttgtgttagaaccaccaaaattatagcttttaagagcttcctttgaccactgtctttttcttaccctagttctcttatctttgatcgtatatttctcataatgtgaaatatgatgagattcacttaggggcagcatgttagttttgggaggcaatgtcaactgtgtctctgaattcctgtcttccaaattgaagccagaccatgctgatgacctcaagtagcactgactatttgacaatagggctgataatgtaatcggcttgaattttgacttagtaactttttatgtaatactttcggagaaattctctttaggacaaagcagagagtccaatttattgagggatagattgtatctcttaaagtggtcatattattattaattttgccaaaagaagaagaatttattgaatatttatactataaaatgcagtaacattctacttgcttattacatttaaatccttgtgtaactgaatgtttacatgtcaagaggaaaagctgtaagaaaatgctgtcacagacccatccctgtggcatcgtcagcagaatactgcttgcttacaatctttattatgcattcttataacataacctcagagtatctttaccaaaggtttttaaagtaaatctctttttaagatagacttattcttttataataatgaatgtgcactcatacatatgtagaaacatttagatttagagttttttttttctttcacaaggtataataaggaaaggatcctacaatattttattctagggtttcttaaatatatgatttatattactgtcttttctattaatcatttgatttaaacaatgccaagtcactcttttttagttgcatgaaattttgcctgcaacagagagaaaaagattgtattactttaatgattataatcatactgtctgctgatataatatcataattgttgtggtttaaatacataaatagtagaaaaatcagagtctataacagaaagtttgtaaaaatatactgattttgaaaagtatcaggaatataaatatttggtaattctgtgtaacaagagagacatggaaaaggaaaaaaatccactatatcatgggctctgcagaacatatcaaaataggatttcttaaatttttcaacccccagaccatactgactcaacatggagtctcactggccaagaaaattgcctttaaaactcgaaaataaggccaggtgtggtgactcacacttgtaatcccagcaatttgggaggctgagacaggaggattgcctgaggccaggagtttgacaccagcctgggcaacatagtgagaccttgtctctacaaaaaataaaataaaataaaaaccaaattagccagacatggtggcatgcgcttgtttaaaaaaacaaataaataaataatcgactcaaaaataagtcatgtgtcccagcataaggcatcaggttgttagatgctggcatctctgcagctcaaagatgtgggttctttttcttgtcattaacacattgttatttctgtaggagcaacttctctgatcaaaattacttttctgggtatgtgctgattaagggggtggacttatcaacactataattgttccctatgaaagattccacagagatgtttatggtgaggtttaaaggatatgaaactctacatttaaacaagtattttatatttgggtacagaggaagaaagagagggctttttccatggggctatagtagagagttagtggaatatagacaggactctgaaaacacaacttccagccatttttttagttagtaaaaatcctattaatgtgaaccagccaggaataacagtgttatttctattggatatggtttgggcttctcttgtcaaatctgtgtcggctgccccctgatccttccattatcaagttttgaagggtgttggggaaattatggcagctgctagggagatcagggaaacactgatgtaacctcaaagcctctcaccattcctcttggcttggaaaggctttattttttcatatacatttctagaaatattgctattctaccttagtatttcacatttgtagttcaaacaagcgattgtccatctgttgcctagagctatagtacatgtgtgttatgaatgaaatatgacagcatgttccatacccctgctttagccatctgtgggaaaccagcaaactgaaaaagacacctctgcaaaatgtgcctcaagtccatttcttgggatcgctcgtttggtgcactctcgtgggagacaatcagagaacaacatatacttgtgccttattttcaaagaatctatttacactactatgaatattccactgaagagtcaatgatgtaaatgataaccaccaaatctcaaaaatatactcaccaaaaagtaaaaaagtaaaaaaaaaaaaaaaagaaagaaagaaaagaaagagagagaagtcaacttttcatcttaatatattctagtagtatttattttttccttgtcttggaagtatctcataggtctttaaatgagtaaaacatttttatgccagaaggtgatataatggatgttagtgttttttatttgattttacagtagttttagtcagataatgaggacagagacttcaacttgattctttaccaccattcagcatattttttaattgtcttcattgtatttgcttaatagtggtccagacaagttcaaaacttgttctcagtgaggcattaatatggtgcaaccatgaatatttcaggccaagttattcacttgacagataactagaatgaaacttttctcatgaggctgttgtttggttagcatagccttatttcaaaccttaaaaagttacctgactgaagctactatgacttggtaaggattcttcctctcttgctttcttcctcccttcctttcttcctcttccttcctcctcttcttattttctttcctactttccatcctacctattagtgttgctgtacttggattttttgtaaattaaatcaatgcattatgattttagggaattatgattatattcataaggggaaggctaccagaaaatatatgtggcatccataaaatcttcttttataggggcatattttttaggttgtatttattcgtaaagtgaaatgagataatagagtctttctgtttcatgttaatgaattttcatcagggactgaggtcatagattcttggaaaattcatttgtgactgatctagttttctcagctgtatgcaaagtaatctttcaaagactaggttaagattttttttttaagtctgaagcaatgtaaccccaaaaaattataattttaatgatggcattttattttattccattgcagcttgataactttccttatagcaaaggaataactattgtattttcagaattttaacacagattaacacttagcctgtaagactaataatatattgtaatagttgatactaaaatatttttcagcaggttggacagcaccagtttttcttagatcacagactacaggcagaatttcccttcaatccagaaaaaaggacactaatttccttttctatttaattttcctggcccttgtgcaaaaaattgtggactctatcttagttacaacatgcatgtcccttattttgtggagagctgtgtgaaagatgcgttttttttctttttttcttttttttttttttgagacggagtctggctctgtcacccaggctggagtgcaatggcacgatctcctctcactgcaagctccgcctcccaggttcacgccattctcctgtctcagcctcccgagtagctgggactacaggcgcctgccaccacgcccggctaatttttttgtatttttagtagagatggagtttcacagtgttagccaggatggcctcgatctcctgacctcgtgatccacccgcctcggcctcccaaagtgctgggattacaggcgtgagccaccgtgccccgcgtgtttttttctttagctgattgacaggtccccttcaaagttacaaaaaaaagtgctaatttttgctgttaaattctggttgttatttaattgacagaagtctcttgatgcacgaataaatatctctacatctagcctttgttaaaaataaaaattaatattctacaaacacctacatatactagagaggggtgaaacactgcagctaattcctttataatactttcagatgattgcattaagcctttcatgttatgtggcattgttaatttttcctagatacccatccacttaagggccagagaaatccttattcatttaactctggtgggcatttatgtaacatacccaaataaaaacgttattaaacagccacaatcgcattcagtcaacttggcactgaatgtagcttctaaaatcagttctctaccctacgaatggaatgttctaccaagaaagagaagcatcaccatgtcatcttgtgttctacaccactatagagagttacagttgcccccaaacacgaatgctattcccaaataaaatagaatcatgctttgggaggccaaggcgggccgatcacgaggtcaggagatcgagaccatcctggctaacacggtgaaaccccgtctctactaaaaaaaaaaaaaaatacaaaaaattagcctggctcagtggcgggcgcctgtagtcccagctactcaggaggctgaggcaggagaatggcgtgaacccgggaagcggagctttcagtgagccgagatagcgccactgcagtccggcctgggcgaaagagcgagactccgtctcaaaaaaaaaaaaaaaaaaataggatcatggcccttttaaagatctgaatcttctctgttattttcctgatgaatcaccatcccatatcttcttagtcctggccagtatgtagttgcgctcacatacgtctattctagctctgtagctccacaaaacaagtcttaagtccaaatctttgcctcttcatgtctgatatcaccaactcattcagcttttcttcacttattgacatagtgtcatgtcctatcactctctgctgcttctttaaacagtggacacaaacatattttctaattttcagtgtactcagtgaaacttggcagttcaccatgagtcaggctaggttgaaaggctttctttagggttgaaagtaaacgaaattggaatcacccaaagagaatttccccaaaaaacctcagacccagaagtgtaaaagctacagaaggatagaactcccatgtctacagacagttctgttactttttgttctgtactattttggatgttgccaaaatcaaattcatcctgaaaacaggaagcaagctaatgcatatgccatccatgagattcccacttctgggtcagttcatattccattcaaccttttccttttatccttgtcttcttcagaataagacatttttcctccatattttcatattaaatattaacactttataggttctactttaatatatggacactttacaggttatacataaatatttgctggttgattgatttcgagattcattcattctgtgctcaaatatttgtacctagagacgttacatgttagaaaaagtgagcagcttctttctctaatcatttaggagtccatatttttcttttctttttgttctcccaacatccttatctcttactcagctcttcaatttataattaccaaataatcactgttagagaatcagcccctaagtaactttgattctggccaactgtaataagatccaaccacttaaatctgtacttactcaataggaaggaatgtgacatcaggaagagtcattccagtgacattagtaagactttatggagtacataaaatttgataagaaatcttgagctgattctttgacttgatttagaagttgagaaaagagtatttaaggcacaacagggaaacatgggctatactcagagaagaccctctgcattggccaaaatatcatggattctggaaattccttcttaacagaaaaaaaaggcttccaaataatcaggctgaatgggaagaaaaaggcatagaggaagcctgaggaagtatttacttgcttttcccatctctttataattggaagagaagatgatctgccaaaatataacccagcatgcacagtatggacaggaagcagccctccatgaactttattatcacagaatatgagcattcttattgatccacagctacatcttctattcttgcagcaagggtacatgtcctttgaccctccacaaaagaacaagcaggacatctctattttcctattgagtctgagtccattattagaaaggacttcccagccatcttttctacttggtattaaaattcccttacagattcattgctaagtgccaattctttttttttcttttgagacggagtcttgctctgtcgcccaggctggagtgcagtggcgcaatctcggctcactgcaagctccgcttctcgggttcacgccattctcctgcctcagcctcccgagtagctgggactacagacgcccgccaccgcgcccagctaattttttttgtacttttagtagagacggggtttcaccgtggtctcgatctcctgacctcgtgatccgcccgcctcggcctcccaaagtgccaattctgactctacttaaacatcacctgtatcagggagctcattattccttgaggtcttacatttctttcagcacattttgttccaagctacacgactttaaaacagagccagcctttggggcatatgttctctttggtgccacacaaaacctgtagtacatgatacagtgttgcttcccccctccttttccttccatatatatttgttttgttttgggcattgcattacttttttgaatttttaagaatctctaaaattagtctgaaggatgttctgagggccagacattagaatttgtgagtttttttgttgctggttgtactttcctatttagaagacagaccgttctgacagttgttgtgtagcttcatgccttccccagtaactaacccatgaacagtacaccccttttatctgacttgttgataatgaccttaaaaatgttaggaaatgggccgggcgcggtggctcgtgcctgtaatccagcactttgggaggccgaggcgagcggatcatgaggtcaagagatcgagaccatcctggtcaacatggtgaaaccccgactctactaaaaaaaatacaaaaattagccgggcgtgttggcgggcgcctgtagtcccaactacttgggaggctgaggcaggagaatcacctgaacccaggaggcagaggttgcagtgagcagagattgcgccactgcactccagcctgggcgacagaacgagactccgtctcaaaaaaaaaaaaaaaaaaaaaaggttgggaaatattggtgtataatccccatgtctaacaaggaagaagtcaaaagcaaaagatagtggtattgccgaaaactcattatttctagttagttcatctgtggaaaaggatatcgttcttgaggagaggggttctattatgctatagttttctatggaaatgtacaaatgctttcctcattgctctggatgactatttagtttaaataatatacctttgtcatggggaagaccatgattgtggcttcttctaccccaactttgaatgagagagcactgtaagcagaaactgccatcagtctcctgggcaggacctggaggtaactttctgagctgtaaaatagtaattcctaagagagcttacaaactgcttccacacagaaaatagcgcagggaggacagttattagtacccctattctagaagagaaagctgaggctcaagccattaagtgacttgccaaaagctgtgacatagctgggaagtggcagatttggggatataaccaggtcttgcaagtccagtgctgtctccaaagtagccacgctcacagctgagaacaccttagaggacaatatcgacttcttacagactaccaagcccccagtcatccagggaaattcagagaccaattgactgccaggtggcaaatccacatgtgtactgcggtctttagagatcatttagagcttgcacacatctgtgtcttcttgtgggaaacctctaggtattctgtctgatcagcactgtgaggaagttggtgggaaaaggccactgataagaacaaacaatgggcagaaggaagcacattgcaataaatttccccagagagagttcctttacattccattcaccaaaaacctctctggaactgtcaggttcagaatatcaaccaagaccatatcatttagaattcattggcatgtagaggtgactcgattcctaaaagaagcctctctcccatgaaccacgatgtacgttccacagaggcagaaaccgccgtaggttagcaatgcattttagtctttctctccattcacatttactgagagcacaccacgtgcatgttgctgcaacaggcatttccgatagagccgatccatgagctaacaatgtctgaaaacaaatgttatggaactgttggcatttctgagatttggcctttgccatttgatagactttgcttcccaggatgctgtcattttgtgattttttataattacaaggaatttggtaccatgttgttttcaaaaaacctcctagaaagtctccatgtatgctctagaagttgctctacgtaacagttcagcaagcaagtgttccttctcttgagctgcgtccctcaggaagctgtacctttagggtgtgctttccactttttatttcctctcatttcactcctttcattgtttgctatatcctaaaatatgtgaagtgagagaaaaaatatcatttcttctcattaaatctcctgcattaaatctaagaatcctttaaaataatcacacctgataagtgttttatgcatttccctccctggagtgttatcatccatcaagccagtatcatcatccacctgcttattccttgggactaatgagagccaagttaaatagcaaatgacttctcaccccttcctagtcctcatgcctgaggaataagggcgacattaatgggagcgggagagtggtggctttggttgagatgcacgttcacagactagaaaagtgcctcacctccatggtgtatatgtgccaccttttcttaatccagtctatcattgttggacatttgggttggttccaagtctttgctattgtgaatagtgccgcaataaacataagtgtgcatgtgtctttatagcagcatgatttataatcctttgggtatatacccagtaatgggatggctgggtcaaatggtatttctagttctagatccctgaggaatctccacactgacttccacaatggttgaactagttcacagtcccaccaacagtgtaaaagtgttcttatttctccacatcctctccagcacctgttgtttcctgactttttaatgattgccattctaactggtgtgagatggtatctcatagtggttttgatttgcatttctctgatggccagtgatggtgagcattttttcatgtgtttcttggctgcataaatgtcttcttttgagaagtgtctgttcaatactatgcagccataaaaaatgatgagttcatgtcctttgtagggacatggatgaaattggaaatcatcattctcagtaaactatctcaaggacaaaaaaccaaacaccacatgttctcactcacaggtgggaattgaacaatgagaacacatggacacaggaaggggaacatcacactctggggactgttgtggggtggagggaggagggagggatagcattaggagatatacctaatgctaaatgacgagttaatgggtgcagcacaccagcatggcacatgtatacatatgtaactaacctgcacattgtgcacatgtaccctaaaacttaaagtataataataatgaaataaaattaaaaaaaaaaaagaaaagtgcctcacctccctgtgaggcttgatgaatattgtggccagtgagtggaaaatgattcttgtcgaatagacagagtattcccaccccaggaatggattaatagaagacacaatttgagcacttctcagaattatctagtatgcctgagtagagactcacatgggtggaatctgtgttgtctcatcagagggaataaaaagacaatgaggtggtaaatgtgaaaaaagcagccttttagaaaaacattattttcaaatacctttataaatcatctaatttatcttcacataatataaagaaaaaactaataaaaattttcgtatttcactttacataatatgttctcccatatttagggatcatacaattgtattgtcttcaaaacacacacacacacacatacacacacacacacacacacacacacaccccttccaagaaagctgatccttcagaaaataaatcttatttttaagcacttgggttttcaggccagaaaattaataaatcctaaacctgacccatttttgtaacagctaaaaaggagaagaaaaagctagttaaattttgtgtggatccatttatctcttaaaatatgccaaagcaatttgaggtgggggtggaaacaggtatttatctctcatgcgtgattctctctttatatttctatctgttgggaaaagggtaaagaactattcttggtcattattgatgtattgtgttgccactttgtatggtgcctgctgtgctttatcccgaggcatagcagtaatcgttactatcttgactctttccttcatcacaagagagtaaatatgaagtctgaatgtcgttcctcacccccaaattgtttaactctgcttccaaactagtttaagaaatgcaaaatgggaagagctagcttttcttagatacatttcttccttttttattctttcttgggagacgttaagtataaaagggaaaaagtcagttccttcttctctctctttctctttgggtgacagcaatgctcacttagtaattataaactggaaataggagagtagcttgagcaggttatgatatatctgcccaatgtgtttcattccttcaaacataaactttgagagtaaaagagatttttataatttaaatgccaacgacaggaatggcctcatgttttaactttcaaataataaatggggagttggtatttgggcagagtttgcattttactaatcctatatactttgagcttagtttttagaattgtgtcaaatacatcaacatatcaggattatagtgccaaaaatagttaaagtgccttggtcctccctctgtaggcagcaaattgaaactaacatgggaccatgccatccttctagcataatggagaagtctgaactgaggagtatctttgatgaaagacatttaggaccctagaaactaaatcttgtcaccaagactttatagtaaagtagtagcaaaattatttttaaaagactttcttccttttactacccatttcctctcttgggaaagctgatgagcaaattatccaagactcatttctttattaggcaaagtcagaatatttcccctctgaaaatctgaattatgccctcattctttttcaagaaatatctcaaagagcaaatagaattaaacatgacacttgattgtctgattatttggcatgtataaaattatcatgtggcttaatgtgccttaagtgaaaatttaaacttagacctgaaacctttacagttggatgtagcgttgagcttttgcatgttttctgtataataaaccacttttgttttgtttgttttgtcttttaacctacacctttatcattactctaacagatttagggcttctctttctctacagctaagtaagggaatatgtgcaattatgagacatacaaaaaaggaaagggaaaggactttctaagtagcaaatctgtgccatgaagtagatgtggcgtgaagatacagagcctgaggatagtaattttccctgagccacgcacacaggcttttatttcatgccttttctctttctgtgccgtcacctttgagaaaaacgattgcaccttctccaagtctgcctttttaacagctacagttaagttggcaagacttccccagctctgaatatagccatttgccgactccggcctctttgcgagactgactcaaatctgtgatcttctgttcagcatacacatcagcaaagtgagaagatgagcactaaatataggctctattaactttacttttagatttactgccttcaaaaagtgcctattctgagcaacataaacgttattccttacatatgtatgtacacacggtacccagagtcgtactgtgcagccttcaaaaacataccatcagaaagagtaggtgctgagataaggaaactttgccaaatgaaagaaagtcactcacttccaatatcccctctcaagcggctaccgtgaaacgggctgcaaacacattccctgagcatcccttgctgatacagcttctttatatttatatcctactggatggtagcatattgctaaggtttcctgtactctgcttcaagggaatgtaagctttatggcattgaaacatttagggaaaaaaaagatgtttaagagaattaatagagccgtagtctgtattaggatgtgtgtcatatgtgtgttctataaactaagcatcggtgggtttagagtgttaaagtgtcagcacattccttctccttttgtctctcaggctaacatgagagaaaatagaaaagtcttggctgtggggattggaagctcagggggccaaatgtccttgccagatccttagagcattactttgactcctaaaaatagtagtgtatgttatttgatggcttttgtttccatagttccatcactgacaaaactgtcaatactgttgatggagcagcagcatagcctagagtgatgcattcttacccagaggtggcaataggagagggtccatgtaaataggacgaggtagacagtgcatgattgtaggagaagggttgaagggaggacatgattccaaaaaagatcgttctcaatgtgtcgtctgactcaaccagctggcagattacacttgccaagtcgttccctttccttctaagtcagttggctccatattcacttgaatatgcctctgtttgggcaaagcaagatacctccacttaacctttatccaaggaagctcttggtgtcctcttggtcataaagttgtctcctacctaacccagttttaccaaatggaagtaaaaggggacaaactatggaagatggactccatgccattgcagtcagccaccattctcttttccatataaggagccccattacataagctacgggtgaggttggaacagctatgtttcataatttcaagagtgtgaccaccctgctctagtcatcatcattggatgaatccagttgactctttggcaaaagggtgatacttttcactaaaaatgcctactcttcctgttgatgttccttttctgtttttaccttgtccaatttccacactagtcattttttttattttttagaggatcagattttagcgctggaaaatgagttcaaaaatttcagtgtaatgtcataaggatgttgggatacagagattttttttttccttggaaacaaatggactgggaagaaacacagcatggctttgctctgagtttcaatctgatgattatgaccatggaagatagtcttatgtaaaggttaaatggtgtttacaagtggatagataaggcggagatggtgagaagccgggttttctctatgctaaatgtgtctactaagagcagcacttcctactagctaagcacaatcatagccccaccgtgatgagctgctagtctgaataacattccctgacttagggaaaggcacacaaaaacatataaagaatatgtctattttcatatgtgtgatactgacagagccatggtattcctaaaatataggtttctcttttttcttgtattcttagcaaattgcatttattcactacattacaaaccatcactgatgtatccaaaatagcacacatagttcagtatgaaaataagagaataaaatctgttataagcaagtgatttaggtattttcttttgtgtttatgcattatctgactatattaaaacctgtttttctatttaccttctatcagttttctctaccaattatgttttttcaatgctctataagaatgaatatggaaattatatttcttttttctgtaaaagagttgcaactactttattatatttagaaatccaataaacttcttattacattta

SEQ ID NO: 16279 - DNA, 502 bp, Homo sapiens
  source 1..502: mol_type = unassigned DNA
actttttgtctgtgggttcgttcccgggtcccgcgcgagctttcccgggataagtagctttagcgatcgggagacagccgggcgctgcaaggtgggaactttgaggctcagagacagagcagaagacagaacctggtcttctgattccctgtgttctgcttttttcattgttccactggacgctcatcagagggaagatctttttcctcaattgattccaacaatgtctcacccatcttggctgccacccaaaagcactggtgagcccctcggccatgtgcctgcacggatggagaccacccattcctttgggaaccccagcatttcagtgtctacacaacagccacccaaaaagtttgccccggtagttgctccaaaacctaagtacaacccatacaaacaacctggaggtgagggtgattttcttccacccccacctccacctctagatgattccagtgcccttccatctatctctggaaactttcctcctccaccacct

SEQ ID NO: 16280 - DNA, 612 bp, Homo sapiens
  source 1..612: mol_type = unassigned DNA
ggggaggaaggagggggaaaggcaccaaccagcagccgctccagccctgccgaagtttcactttttgtctgtgggttcgttcccgggtcccgcgcgagctttcccgggataagtagctttagcgatcgggagacagccgggcgctgcaagattccaacaatgtctcacccatcttggctgccacccaaaagcactggtgagcccctcggccatgtgcctgcacggatggagaccacccattcctttgggaaccccagcatttcagtgtctacacaacagccacccaaaaagtttgccccggtagttgctccaaaacctaagtacaacccatacaaacaacctggaggtgagggtgattttcttccacccccacctccacctctagatgattccagtgcccttccatctatctctggaaactttcctcctccaccacctcttgatgaagaggctttcaaagtacaggggaatcccggaggcaagacacttgaggagaggcgctccagcctggacgctgagattgactccttgaccagcatcttggctgaccttgagtgcagctccccctataagcctcggcctccacagagctccactggttcaacagcctct

SEQ ID NO: 16281 - DNA, 535 bp, Homo sapiens
  source 1..535: mol_type = unassigned DNA
cccaccctgcccccacccttcccccttcattcctctgtcccttgttctggaagctgaggcgagaatgtctcagttctgttcccttcaggcttcgagaccaccgccttgctgtgtcccgtagtggactgagggcctgcaagagggagtgagggctagtggagggccagctgcctgtgggggctggacatcgtattccaacaatgtctcacccatcttggctgccacccaaaagcactggtgagcccctcggccatgtgcctgcacggatggagaccacccattcctttgggaaccccagcatttcagtgtctacacaacagccacccaaaaagtttgccccggtagttgctccaaaacctaagtacaacccatacaaacaacctggaggtgagggtgattttcttccacccccacctccacctctagatgattccagtgcccttccatctatctctggaaactttcctcctccaccacctcttgatgaagaggctttcaaagtacaggggaatcccggaggcaagacacttgagga

SEQ ID NO: 16282 - DNA, 386 bp, Homo sapiens
  source 1..386: mol_type = unassigned DNA
aggaattgaagagaatcctgacaagtggcatgttgggaaaggcctgaaggaagccagaccagcttgctctcagagctccttgggtcccctgcggcccccaggtgatcttcagcaagacctgcattgcagttggctgaaccttgtgtcaaccatccattccaggagccagctatctgagattccaacaatgtctcacccatcttggctgccacccaaaagcactggtgagcccctcggccatgtgcctgcacggatggagaccacccattcctttgggaaccccagcatttcagtgtctacacaacagccacccaaaaagtttgccccggtagttgctccaaaacctaagtacaacccatacaaacaacctggaggtgagggtgatt

SEQ ID NO: 16283 - DNA, 521 bp, Homo sapiens
  source 1..521: mol_type = unassigned DNA
gaggaaggagggggaaaggcaccaaccagcagccgctccagccctgccgaagtttcactttttgtctgtgggttcgttcccgggtcccgcgcgagctttcccgggataagtagctttagcgatcgggagacagccgggcgctgcaaggtgggaactttgaggctcagagacagagcagaagacagaacctggtcttctgattccctgtgttctgcttttttcattgttccactggacgctcatcagagggaagatctttttcctcaattgggacatggatgaacctggaaaccatcattctcagcaaactatcgcaaggacagaaaaccaaagaccgcatgttcttactcacagattccaacaatgtctcacccatcttggctgccacccaaaagcactggtgagcccctcggccatgtgcctgcacggatggagaccacccattcctttgggaaccccagcatttcagtgtctacacaacagccacccaaaaagtttgccccggtagttgctccaaaacc

SEQ ID NO: 16284 - DNA, 400 bp, Homo sapiens
  source 1..400: mol_type = unassigned DNA
aatgtctcagttctgttcccttcaggcttcgagaccaccgccttgctgtgtcccgtagtggactgagggcctgcaagagggagtgagggctagtggagggccagctgcctgtgggggctggacatcgtgtgggaactttgaggctcagagacagagcagaagacagaacctggtcttctgattccctgtgttctgcttttttcattgttccactggacgctcatcagagggaagatctttttcctcaattgattccaacaatgtctcacccatcttggctgccacccaaaagcactggtgagcccctcggccatgtgcctgcacggatggagaccacccattcctttgggaaccccagcatttcagtgtctacacaacagccacccaaaaagtttgcccc

SEQ ID NO: 16285 - DNA, 5835 bp, Homo sapiens
  source 1..5835: mol_type = unassigned DNA
atttctcttccgagagcttcagtttcctcacgtgccaagcggacgggttggaagttggtctttgccagctctgacaccttcattgcagttggctgaaccttgtgtcaaccatccattccaggagccagctatctgagattccaacaatgtctcacccatcttggctgccacccaaaagcactggtgagcccctcggccatgtgcctgcacggatggagaccacccattcctttgggaaccccagcatttcagtgtctacacaacagccacccaaaaagtttgccccggtagttgctccaaaacctaagtacaacccatacaaacaacctggaggtgagggtgattttcttccacccccacctccacctctagatgattccagtgcccttccatctatctctggaaactttcctcctccaccacctcttgatgaagaggctttcaaagtacaggggaatcccggaggcaagacacttgaggagaggcgctccagcctggacgctgagattgactccttgaccagcatcttggctgaccttgagtgcagctccccctataagcctcggcctccacagagctccactggttcaacagcctctcctccagtttcgaccccagtcacaggacacaagagaatggtcatcccgaaccaaccccctctaacagcaaccaagaagtctacattgaaaccacagcctgcaccccaggctggacccatccctgtggctccaatcggaacactcaaaccccagcctcagccagtcccagcctcctacaccacggcctccacttcttcaaggcctacctttaatgtgcaggtgaagtcagcccagcccagccctcattatatggctgccccttcatcaggacaaatttatggctcagggccccagggctataacactcagccagttcctgtctctgggcagtgtccacctccttcaacacggggaggcatggattatgcctacattccaccaccaggacttcagccggagcctgggtatgggtatgcccccaaccagggacgctattatgaaggctactatgcagcagggccaggctatgggggcagaaatgactctgaccctacctatggtcaacaaggtcacccaaatacctggaaacgggaaccagggtacactcctcctggagcagggaaccagaaccctcctgggatgtatccagtcactggtcccaagaagacctatatcacagatcctgtttcagccccctgtgcgccaccattgcagccaaagggtggccattcagggcaactggggccttcgtcagttgccccttcattccgcccagaggatgagcttgagcacctgaccaaaaagatgctgtatgacatggaaaatccacctgctgacgaatactttggtgagtggggcctagagctgacttctgaagtaactatcttgctctgatttccttccttagtaattggaactattatcagctccactggtaaagtatttgagtccagatgcatgagagttgatatacatccccgcacaactaagtaattgtaggatttgcatttgcaagactgccatagatgtgatgtctacttagcttatactaaaatttcagtggtccttagagtttccttagatacaaattttattgttgagacttattttttaccagtctaggcaacatggggagaccctgtctccattaaaaatacaaaaattagctgagtgtggtggcatgtgcctgcagtcccagctactcagaaggctgaggctggagaatcacctgagcctgggaggtcgaggctgcagtgagctgtggctcagtgagctgtggttgtgccactgcactccagcctggacaacagagtgagaccctgtttttttgttttttgtttttgtttttgttttttgttttaaaaaagaagacattttttgacaacttattagcttcccattaggcagaaataggatttctgtgtatgttcccatttctcactggtctaaagattcaagtaaaaaatgtggaattggatattgtctgatatccaatttccagattgtactcttaatttttttttctatctcagttgaagaaatgatgttttctttgtagttttaattttcccctcttcaaacttgttaataactaggaatggttaatccttccaatccatgaatataatgcaaatttatgaattatatgccgattgtgaggttctgtggacgcataacctgtcctcagtgaggttaaaattgttcagaaagaggtaagacaagcatacaaataattactagtctaggtagaaagtgataaaagacatgagaaggcttaggtcaattgttgcaaattttatttttattttattttattttatttatttttgagacagagccttgctctgtcacccaggctagagtatactggcgtgatcttggctcactgcaacctccacctccggattttgagcaattctcctgcctcagcctcccgagtagctgggattacaggtgcccaccgccacacctggctagtttttgtatttttagtagagacgaggtttcgccatgttggccaggctggtcttgaactcctgacctcaggtgatccacccgcctcagcctcccaaagtgctgggattacaggtgtgagccactgcgcccggccagaagttttaaaagctccatttattaggagcatccggaatactttggtaaagaattggtggcacttgaatctgagccctttaaaccagtgcctttcacattttctgtggtagaagaccattttcctcccaatctgttggagaccagtatttttgttgagtcagttaaaattaattactagggaaataaaagacacaaaataaaatggaagatgaaattttatcattattagagttaactgttaacgaattactcttttaaatttttatactagtttctaaatattaatcctttgttcctgtatttatctcatccagggtgataagcatttcttagacacccatccatggaccactttttgagtggcactgctttaaggacaaatagagaaacgacatttggggaacagtattagtaaaggcacaaagatggggaaattgcacaggatttttgcttcttcaaatattttctattttcatgtcttttttgctcctatatgggaatatgtaatgacaggtcaactgaccacaccagtccaaaaacacacagtagatgaagtaggaggtattaggatatgaaaaccctggcttttatttgtgttggggtggcagtttagcttagctaaaagagcaaaaagagtgggaatgaaacatctggttgtggtctcttctctgtccctcgctggccaagcaatactggcatgtcacccatctgcctgagccccatttcccacctcactatatcaacggttggggcaaatgttctctagcatttctttcaacagtaataagttcaatgtacaaacatccttaatctaaagtataacaataaagctaaacataaattgatggagattaacaacaatgcatggagaacagtaaaacaaaacatagaaaatccacgaaggtttctagttacatcaaaatacacaaaaagtttattaatgctcttgtcattgccatgtgaggagggtttataatggggtctaaaatacattttttaaaagtgaaaaataaggtctctgtatttaggtcctattaaaaaggaaaagctgacttaccaagtatatatgcttcaaatatcatagcaacaaaatatattgccacaaaaaaaaaactgaacatagatgctaattgcatgaatgaatatatattgaacactctgggaaacagatataaattattacctttcccttcaagaactgtccaagctctactacttagtagcttagaaaacttgaacaagtattattccctctaaaccttcatttttgttttgttttatctgtaatatgggaataataactagcttatactgttgttttaagaaatggatgaaatatttatacaaagcacttagccaagttcttggcatgtagaatatgctcaatacaatactcaaggttctcccatgctcttggggcttatagtttatttaagacataagatatgctcgttaaaaatccattaataatgctcaatttaagtttaagttcctagcaacaatagaacgtatgtcactggtaagtaatcattgccaaatggggatgaataaccatttgagaatttggaaaaatggctaacttttattgagtgcttatgatatggcagcactatattttatttacattataggaattaactcatttcactcttataggaaaacataaccctgtgaaatagatactattatcattttcagattttgaaattaaggcacagaaatattaatttgcctaatgtcaacagctaatacattgcagaactgaattagaatgcagatctgtacatttacacaccacactgtaaaagatggggaaagctagccaggctacatatttagaagagtgtttatggtggagattagctttggacagatgggaaataagagatgagcattctcttctaggtacacagaattaacaaaatataagttgaggccaggattatttaaagaaaatttacgttatgtagaaaacaaaaaaaaaagtgcctatggtaatattcaggctgctctgctaggtggtggtgggggtagatgtgggtcttacctttgaagttcttatagtctaataggatatgtgtacagagttatggtgttataagcacaaggcagaaagtgacaagtgacttaatcaatgttcaccaagtgttctttgagaattcagaaaaaggaaagagaaaatcaagagagagaaatggaaaagtatttatggaatacttagcctttgagtaagtctttaaaattgtgctaattgagatttggaagtaggaagatagtagagaagtgaagtcatttctcatgaggggagtttttgacataacagggaataaaaccactggagtgaagtgtccacgtgagaagtagcaaatattgggaaataaggttcaagtagtaggttaggaccaatctagggaaggctgtcaatgtccggctaaaggctaagaacgttattgtctataatgagcccttgcacattgagatcacatgccatgagaactgctctgtggatagtggttaaaaacatgcactccagagccaggatgcacttcttaccagcaagatgaaatcaagaggcaaaggactagtgaaaagaactgtcctttattgttccgtgctttaaacatttctcaagcaccttctctgtgcctgctactgtgctgggtgttcaggacacccaaatgcagaggctctgccctcatggggctcacgggttcctaggaaggacaagagagtcacagatgtcaaggattttagtgcagatattagcactgtgttgggtgtgactgagctgctatgtgagagtccataagtctgcctgaggatgagcggaaagaatacatagcagtgtgtttgcatcagcagggcctgacccaagagcgataaagtcttctcttcctttctgtcagagttttacctttggcctattctggactgcaaatagcattgccaagcacttcccttaaataacttctcttttttgcaggactatcctctcagccctgccaaaaccccatcacctactctttctttactactttgcctatttaatgctggaatttttatttaaactgtagctgatttactgaaggtaattaagtgctttcatgctgtagatctcctgctagactacaggctgtacttgggagtgagagtgaacaaaatgtaaataaatgatgtcaacaga

SEQ ID NO: 16286 - DNA, 343 bp, Homo sapiens
  source 1..343: mol_type = unassigned DNA
gtgggttcgttcccgggtcccgcgcgagctttcccgggataagtagctttagcgatcgggagacagccgggcgctgcaagcattgcagttggctgaaccttgtgtcaaccatccattccaggagccagctatctgagattccaacaatgtctcacccatcttggctgccacccaaaagcactggtgagcccctcggccatgtgcctgcacggatggagaccacccattcctttgggaaccccagcatttcagtgtctacacaacagccacccaaaaagtttgccccggtagttgctccaaaacctaagtacaacccatacaaacaacctggaggtgagggtga

SEQ ID NO: 16287 - DNA, 479 bp, Homo sapiens
  source 1..479: mol_type = unassigned DNA
gatgggtatttgctttcatttctaatgaaatttcaggcctctagggtaggatatcaaaattggtagatcatttgcaatttattttatcccaaacacctcactttacagtcagagaaactgaggcccagagaagtaaaatgagttgctcaaggtctcagagagcaagaaatagagatgggacttgagcacctagatctctggtattgctgtcctgtagttcatggagctggcagatggatacatctgtgacctgggatgatggagagactgctggacccttcagaggatctcatctcaagattccaacaatgtctcacccatcttggctgccacccaaaagcactggtgagcccctcggccatgtgcctgcacggatggagaccacccattcctttgggaaccccagcatttcagtgtctacacaacagccacccaaaaagtttgccccggtagttgctccaaaacctaagtacaaccca

SEQ ID NO: 16288 - DNA, 18221 bp, Homo sapiens
  source 1..18221: mol_type = unassigned DNA
gtgggaactttgaggctcagagacagagcagaagacagaacctggtcttctgattccctgtgttctgcttttttcattgttccactggacgctcatcagagggaagatctttttcctcaattgcattgcagttggctgaaccttgtgtcaaccatccattccaggagccagctatctgagattccaacaatgtctcacccatcttggctgccacccaaaagcactggtgagcccctcggccatgtgcctgcacggatggagaccacccattcctttgggaaccccagcatttcagtgtctacacaacagccacccaaaaagtttgccccggtagttgctccaaaacctaagtacaacccatacaaacaacctggaggtgagggtgattttcttccacccccacctccacctctagatgattccagtgcccttccatctatctctggaaactttcctcctccaccacctcttgatgaagaggctttcaaagtacaggggaatcccggaggcaagacacttgaggagaggcgctccagcctggacgctgagattgactccttgaccagcatcttggctgaccttgagtgcagctccccctataagcctcggcctccacagagctccactggttcaacagcctctcctccagtttcgaccccagtcacaggacacaagagaatggtcatcccgaaccaaccccctctaacagcaaccaagaagtctacattgaaaccacagcctgcaccccaggctggacccatccctgtggctccaatcggaacactcaaaccccagcctcagccagtcccagcctcctacaccacggcctccacttcttcaaggcctacctttaatgtgcaggtgaagtcagcccagcccagccctcattatatggctgccccttcatcaggacaaatttatggctcagggccccagggctataacactcagccagttcctgtctctgggcagtgtccacctccttcaacacggggaggcatggattatgcctacattccaccaccaggacttcagccggagcctgggtatgggtatgcccccaaccagggacgctattatgaaggctactatgcagcagggccaggctatgggggcagaaatgactctgaccctacctatggtcaacaaggtcacccaaatacctggaaacgggaaccagggtacactcctcctggagcagggaaccagaaccctcctgggatgtatccagtcactggtcccaagaagacctatatcacagatcctgtttcagccccctgtgcgccaccattgcagccaaagggtggccattcagggcaactggggccttcgtcagttgccccttcattccgcccagaggatgagcttgagcacctgaccaaaaagatgctgtatgacatggaaaatccacctgctgacgaatactttggccgctgtgctcgctgtggagaaaacgtagttggggaaggtacaggatgcactgccatggatcaggtcttccacgtggattgttttacctgcatcatctgcaacaacaagctccgagggcagccattctatgctgtggaaaagaaagcatactgcgagccctgctacattaatactctggagcagtgcaatgtgtgttccaagcccatcatggagcggattctccgagccaccgggaaggcctatcatcctcactgtttcacctgcgtgatgtgccaccgcagcctggatgggatcccattcactgtggatgctggcgggctcattcactgcattgaggacttccacaagaaatttgccccgcgatgttctgtgtgcaaggagcctattatgccagccccgggccaggaggagactgtccgtattgtggctttggatcgagatttccatgttcactgctaccgatgcgaggattgcggtggtctcctgtctgaaggagataaccaaggctgctaccccttggatgggcacatcctctgcaagacctgcaactctgcccgcatcagggtgttgaccgccaaggcgagcactgacctttagattcagtcacctgttcagccggcactgagaagaacgaacacaagaaaaagataagaaatactagagtaaaggccatcaaactacgcgatagtctctgttcttcatctgctattaaccttgccttagaaacacataaattatgagattttttttaaaagttgttaccaaatacacatttcacattgaatcatgtaggatcttgatgggcctttgttcccaaggacttccacatttttgcacagattatgctccatcccattcacttctgcattcctgtaacttttaatccctatgtttgtctcacttttcatctggttgaatggcttttcttagtgtggtatttgctgtcacatagtttttcctgggtgagtctgccaactcacaggtgcttttaggcttgaaatctccatcctatcatttccgttttgcctgtgactgtaaagagtagccattcttttcccatgtattgaagaggatattcttctcttgctttatactactcacgtccttggggagggaaatgcacaatttttttttgttaggctgtaaagaatttaagctgtaaattacataagttagaacaagcccaaatttaatttgcaaccatcagaattcagaatctatagtgaccagtgatcaaggctaattggaaaagagttatcggcccatagctaataagtagtgacagacaaccaagcttcaatatttttctaaagaaattacaggtgggatatgctagaaaaggcattttggggttatgtttaaaaaaacattattgtcccacaatattaccttaagatttttcttttccgcactacctgaacattgtaatacagacaaacttgatttcttctagaagataacattttcaatactgtcccacttctcatcttaaaaatattgtcatgtttattctaatatccaacacaactatcaaaattgcctttttctctagaggatgaaggctgtgaaaaaaccgttcaaattctcttctttttcttttttattaccaggtccattttgcctgacaattgcaaatcagagcatacaaaataaaactgtgcagttttgtttggtttactttcaaaagagtagaaagcttgaaaagattctgaaaccacagtttcattattctcataatccttctgcaactgaaattacatattgcaggagacattttcatatcatcaatgtgacatttacaccacactttcaaagacaatcactgaaacaaaaattgtctttatgagctaaaaatatgcagaatctctgcctagaatctttattcaaacttttattagccagtgaaacacttgcttgccaactgccaagccatacttattaagttcgaacatgtttcacttaaggagagacacctagcttagtcatggcaagttgccattttgtaaactaaggattttggactgagatttcttaaatctttcttcaaatctcccacaagtatatacttttaaattatggagtattttaagtctacaaaaaggtataaataataatataatgaattcctatatacctaatacccagtttaagacaccaaatataacaagtataattacatcctccaatgtaccgtttccttattccacagatatctttttcattattgtgaagtgatgttcagatttctagttttttttctagtttttaattttaacatcagaactgaaataaaaaattatggatacgtgttttgaattgcaaactattcctcaggaattccaattaaatttattttacttgaataggaatgatcataaaagtgattctttttttgtgactagaaattcttaagccgatggtcactatagctcatccttaatgtatggctcatttgcttttgtcactaaacggttttgtgttagaaccaccaaaattatagcttttaagagcttcctttgaccactgtctttttcttaccctagttctcttatctttgatcgtatatttctcataatgtgaaatatgatgagattcacttaggggcagcatgttagttttgggaggcaatgtcaactgtgtctctgaattcctgtcttccaaattgaagccagaccatgctgatgacctcaagtagcactgactatttgacaatagggctgataatgtaatcggcttgaattttgacttagtaactttttatgtaatactttcggagaaattctctttaggacaaagcagagagtccaatttattgagggatagattgtatctcttaaagtggtcatattattattaattttgccaaaagaagaagaatttattgaatatttatactataaaatgcagtaacattctacttgcttattacatttaaatccttgtgtaactgaatgtttacatgtcaagaggaaaagctgtaagaaaatgctgtcacagacccatccctgtggcatcgtcagcagaatactgcttgcttacaatctttattatgcattcttataacataacctcagagtatctttaccaaaggtttttaaagtaaatctctttttaagatagacttattcttttataataatgaatgtgcactcatacatatgtagaaacatttagatttagagttttttttttctttcacaaggtataataaggaaaggatcctacaatattttattctagggtttcttaaatatatgatttatattactgtcttttctattaatcatttgatttaaacaatgccaagtcactcttttttagttgcatgaaattttgcctgcaacagagagaaaaagattgtattactttaatgattataatcatactgtctgctgatataatatcataattgttgtggtttaaatacataaatagtagaaaaatcagagtctataacagaaagtttgtaaaaatatactgattttgaaaagtatcaggaatataaatatttggtaattctgtgtaacaagagagacatggaaaaggaaaaaaatccactatatcatgggctctgcagaacatatcaaaataggatttcttaaatttttcaacccccagaccatactgactcaacatggagtctcactggccaagaaaattgcctttaaaactcgaaaataaggccaggtgtggtgactcacacttgtaatcccagcaatttgggaggctgagacaggaggattgcctgaggccaggagtttgacaccagcctgggcaacatagtgagaccttgtctctacaaaaaataaaataaaataaaaaccaaattagccagacatggtggcatgcgcttgtttaaaaaaacaaataaataaataatcgactcaaaaataagtcatgtgtcccagcataaggcatcaggttgttagatgctggcatctctgcagctcaaagatgtgggttctttttcttgtcattaacacattgttatttctgtaggagcaacttctctgatcaaaattacttttctgggtatgtgctgattaagggggtggacttatcaacactataattgttccctatgaaagattccacagagatgtttatggtgaggtttaaaggatatgaaactctacatttaaacaagtattttatatttgggtacagaggaagaaagagagggctttttccatggggctatagtagagagttagtggaatatagacaggactctgaaaacacaacttccagccatttttttagttagtaaaaatcctattaatgtgaaccagccaggaataacagtgttatttctattggatatggtttgggcttctcttgtcaaatctgtgtcggctgccccctgatccttccattatcaagttttgaagggtgttggggaaattatggcagctgctagggagatcagggaaacactgatgtaacctcaaagcctctcaccattcctcttggcttggaaaggctttattttttcatatacatttctagaaatattgctattctaccttagtatttcacatttgtagttcaaacaagcgattgtccatctgttgcctagagctatagtacatgtgtgttatgaatgaaatatgacagcatgttccatacccctgctttagccatctgtgggaaaccagcaaactgaaaaagacacctctgcaaaatgtgcctcaagtccatttcttgggatcgctcgtttggtgcactctcgtgggagacaatcagagaacaacatatacttgtgccttattttcaaagaatctatttacactactatgaatattccactgaagagtcaatgatgtaaatgataaccaccaaatctcaaaaatatactcaccaaaaagtaaaaaagtaaaaaaaaaaaaaaaagaaagaaagaaaagaaagagagagaagtcaacttttcatcttaatatattctagtagtatttattttttccttgtcttggaagtatctcataggtctttaaatgagtaaaacatttttatgccagaaggtgatataatggatgttagtgttttttatttgattttacagtagttttagtcagataatgaggacagagacttcaacttgattctttaccaccattcagcatattttttaattgtcttcattgtatttgcttaatagtggtccagacaagttcaaaacttgttctcagtgaggcattaatatggtgcaaccatgaatatttcaggccaagttattcacttgacagataactagaatgaaacttttctcatgaggctgttgtttggttagcatagccttatttcaaaccttaaaaagttacctgactgaagctactatgacttggtaaggattcttcctctcttgctttcttcctcccttcctttcttcctcttccttcctcctcttcttattttctttcctactttccatcctacctattagtgttgctgtacttggattttttgtaaattaaatcaatgcattatgattttagggaattatgattatattcataaggggaaggctaccagaaaatatatgtggcatccataaaatcttcttttataggggcatattttttaggttgtatttattcgtaaagtgaaatgagataatagagtctttctgtttcatgttaatgaattttcatcagggactgaggtcatagattcttggaaaattcatttgtgactgatctagttttctcagctgtatgcaaagtaatctttcaaagactaggttaagattttttttttaagtctgaagcaatgtaaccccaaaaaattataattttaatgatggcattttattttattccattgcagcttgataactttccttatagcaaaggaataactattgtattttcagaattttaacacagattaacacttagcctgtaagactaataatatattgtaatagttgatactaaaatatttttcagcaggttggacagcaccagtttttcttagatcacagactacaggcagaatttcccttcaatccagaaaaaaggacactaatttccttttctatttaattttcctggcccttgtgcaaaaaattgtggactctatcttagttacaacatgcatgtcccttattttgtggagagctgtgtgaaagatgcgttttttttctttttttcttttttttttttttgagacggagtctggctctgtcacccaggctggagtgcaatggcacgatctcctctcactgcaagctccgcctcccaggttcacgccattctcctgtctcagcctcccgagtagctgggactacaggcgcctgccaccacgcccggctaatttttttgtatttttagtagagatggagtttcacagtgttagccaggatggcctcgatctcctgacctcgtgatccacccgcctcggcctcccaaagtgctgggattacaggcgtgagccaccgtgccccgcgtgtttttttctttagctgattgacaggtccccttcaaagttacaaaaaaaagtgctaatttttgctgttaaattctggttgttatttaattgacagaagtctcttgatgcacgaataaatatctctacatctagcctttgttaaaaataaaaattaatattctacaaacacctacatatactagagaggggtgaaacactgcagctaattcctttataatactttcagatgattgcattaagcctttcatgttatgtggcattgttaatttttcctagatacccatccacttaagggccagagaaatccttattcatttaactctggtgggcatttatgtaacatacccaaataaaaacgttattaaacagccacaatcgcattcagtcaacttggcactgaatgtagcttctaaaatcagttctctaccctacgaatggaatgttctaccaagaaagagaagcatcaccatgtcatcttgtgttctacaccactatagagagttacagttgcccccaaacacgaatgctattcccaaataaaatagaatcatgctttgggaggccaaggcgggccgatcacgaggtcaggagatcgagaccatcctggctaacacggtgaaaccccgtctctactaaaaaaaaaaaaaaatacaaaaaattagcctggctcagtggcgggcgcctgtagtcccagctactcaggaggctgaggcaggagaatggcgtgaacccgggaagcggagctttcagtgagccgagatagcgccactgcagtccggcctgggcgaaagagcgagactccgtctcaaaaaaaaaaaaaaaaaaataggatcatggcccttttaaagatctgaatcttctctgttattttcctgatgaatcaccatcccatatcttcttagtcctggccagtatgtagttgcgctcacatacgtctattctagctctgtagctccacaaaacaagtcttaagtccaaatctttgcctcttcatgtctgatatcaccaactcattcagcttttcttcacttattgacatagtgtcatgtcctatcactctctgctgcttctttaaacagtggacacaaacatattttctaattttcagtgtactcagtgaaacttggcagttcaccatgagtcaggctaggttgaaaggctttctttagggttgaaagtaaacgaaattggaatcacccaaagagaatttccccaaaaaacctcagacccagaagtgtaaaagctacagaaggatagaactcccatgtctacagacagttctgttactttttgttctgtactattttggatgttgccaaaatcaaattcatcctgaaaacaggaagcaagctaatgcatatgccatccatgagattcccacttctgggtcagttcatattccattcaaccttttccttttatccttgtcttcttcagaataagacatttttcctccatattttcatattaaatattaacactttataggttctactttaatatatggacactttacaggttatacataaatatttgctggttgattgatttcgagattcattcattctgtgctcaaatatttgtacctagagacgttacatgttagaaaaagtgagcagcttctttctctaatcatttaggagtccatatttttcttttctttttgttctcccaacatccttatctcttactcagctcttcaatttataattaccaaataatcactgttagagaatcagcccctaagtaactttgattctggccaactgtaataagatccaaccacttaaatctgtacttactcaataggaaggaatgtgacatcaggaagagtcattccagtgacattagtaagactttatggagtacataaaatttgataagaaatcttgagctgattctttgacttgatttagaagttgagaaaagagtatttaaggcacaacagggaaacatgggctatactcagagaagaccctctgcattggccaaaatatcatggattctggaaattccttcttaacagaaaaaaaaggcttccaaataatcaggctgaatgggaagaaaaaggcatagaggaagcctgaggaagtatttacttgcttttcccatctctttataattggaagagaagatgatctgccaaaatataacccagcatgcacagtatggacaggaagcagccctccatgaactttattatcacagaatatgagcattcttattgatccacagctacatcttctattcttgcagcaagggtacatgtcctttgaccctccacaaaagaacaagcaggacatctctattttcctattgagtctgagtccattattagaaaggacttcccagccatcttttctacttggtattaaaattcccttacagattcattgctaagtgccaattctttttttttcttttgagacggagtcttgctctgtcgcccaggctggagtgcagtggcgcaatctcggctcactgcaagctccgcttctcgggttcacgccattctcctgcctcagcctcccgagtagctgggactacagacgcccgccaccgcgcccagctaattttttttgtacttttagtagagacggggtttcaccgtggtctcgatctcctgacctcgtgatccgcccgcctcggcctcccaaagtgccaattctgactctacttaaacatcacctgtatcagggagctcattattccttgaggtcttacatttctttcagcacattttgttccaagctacacgactttaaaacagagccagcctttggggcatatgttctctttggtgccacacaaaacctgtagtacatgatacagtgttgcttcccccctccttttccttccatatatatttgttttgttttgggcattgcattacttttttgaatttttaagaatctctaaaattagtctgaaggatgttctgagggccagacattagaatttgtgagtttttttgttgctggttgtactttcctatttagaagacagaccgttctgacagttgttgtgtagcttcatgccttccccagtaactaacccatgaacagtacaccccttttatctgacttgttgataatgaccttaaaaatgttaggaaatgggccgggcgcggtggctcgtgcctgtaatccagcactttgggaggccgaggcgagcggatcatgaggtcaagagatcgagaccatcctggtcaacatggtgaaaccccgactctactaaaaaaaatacaaaaattagccgggcgtgttggcgggcgcctgtagtcccaactacttgggaggctgaggcaggagaatcacctgaacccaggaggcagaggttgcagtgagcagagattgcgccactgcactccagcctgggcgacagaacgagactccgtctcaaaaaaaaaaaaaaaaaaaaaaggttgggaaatattggtgtataatccccatgtctaacaaggaagaagtcaaaagcaaaagatagtggtattgccgaaaactcattatttctagttagttcatctgtggaaaaggatatcgttcttgaggagaggggttctattatgctatagttttctatggaaatgtacaaatgctttcctcattgctctggatgactatttagtttaaataatatacctttgtcatggggaagaccatgattgtggcttcttctaccccaactttgaatgagagagcactgtaagcagaaactgccatcagtctcctgggcaggacctggaggtaactttctgagctgtaaaatagtaattcctaagagagcttacaaactgcttccacacagaaaatagcgcagggaggacagttattagtacccctattctagaagagaaagctgaggctcaagccattaagtgacttgccaaaagctgtgacatagctgggaagtggcagatttggggatataaccaggtcttgcaagtccagtgctgtctccaaagtagccacgctcacagctgagaacaccttagaggacaatatcgacttcttacagactaccaagcccccagtcatccagggaaattcagagaccaattgactgccaggtggcaaatccacatgtgtactgcggtctttagagatcatttagagcttgcacacatctgtgtcttcttgtgggaaacctctaggtattctgtctgatcagcactgtgaggaagttggtgggaaaaggccactgataagaacaaacaatgggcagaaggaagcacattgcaataaatttccccagagagagttcctttacattccattcaccaaaaacctctctggaactgtcaggttcagaatatcaaccaagaccatatcatttagaattcattggcatgtagaggtgactcgattcctaaaagaagcctctctcccatgaaccacgatgtacgttccacagaggcagaaaccgccgtaggttagcaatgcattttagtctttctctccattcacatttactgagagcacaccacgtgcatgttgctgcaacaggcatttccgatagagccgatccatgagctaacaatgtctgaaaacaaatgttatggaactgttggcatttctgagatttggcctttgccatttgatagactttgcttcccaggatgctgtcattttgtgattttttataattacaaggaatttggtaccatgttgttttcaaaaaacctcctagaaagtctccatgtatgctctagaagttgctctacgtaacagttcagcaagcaagtgttccttctcttgagctgcgtccctcaggaagctgtacctttagggtgtgctttccactttttatttcctctcatttcactcctttcattgtttgctatatcctaaaatatgtgaagtgagagaaaaaatatcatttcttctcattaaatctcctgcattaaatctaagaatcctttaaaataatcacacctgataagtgttttatgcatttccctccctggagtgttatcatccatcaagccagtatcatcatccacctgcttattccttgggactaatgagagccaagttaaatagcaaatgacttctcaccccttcctagtcctcatgcctgaggaataagggcgacattaatgggagcgggagagtggtggctttggttgagatgcacgttcacagactagaaaagtgcctcacctccatggtgtatatgtgccaccttttcttaatccagtctatcattgttggacatttgggttggttccaagtctttgctattgtgaatagtgccgcaataaacataagtgtgcatgtgtctttatagcagcatgatttataatcctttgggtatatacccagtaatgggatggctgggtcaaatggtatttctagttctagatccctgaggaatctccacactgacttccacaatggttgaactagttcacagtcccaccaacagtgtaaaagtgttcttatttctccacatcctctccagcacctgttgtttcctgactttttaatgattgccattctaactggtgtgagatggtatctcatagtggttttgatttgcatttctctgatggccagtgatggtgagcattttttcatgtgtttcttggctgcataaatgtcttcttttgagaagtgtctgttcaatactatgcagccataaaaaatgatgagttcatgtcctttgtagggacatggatgaaattggaaatcatcattctcagtaaactatctcaaggacaaaaaaccaaacaccacatgttctcactcacaggtgggaattgaacaatgagaacacatggacacaggaaggggaacatcacactctggggactgttgtggggtggagggaggagggagggatagcattaggagatatacctaatgctaaatgacgagttaatgggtgcagcacaccagcatggcacatgtatacatatgtaactaacctgcacattgtgcacatgtaccctaaaacttaaagtataataataatgaaataaaattaaaaaaaaaaaagaaaagtgcctcacctccctgtgaggcttgatgaatattgtggccagtgagtggaaaatgattcttgtcgaatagacagagtattcccaccccaggaatggattaatagaagacacaatttgagcacttctcagaattatctagtatgcctgagtagagactcacatgggtggaatctgtgttgtctcatcagagggaataaaaagacaatgaggtggtaaatgtgaaaaaagcagccttttagaaaaacattattttcaaatacctttataaatcatctaatttatcttcacataatataaagaaaaaactaataaaaattttcgtatttcactttacataatatgttctcccatatttagggatcatacaattgtattgtcttcaaaacacacacacacacacatacacacacacacacacacacacacacaccccttccaagaaagctgatccttcagaaaataaatcttatttttaagcacttgggttttcaggccagaaaattaataaatcctaaacctgacccatttttgtaacagctaaaaaggagaagaaaaagctagttaaattttgtgtggatccatttatctcttaaaatatgccaaagcaatttgaggtgggggtggaaacaggtatttatctctcatgcgtgattctctctttatatttctatctgttgggaaaagggtaaagaactattcttggtcattattgatgtattgtgttgccactttgtatggtgcctgctgtgctttatcccgaggcatagcagtaatcgttactatcttgactctttccttcatcacaagagagtaaatatgaagtctgaatgtcgttcctcacccccaaattgtttaactctgcttccaaactagtttaagaaatgcaaaatgggaagagctagcttttcttagatacatttcttccttttttattctttcttgggagacgttaagtataaaagggaaaaagtcagttccttcttctctctctttctctttgggtgacagcaatgctcacttagtaattataaactggaaataggagagtagcttgagcaggttatgatatatctgcccaatgtgtttcattccttcaaacataaactttgagagtaaaagagatttttataatttaaatgccaacgacaggaatggcctcatgttttaactttcaaataataaatggggagttggtatttgggcagagtttgcattttactaatcctatatactttgagcttagtttttagaattgtgtcaaatacatcaacatatcaggattatagtgccaaaaatagttaaagtgccttggtcctccctctgtaggcagcaaattgaaactaacatgggaccatgccatccttctagcataatggagaagtctgaactgaggagtatctttgatgaaagacatttaggaccctagaaactaaatcttgtcaccaagactttatagtaaagtagtagcaaaattatttttaaaagactttcttccttttactacccatttcctctcttgggaaagctgatgagcaaattatccaagactcatttctttattaggcaaagtcagaatatttcccctctgaaaatctgaattatgccctcattctttttcaagaaatatctcaaagagcaaatagaattaaacatgacacttgattgtctgattatttggcatgtataaaattatcatgtggcttaatgtgccttaagtgaaaatttaaacttagacctgaaacctttacagttggatgtagcgttgagcttttgcatgttttctgtataataaaccacttttgttttgtttgttttgtcttttaacctacacctttatcattactctaacagatttagggcttctctttctctacagctaagtaagggaatatgtgcaattatgagacatacaaaaaaggaaagggaaaggactttctaagtagcaaatctgtgccatgaagtagatgtggcgtgaagatacagagcctgaggatagtaattttccctgagccacgcacacaggcttttatttcatgccttttctctttctgtgccgtcacctttgagaaaaacgattgcaccttctccaagtctgcctttttaacagctacagttaagttggcaagacttccccagctctgaatatagccatttgccgactccggcctctttgcgagactgactcaaatctgtgatcttctgttcagcatacacatcagcaaagtgagaagatgagcactaaatataggctctattaactttacttttagatttactgccttcaaaaagtgcctattctgagcaacataaacgttattccttacatatgtatgtacacacggtacccagagtcgtactgtgcagccttcaaaaacataccatcagaaagagtaggtgctgagataaggaaactttgccaaatgaaagaaagtcactcacttccaatatcccctctcaagcggctaccgtgaaacgggctgcaaacacattccctgagcatcccttgctgatacagcttctttatatttatatcctactggatggtagcatattgctaaggtttcctgtactctgcttcaagggaatgtaagctttatggcattgaaacatttagggaaaaaaaagatgtttaagagaattaatagagccgtagtctgtattaggatgtgtgtcatatgtgtgttctataaactaagcatcggtgggtttagagtgttaaagtgtcagcacattccttctccttttgtctctcaggctaacatgagagaaaatagaaaagtcttggctgtggggattggaagctcagggggccaaatgtccttgccagatccttagagcattactttgactcctaaaaatagtagtgtatgttatttgatggcttttgtttccatagttccatcactgacaaaactgtcaatactgttgatggagcagcagcatagcctagagtgatgcattcttacccagaggtggcaataggagagggtccatgtaaataggacgaggtagacagtgcatgattgtaggagaagggttgaagggaggacatgattccaaaaaagatcgttctcaatgtgtcgtctgactcaaccagctggcagattacacttgccaagtcgttccctttccttctaagtcagttggctccatattcacttgaatatgcctctgtttgggcaaagcaagatacctccacttaacctttatccaaggaagctcttggtgtcctcttggtcataaagttgtctcctacctaacccagttttaccaaatggaagtaaaaggggacaaactatggaagatggactccatgccattgcagtcagccaccattctcttttccatataaggagccccattacataagctacgggtgaggttggaacagctatgtttcataatttcaagagtgtgaccaccctgctctagtcatcatcattggatgaatccagttgactctttggcaaaagggtgatacttttcactaaaaatgcctactcttcctgttgatgttccttttctgtttttaccttgtccaatttccacactagtcattttttttattttttagaggatcagattttagcgctggaaaatgagttcaaaaatttcagtgtaatgtcataaggatgttgggatacagagattttttttttccttggaaacaaatggactgggaagaaacacagcatggctttgctctgagtttcaatctgatgattatgaccatggaagatagtcttatgtaaaggttaaatggtgtttacaagtggatagataaggcggagatggtgagaagccgggttttctctatgctaaatgtgtctactaagagcagcacttcctactagctaagcacaatcatagccccaccgtgatgagctgctagtctgaataacattccctgacttagggaaaggcacacaaaaacatataaagaatatgtctattttcatatgtgtgatactgacagagccatggtattcctaaaatataggtttctcttttttcttgtattcttagcaaattgcatttattcactacattacaaaccatcactgatgtatccaaaatagcacacatagttcagtatgaaaataagagaataaaatctgttataagcaagtgatttaggtattttcttttgtgtttatgcattatctgactatattaaaacctgtttttctatttaccttctatcagttttctctaccaattatgttttttcaatgctctataagaatgaatatggaaattatatttcttttttctgtaaaagagttgcaactactttattatatttagaaatccaataaacttcttattacattta

SEQ ID NO: 16289 - DNA, 3526 bp, Homo sapiens
  source 1..3526: mol_type = unassigned DNA
attcgccatcattttgcacactgcgaggggctccgtgtgtgcgccctgtcttgtctggccgtcctcatcccttcccccaccccctgccgccactccgacccgctcccaaagtggcttcacaatagtcggtcctcggcggtgtaggctgcgcaccaggtccacacttaagcgaaatcaaggagacccccttctacttctacctttgggtttggtgctcaatgcgaagctgctgcaactcagacacgcctaagtcaactcatgcagaaaaaggagaaaagttttggtatacaaatgctctcagtccagccagacaccaagccgaaaggttgtgctggctgcaaccgaaagatcaaggaccggtatcttctaaaggcactggacaaatactggcatgaagactgcctgaagtgtgcctgctgtgactgtcgcttgggagaggtgggctccaccctgtacactaaagctaatcttatcctttgtcgcagagactatctgaggctctttggtgtaacgggaaactgcgctgcctgtagtaagctcatccctgcctttgagatggtgatgcgtgccaaggacaatgtttaccacctggactgctttgcatgtcagctttgtaatcagagattttgtgttggagacaaatttttcctaaagaataacatgatcctttgccagacggactacgaggaaggtttaatgaaagaaggttatgcaccccaggttcgctgatctatcaacatcaccccattaagaatacaaagcactacattcttttatcttttttgctccacatgtacataagaattgacacaggaacctactgaatagcgtagatataggaaggcaggatggttatatggaataaaaggcggactgcatctgtatgtagtgaaattgccccagttcagagttgaatgtttattattaaagaaaaaagtaatgtacatatggctggatttttttgcttgctattcgtttttgtgtcacttggcatgagatgtttattttggactattgtatataatgtattgtaatatttgaagcacaaatgtaatacagttttattgtgttaccatttgtgttccatttgcttctttgtattgttgcatttagtacaatcagtgtttaaacttactgtatatttatgctttctgtatttaccagctattttaaatgagctgtaactttctagtaaagaattgaaaagcaaatctcactaatgatacacagatagataaagcaagtctatcaacattaaaaatactaaaaaataaagacacacacagagcattttagtgacatccactacttattgccgctatgagttagagtctatcagtgttcttgttataaccccctattttcagggggttaaaaatcagctttaaaaaaatacataaaaatttcatcttaaagcactttcattttataccaacgtgaaaagtgccatttttagaataactttaaagcttaacaggtttccttttaatatcctttttttgtgtgctctttacttacacaatggctttgttttgctttttcagccacaccccttatgtgaactagtgcctttgggtatcacgtaaaattttttccaaagggttactttaaaaatctgttaccacaattatgagatgatttttaagtgataaattaaacttcttcttgtataaattctgcccagatctctccacaagagctgagggtttcataactttatggcttaataaatgtatgacactgaaaagatttgagtgtgaatctactgaaatcactataatgcacattgaagctatgatggtatttgagtagtgaggttacttttgatcggagcaacataatgctcatagaatcttctagaagaagagaaacaaagggattgataaaatgctgagaactagtgattatatatttttctgtatttacctgacatttattttaatgttcaaaaagtaaacactttaagtttgatgtgttttactctctcattgttttaagtaattgccaactcagaatacatcattcttaggctgaaatttgtctttccattttttaaggtgaaatagtactaccttacgtgatagcatacaaagaagaaagctctagaaagagaaattatggagaatgattatttaaattacaattaaggaaatgagaatatgatcccctcttccgagttgcccacaaacttgcttctttgcttttgctccctgtaatagaactacttttcaacaaatctaattttgcacggcaccgttaaccatattttcactacagcaaacttagtgctatgggttttctttttctttgtttttttcttgatcacttgtataggaaacaatattttccagtgttatttgcatatatattttgtccttccaatatatgcattacagatgaaaattaaatgttatacctgaattcttgggttggggccaaaatattaagctgaaaataatgctggtgtggatttgttttaaaacaaagctttattatgaacatgcatgtgaatctggatattgcctcttatttttaagaaaatggttctgtgaaaagtgaatgatatgtatttttccaaatgcttcatggttaggagtcttcaagttccatgttccccagatttgagatatactaaagaaagaaattcaaaagtagctatttggggcccacaaaaataactattattttagccttagagccttacacttgtttcatgaagagaaaggacttgcataaccaaaataaacaaagcaagacaaattaaaaatatgtgggggagagatcagtgaaaagtggttttcttaatgcagccctgctggtccccattaacaattgcttgaaattcacatggatgtaaaattataattgtcaggatcttattcagatgatcttttaaggtttaactggttttgcttttgtttatctatatgtcaaaatacttgtaaattgggaacaaacttctctcagcttcttgaagttgttcaactatccttgccactggaagaccaaacaaggttttcactgctttttcttttacataatatgctgagaattatttcttatgctttttactacaaacaaaattactcacctggattaaagattaaggccttaatctgtttagattatctttaatctccatgaaatcgtgaaataagacaagaatagtgtttcagctgtaggccattttacagctaattgcccataaattgtagcatttattgacctgaagtactaagctaattgtcttgactactcaaagcccctgaattgttgtcaactttcccctttgtgttgtgtagccctaacgtcatttagcttgttgtctgatgcctccagtaggacacctccgatggagctttgatttctgagcagcgaaagctcccttcctaagatgcatctcgcataggctgcctatgatgaaggaccgtgcacctccactccaacagagtgctgagtttaaaagttgacctgtgtttgtaatttcactttcatcttgcttaataaatatctgctggattctttc

SEQ ID NO: 16290 - DNA, 3759 bp, Homo sapiens
  source 1..3759: mol_type = unassigned DNA
atatcctaatagattgagattcaaactgatgcagcacattttttacggggactactcagattgctgttatgaaatacaagtcagatttatgatctttttcatattgaacatgatatgctatgctaacgctgcatgtgacagtttaatcaaatccatttgttaccaggaagctaaaaggggccgctgggattttaggattacgggcagagttagggaagcatgtggctttgtcattcgccatcattttgcacactgcgaggggctccgtgtgtgcgccctgtcttgtctggccgtcctcatcccttcccccaccccctgccgccactccgacccgctcccaaagtggcttcacaatagtcggtcctcggcggtgtaggctgcgcaccaggtccacacttaagcgaaatcaaggagacccccttctacttctacctttgggtttggtgctcaatgcgaagctgctgcaactcagacacgcctaagtcaactcatgcagaaaaaggagaaaagttttggtatacaaatgctctcagtccagccagacaccaagccgaaaggttgtgctggctgcaaccgaaagatcaaggaccggtatcttctaaaggcactggacaaatactggcatgaagactgcctgaagtgtgcctgctgtgactgtcgcttgggagaggtgggctccaccctgtacactaaagctaatcttatcctttgtcgcagagactatctgaggctctttggtgtaacgggaaactgcgctgcctgtagtaagctcatccctgcctttgagatggtgatgcgtgccaaggacaatgtttaccacctggactgctttgcatgtcagctttgtaatcagagattttgtgttggagacaaatttttcctaaagaataacatgatcctttgccagacggactacgaggaaggtttaatgaaagaaggttatgcaccccaggttcgctgatctatcaacatcaccccattaagaatacaaagcactacattcttttatcttttttgctccacatgtacataagaattgacacaggaacctactgaatagcgtagatataggaaggcaggatggttatatggaataaaaggcggactgcatctgtatgtagtgaaattgccccagttcagagttgaatgtttattattaaagaaaaaagtaatgtacatatggctggatttttttgcttgctattcgtttttgtgtcacttggcatgagatgtttattttggactattgtatataatgtattgtaatatttgaagcacaaatgtaatacagttttattgtgttaccatttgtgttccatttgcttctttgtattgttgcatttagtacaatcagtgtttaaacttactgtatatttatgctttctgtatttaccagctattttaaatgagctgtaactttctagtaaagaattgaaaagcaaatctcactaatgatacacagatagataaagcaagtctatcaacattaaaaatactaaaaaataaagacacacacagagcattttagtgacatccactacttattgccgctatgagttagagtctatcagtgttcttgttataaccccctattttcagggggttaaaaatcagctttaaaaaaatacataaaaatttcatcttaaagcactttcattttataccaacgtgaaaagtgccatttttagaataactttaaagcttaacaggtttccttttaatatcctttttttgtgtgctctttacttacacaatggctttgttttgctttttcagccacaccccttatgtgaactagtgcctttgggtatcacgtaaaattttttccaaagggttactttaaaaatctgttaccacaattatgagatgatttttaagtgataaattaaacttcttcttgtataaattctgcccagatctctccacaagagctgagggtttcataactttatggcttaataaatgtatgacactgaaaagatttgagtgtgaatctactgaaatcactataatgcacattgaagctatgatggtatttgagtagtgaggttacttttgatcggagcaacataatgctcatagaatcttctagaagaagagaaacaaagggattgataaaatgctgagaactagtgattatatatttttctgtatttacctgacatttattttaatgttcaaaaagtaaacactttaagtttgatgtgttttactctctcattgttttaagtaattgccaactcagaatacatcattcttaggctgaaatttgtctttccattttttaaggtgaaatagtactaccttacgtgatagcatacaaagaagaaagctctagaaagagaaattatggagaatgattatttaaattacaattaaggaaatgagaatatgatcccctcttccgagttgcccacaaacttgcttctttgcttttgctccctgtaatagaactacttttcaacaaatctaattttgcacggcaccgttaaccatattttcactacagcaaacttagtgctatgggttttctttttctttgtttttttcttgatcacttgtataggaaacaatattttccagtgttatttgcatatatattttgtccttccaatatatgcattacagatgaaaattaaatgttatacctgaattcttgggttggggccaaaatattaagctgaaaataatgctggtgtggatttgttttaaaacaaagctttattatgaacatgcatgtgaatctggatattgcctcttatttttaagaaaatggttctgtgaaaagtgaatgatatgtatttttccaaatgcttcatggttaggagtcttcaagttccatgttccccagatttgagatatactaaagaaagaaattcaaaagtagctatttggggcccacaaaaataactattattttagccttagagccttacacttgtttcatgaagagaaaggacttgcataaccaaaataaacaaagcaagacaaattaaaaatatgtgggggagagatcagtgaaaagtggttttcttaatgcagccctgctggtccccattaacaattgcttgaaattcacatggatgtaaaattataattgtcaggatcttattcagatgatcttttaaggtttaactggttttgcttttgtttatctatatgtcaaaatacttgtaaattgggaacaaacttctctcagcttcttgaagttgttcaactatccttgccactggaagaccaaacaaggttttcactgctttttcttttacataatatgctgagaattatttcttatgctttttactacaaacaaaattactcacctggattaaagattaaggccttaatctgtttagattatctttaatctccatgaaatcgtgaaataagacaagaatagtgtttcagctgtaggccattttacagctaattgcccataaattgtagcatttattgacctgaagtactaagctaattgtcttgactactcaaagcccctgaattgttgtcaactttcccctttgtgttgtgtagccctaacgtcatttagcttgttgtctgatgcctccagtaggacacctccgatggagctttgatttctgagcagcgaaagctcccttcctaagatgcatctcgcataggctgcctatgatgaaggaccgtgcacctccactccaacagagtgctgagtttaaaagttgacctgtgtttgtaatttcactttcatcttgcttaataaatatctgctggattctttca

SEQ ID NO: 16291 - DNA, 3450 bp, Homo sapiens
  source 1..3450: mol_type = unassigned DNA
gtagaacagtggggagctgtgcggatgggtgaagtgcatgtatgcctgcctagacgggccagaaaagccaaacttaagaaatctgcctatgtacagaacaagtcaactaaggggttctcattaatctaccgtctgtgaatatcgttatttttcaggtatacaaatgctctcagtccagccagacaccaagccgaaaggttgtgctggctgcaaccgaaagatcaaggaccggtatcttctaaaggcactggacaaatactggcatgaagactgcctgaagtgtgcctgctgtgactgtcgcttgggagaggtgggctccaccctgtacactaaagctaatcttatcctttgtcgcagagactatctgaggctctttggtgtaacgggaaactgcgctgcctgtagtaagctcatccctgcctttgagatggtgatgcgtgccaaggacaatgtttaccacctggactgctttgcatgtcagctttgtaatcagagattttgtgttggagacaaatttttcctaaagaataacatgatcctttgccagacggactacgaggaaggtttaatgaaagaaggttatgcaccccaggttcgctgatctatcaacatcaccccattaagaatacaaagcactacattcttttatcttttttgctccacatgtacataagaattgacacaggaacctactgaatagcgtagatataggaaggcaggatggttatatggaataaaaggcggactgcatctgtatgtagtgaaattgccccagttcagagttgaatgtttattattaaagaaaaaagtaatgtacatatggctggatttttttgcttgctattcgtttttgtgtcacttggcatgagatgtttattttggactattgtatataatgtattgtaatatttgaagcacaaatgtaatacagttttattgtgttaccatttgtgttccatttgcttctttgtattgttgcatttagtacaatcagtgtttaaacttactgtatatttatgctttctgtatttaccagctattttaaatgagctgtaactttctagtaaagaattgaaaagcaaatctcactaatgatacacagatagataaagcaagtctatcaacattaaaaatactaaaaaataaagacacacacagagcattttagtgacatccactacttattgccgctatgagttagagtctatcagtgttcttgttataaccccctattttcagggggttaaaaatcagctttaaaaaaatacataaaaatttcatcttaaagcactttcattttataccaacgtgaaaagtgccatttttagaataactttaaagcttaacaggtttccttttaatatcctttttttgtgtgctctttacttacacaatggctttgttttgctttttcagccacaccccttatgtgaactagtgcctttgggtatcacgtaaaattttttccaaagggttactttaaaaatctgttaccacaattatgagatgatttttaagtgataaattaaacttcttcttgtataaattctgcccagatctctccacaagagctgagggtttcataactttatggcttaataaatgtatgacactgaaaagatttgagtgtgaatctactgaaatcactataatgcacattgaagctatgatggtatttgagtagtgaggttacttttgatcggagcaacataatgctcatagaatcttctagaagaagagaaacaaagggattgataaaatgctgagaactagtgattatatatttttctgtatttacctgacatttattttaatgttcaaaaagtaaacactttaagtttgatgtgttttactctctcattgttttaagtaattgccaactcagaatacatcattcttaggctgaaatttgtctttccattttttaaggtgaaatagtactaccttacgtgatagcatacaaagaagaaagctctagaaagagaaattatggagaatgattatttaaattacaattaaggaaatgagaatatgatcccctcttccgagttgcccacaaacttgcttctttgcttttgctccctgtaatagaactacttttcaacaaatctaattttgcacggcaccgttaaccatattttcactacagcaaacttagtgctatgggttttctttttctttgtttttttcttgatcacttgtataggaaacaatattttccagtgttatttgcatatatattttgtccttccaatatatgcattacagatgaaaattaaatgttatacctgaattcttgggttggggccaaaatattaagctgaaaataatgctggtgtggatttgttttaaaacaaagctttattatgaacatgcatgtgaatctggatattgcctcttatttttaagaaaatggttctgtgaaaagtgaatgatatgtatttttccaaatgcttcatggttaggagtcttcaagttccatgttccccagatttgagatatactaaagaaagaaattcaaaagtagctatttggggcccacaaaaataactattattttagccttagagccttacacttgtttcatgaagagaaaggacttgcataaccaaaataaacaaagcaagacaaattaaaaatatgtgggggagagatcagtgaaaagtggttttcttaatgcagccctgctggtccccattaacaattgcttgaaattcacatggatgtaaaattataattgtcaggatcttattcagatgatcttttaaggtttaactggttttgcttttgtttatctatatgtcaaaatacttgtaaattgggaacaaacttctctcagcttcttgaagttgttcaactatccttgccactggaagaccaaacaaggttttcactgctttttcttttacataatatgctgagaattatttcttatgctttttactacaaacaaaattactcacctggattaaagattaaggccttaatctgtttagattatctttaatctccatgaaatcgtgaaataagacaagaatagtgtttcagctgtaggccattttacagctaattgcccataaattgtagcatttattgacctgaagtactaagctaattgtcttgactactcaaagcccctgaattgttgtcaactttcccctttgtgttgtgtagccctaacgtcatttagcttgttgtctgatgcctccagtaggacacctccgatggagctttgatttctgagcagcgaaagctcccttcctaagatgcatctcgcataggctgcctatgatgaaggaccgtgcacctccactccaacagagtgctgagtttaaaagttgacctgtgtttgtaatttcactttcatcttgcttaataaatatctgctggattctttcattcacttttttacatttggatttatgtttttaataaaaggggtgttacact

SEQ ID NO: 16292 - DNA, 3515 bp, Homo sapiens
  source 1..3515: mol_type = unassigned DNA
acacatactggggtgttttcagagtggctgtagcagagaggtggggtagaacagtggggagctgtgcggatgggtgaagtgcatgtatgcctgcctagacgggccagaaaagccaaacttaagaaatctgcctatgtacagaacaagtcaactaaggggttctcattaatctaccgtctgtgaatatcgttatttttcaggagaagcgctacaaagcagccactgtgcttactgaacggcctccccctgtatcgcttaattgagaaggtatacaaatgctctcagtccagccagacaccaagccgaaaggttgtgctggctgcaaccgaaagatcaaggaccggtatcttctaaaggcactggacaaatactggcatgaagactgcctgaagtgtgcctgctgtgactgtcgcttgggagaggtgggctccaccctgtacactaaagctaatcttatcctttgtcgcagagactatctgaggctctttggtgtaacgggaaactgcgctgcctgtagtaagctcatccctgcctttgagatggtgatgcgtgccaaggacaatgtttaccacctggactgctttgcatgtcagctttgtaatcagagattttgtgttggagacaaatttttcctaaagaataacatgatcctttgccagacggactacgaggaaggtttaatgaaagaaggttatgcaccccaggttcgctgatctatcaacatcaccccattaagaatacaaagcactacattcttttatcttttttgctccacatgtacataagaattgacacaggaacctactgaatagcgtagatataggaaggcaggatggttatatggaataaaaggcggactgcatctgtatgtagtgaaattgccccagttcagagttgaatgtttattattaaagaaaaaagtaatgtacatatggctggatttttttgcttgctattcgtttttgtgtcacttggcatgagatgtttattttggactattgtatataatgtattgtaatatttgaagcacaaatgtaatacagttttattgtgttaccatttgtgttccatttgcttctttgtattgttgcatttagtacaatcagtgtttaaacttactgtatatttatgctttctgtatttaccagctattttaaatgagctgtaactttctagtaaagaattgaaaagcaaatctcactaatgatacacagatagataaagcaagtctatcaacattaaaaatactaaaaaataaagacacacacagagcattttagtgacatccactacttattgccgctatgagttagagtctatcagtgttcttgttataaccccctattttcagggggttaaaaatcagctttaaaaaaatacataaaaatttcatcttaaagcactttcattttataccaacgtgaaaagtgccatttttagaataactttaaagcttaacaggtttccttttaatatcctttttttgtgtgctctttacttacacaatggctttgttttgctttttcagccacaccccttatgtgaactagtgcctttgggtatcacgtaaaattttttccaaagggttactttaaaaatctgttaccacaattatgagatgatttttaagtgataaattaaacttcttcttgtataaattctgcccagatctctccacaagagctgagggtttcataactttatggcttaataaatgtatgacactgaaaagatttgagtgtgaatctactgaaatcactataatgcacattgaagctatgatggtatttgagtagtgaggttacttttgatcggagcaacataatgctcatagaatcttctagaagaagagaaacaaagggattgataaaatgctgagaactagtgattatatatttttctgtatttacctgacatttattttaatgttcaaaaagtaaacactttaagtttgatgtgttttactctctcattgttttaagtaattgccaactcagaatacatcattcttaggctgaaatttgtctttccattttttaaggtgaaatagtactaccttacgtgatagcatacaaagaagaaagctctagaaagagaaattatggagaatgattatttaaattacaattaaggaaatgagaatatgatcccctcttccgagttgcccacaaacttgcttctttgcttttgctccctgtaatagaactacttttcaacaaatctaattttgcacggcaccgttaaccatattttcactacagcaaacttagtgctatgggttttctttttctttgtttttttcttgatcacttgtataggaaacaatattttccagtgttatttgcatatatattttgtccttccaatatatgcattacagatgaaaattaaatgttatacctgaattcttgggttggggccaaaatattaagctgaaaataatgctggtgtggatttgttttaaaacaaagctttattatgaacatgcatgtgaatctggatattgcctcttatttttaagaaaatggttctgtgaaaagtgaatgatatgtatttttccaaatgcttcatggttaggagtcttcaagttccatgttccccagatttgagatatactaaagaaagaaattcaaaagtagctatttggggcccacaaaaataactattattttagccttagagccttacacttgtttcatgaagagaaaggacttgcataaccaaaataaacaaagcaagacaaattaaaaatatgtgggggagagatcagtgaaaagtggttttcttaatgcagccctgctggtccccattaacaattgcttgaaattcacatggatgtaaaattataattgtcaggatcttattcagatgatcttttaaggtttaactggttttgcttttgtttatctatatgtcaaaatacttgtaaattgggaacaaacttctctcagcttcttgaagttgttcaactatccttgccactggaagaccaaacaaggttttcactgctttttcttttacataatatgctgagaattatttcttatgctttttactacaaacaaaattactcacctggattaaagattaaggccttaatctgtttagattatctttaatctccatgaaatcgtgaaataagacaagaatagtgtttcagctgtaggccattttacagctaattgcccataaattgtagcatttattgacctgaagtactaagctaattgtcttgactactcaaagcccctgaattgttgtcaactttcccctttgtgttgtgtagccctaacgtcatttagcttgttgtctgatgcctccagtaggacacctccgatggagctttgatttctgagcagcgaaagctcccttcctaagatgcatctcgcataggctgcctatgatgaaggaccgtgcacctccactccaacagagtgctgagtttaaaagttgacctgtgtttgtaatttcactttcatcttgcttaataaatatctgctggattctttcattca

SEQ ID NO: 16293 - DNA, 3365 bp, Homo sapiens
  source 1..3365: mol_type = unassigned DNA
gtcgactcctgcagaggtcacattttgtgtgcgggtttgtccccagcgtttgagaagcgctacaaagcagccactgtgcttactgaacggcctccccctgtatcgcttaattgagaaggtatacaaatgctctcagtccagccagacaccaagccgaaaggttgtgctggctgcaaccgaaagatcaaggaccggtatcttctaaaggcactggacaaatactggcatgaagactgcctgaagtgtgcctgctgtgactgtcgcttgggagaggtgggctccaccctgtacactaaagctaatcttatcctttgtcgcagagactatctgaggctctttggtgtaacgggaaactgcgctgcctgtagtaagctcatccctgcctttgagatggtgatgcgtgccaaggacaatgtttaccacctggactgctttgcatgtcagctttgtaatcagagattttgtgttggagacaaatttttcctaaagaataacatgatcctttgccagacggactacgaggaaggtttaatgaaagaaggttatgcaccccaggttcgctgatctatcaacatcaccccattaagaatacaaagcactacattcttttatcttttttgctccacatgtacataagaattgacacaggaacctactgaatagcgtagatataggaaggcaggatggttatatggaataaaaggcggactgcatctgtatgtagtgaaattgccccagttcagagttgaatgtttattattaaagaaaaaagtaatgtacatatggctggatttttttgcttgctattcgtttttgtgtcacttggcatgagatgtttattttggactattgtatataatgtattgtaatatttgaagcacaaatgtaatacagttttattgtgttaccatttgtgttccatttgcttctttgtattgttgcatttagtacaatcagtgtttaaacttactgtatatttatgctttctgtatttaccagctattttaaatgagctgtaactttctagtaaagaattgaaaagcaaatctcactaatgatacacagatagataaagcaagtctatcaacattaaaaatactaaaaaataaagacacacacagagcattttagtgacatccactacttattgccgctatgagttagagtctatcagtgttcttgttataaccccctattttcagggggttaaaaatcagctttaaaaaaatacataaaaatttcatcttaaagcactttcattttataccaacgtgaaaagtgccatttttagaataactttaaagcttaacaggtttccttttaatatcctttttttgtgtgctctttacttacacaatggctttgttttgctttttcagccacaccccttatgtgaactagtgcctttgggtatcacgtaaaattttttccaaagggttactttaaaaatctgttaccacaattatgagatgatttttaagtgataaattaaacttcttcttgtataaattctgcccagatctctccacaagagctgagggtttcataactttatggcttaataaatgtatgacactgaaaagatttgagtgtgaatctactgaaatcactataatgcacattgaagctatgatggtatttgagtagtgaggttacttttgatcggagcaacataatgctcatagaatcttctagaagaagagaaacaaagggattgataaaatgctgagaactagtgattatatatttttctgtatttacctgacatttattttaatgttcaaaaagtaaacactttaagtttgatgtgttttactctctcattgttttaagtaattgccaactcagaatacatcattcttaggctgaaatttgtctttccattttttaaggtgaaatagtactaccttacgtgatagcatacaaagaagaaagctctagaaagagaaattatggagaatgattatttaaattacaattaaggaaatgagaatatgatcccctcttccgagttgcccacaaacttgcttctttgcttttgctccctgtaatagaactacttttcaacaaatctaattttgcacggcaccgttaaccatattttcactacagcaaacttagtgctatgggttttctttttctttgtttttttcttgatcacttgtataggaaacaatattttccagtgttatttgcatatatattttgtccttccaatatatgcattacagatgaaaattaaatgttatacctgaattcttgggttggggccaaaatattaagctgaaaataatgctggtgtggatttgttttaaaacaaagctttattatgaacatgcatgtgaatctggatattgcctcttatttttaagaaaatggttctgtgaaaagtgaatgatatgtatttttccaaatgcttcatggttaggagtcttcaagttccatgttccccagatttgagatatactaaagaaagaaattcaaaagtagctatttggggcccacaaaaataactattattttagccttagagccttacacttgtttcatgaagagaaaggacttgcataaccaaaataaacaaagcaagacaaattaaaaatatgtgggggagagatcagtgaaaagtggttttcttaatgcagccctgctggtccccattaacaattgcttgaaattcacatggatgtaaaattataattgtcaggatcttattcagatgatcttttaaggtttaactggttttgcttttgtttatctatatgtcaaaatacttgtaaattgggaacaaacttctctcagcttcttgaagttgttcaactatccttgccactggaagaccaaacaaggttttcactgctttttcttttacataatatgctgagaattatttcttatgctttttactacaaacaaaattactcacctggattaaagattaaggccttaatctgtttagattatctttaatctccatgaaatcgtgaaataagacaagaatagtgtttcagctgtaggccattttacagctaattgcccataaattgtagcatttattgacctgaagtactaagctaattgtcttgactactcaaagcccctgaattgttgtcaactttcccctttgtgttgtgtagccctaacgtcatttagcttgttgtctgatgcctccagtaggacacctccgatggagctttgatttctgagcagcgaaagctcccttcctaagatgcatctcgcataggctgcctatgatgaaggaccgtgcacctccactccaacagagtgctgagtttaaaagttgacctgtgtttgtaatttcactttcatcttgcttaataaatatctgctggattctttcattc

SEQ ID NO: 16294 - DNA, 1016 bp, Homo sapiens
  source 1..1016: mol_type = unassigned DNA
tctgggacgccacagaaatcgtaactgaacacccgcacacaaaagtaatctgtgaggtgtgttttaaagaaagaaacagctgaaaacttgaagacgtgtttagaaatatacatatatacacactattttcttgtgggagatctcctttgggcaaaggagaagcgctacaaagcagccactgtgcttactgaacggcctccccctgtatcgcttaattgagaaggtatacaaatgctctcagtccagccagacaccaagccgaaaggttgtgctggctgcaaccgaaagatcaaggaccggtatcttctaaaggcactggacaaatactggcatgaagactgcctgaagtgtgcctgctgtgactgtcgcttgggagaggtgggctccaccctgtacactaaagctaatcttatcctttgtcgcagagactatctgaggctctttggtgtaacgggaaactgcgctgcctgtagtaagctcatccctgcctttgagatggtgatgcgtgccaaggacaatgtttaccacctggactgctttgcatgtcagctttgtaatcagagattttgtgttggagacaaatttttcctaaagaataacatgatcctttgccagacggactacgaggaaggtttaatgaaagaaggttatgcaccccaggttcgctgatctatcaacatcaccccattaagaatacaaagcactacattcttttatcttttttgctccacatgtacataagaattgacacaggaacctactgaatagcgtagatataggaaggcaggatggttatatggaataaaaggcggactgcatctgtatgtagtgaaattgccccagttcagagttgaatgtttattattaaagaaaaaagtaatgtacatatggctggatttttttgcttgctattcgtttttgtgtcacttggcatgagatgtttattttggactattgtatataatgtattgtaatatttgaagcacaaatgtaatacagttttattgtgttaccat

SEQ ID NO: 16295 - DNA, 1488 bp, Homo sapiens
  source 1..1488: mol_type = unassigned DNA
ttccccaacctctgctaatgaggcataaactggagctgcaacccagctccgcactgcaactttcactcgggctgcagctctactgagacggttttgtttaaatcatgtgaggcttcattatttttatgatgagacatgaaatagatgcaggcggaagatgttgatggaaggagggagagcggctgcggcgcggaacgtctcaagtatacaaatgctctcagtccagccagacaccaagccgaaaggttgtgctggctgcaaccgaaagatcaaggaccggtatcttctaaaggcactggacaaatactggcatgaagactgcctgaagtgtgcctgctgtgactgtcgcttgggagaggtgggctccaccctgtacactaaagctaatcttatcctttgtcgcagagactatctgaggctctttggtgtaacgggaaactgcgctgcctgtagtaagctcatccctgcctttgagatggtgatgcgtgccaaggacaatgtttaccacctggactgctttgcatgtcagctttgtaatcagagattttgtgttggagacaaatttttcctaaagaataacatgatcctttgccagacggactacgaggaaggtttaatgaaagaaggttatgcaccccaggttcgctgatctatcaacatcaccccattaagaatacaaagcactacattcttttatcttttttgctccacatgtacataagaattgacacaggaacctactgaatagcgtagatataggaaggcaggatggttatatggaataaaaggcggactgcatctgtatgtagtgaaattgccccagttcagagttgaatgtttattattaaagaaaaaagtaatgtacatatggctggatttttttgcttgctattcgtttttgtgtcacttggcatgagatgtttattttggactattgtatataatgtattgtaatatttgaagcacaaatgtaatacagttttattgtgttaccatttgtgttccatttgcttctttgtattgttgcatttagtacaatcagtgtttaaacttactgtatatttatgctttctgtatttaccagctattttaaatgagctgtaactttctagtaaagaattgaaaagcaaatctcactaatgatacacagatagataaagcaagtctatcaacattaaaaatactaaaaaataaagacacacacagagcattttagtgacatccactacttattgccgctatgagttagagtctatcagtgttcttgttataaccccctattttcagggggttaaaaatcagctttaaaaaaatacataaaaatttcatcttaaagcactttcattttataccaacgtgaaaagtgccatttttagaataactttaaagcttaacaggtttccttttaatatcctttttttgtgtgctctttacttacacaatggctttgttttgctttttcagccacaccccttatgtgaactagtg

SEQ ID NO: 16296 - DNA, 1685 bp, Homo sapiens
  source 1..1685: mol_type = unassigned DNA
cgagaggtaaatagtcttaaatcggaagggagctgcttctctgtggtcttgacaagcgctgcctgggctccgccggctcactaataactgagtgaccttttctttggctgtattatgtctggctgggaagggattgcattttgcagctgagagccggagcttccttcagctcggctcctcgcacgctgctggggtaagttgtcttgaaccaggacggagagagacagcctcggactgcagttgcctaaaaggaggacacctgtggctcagatgcggtcaacaccattgcttggcgtatccttgaggacctcattattttaaacttaaaaaaaaatagacattccctcccccgtcttttttttttttttcaaacaatgcttctttttgacctttcccaaggagaagcgctacaaagcagccactgtgcttactgaacggcctccccctgtatcgcttaattgagaaggtatacaaatgctctcagtccagccagacaccaagccgaaaggttgtgctggctgcaaccgaaagatcaaggaccggtatcttctaaaggcactggacaaatactggcatgaagactgcctgaagtgtgcctgctgtgactgtcgcttgggagaggtgggctccaccctgtacactaaagctaatcttatcctttgtcgcagagactatctgaggctctttggtgtaacgggaaactgcgctgcctgtagtaagctcatccctgcctttgagatggtgatgcgtgccaaggacaatgtttaccacctggactgctttgcatgtcagctttgtaatcagagattttgtgttggagacaaatttttcctaaagaataacatgatcctttgccagacggactacgaggaaggtttaatgaaagaaggttatgcaccccaggttcgctgatctatcaacatcaccccattaagaatacaaagcactacattcttttatcttttttgctccacatgtacataagaattgacacaggaacctactgaatagcgtagatataggaaggcaggatggttatatggaataaaaggcggactgcatctgtatgtagtgaaattgccccagttcagagttgaatgtttattattaaagaaaaaagtaatgtacatatggctggatttttttgcttgctattcgtttttgtgtcacttggcatgagatgtttattttggactattgtatataatgtattgtaatatttgaagcacaaatgtaatacagttttattgtgttaccatttgtgttccatttgcttctttgtattgttgcatttagtacaatcagtgtttaaacttactgtatatttatgctttctgtatttaccagctattttaaatgagctgtaactttctagtaaagaattgaaaagcaaatctcactaatgatacacagatagataaagcaagtctatcaacattaaaaatactaaaaaataaagacacacacagagcattttagtgacatccactacttattgccgctatgagttagagtctatcagtgttcttgttataaccccctattttcagggggttaaaaatcagctttaaaaaaatacataaaaatttcatcttaaagcactttcattttataccaacgtgaaaagtgccatttttagaataactttaaagcttaacaggtttccttttaatatcctttttttg

SEQ ID NO: 16297 - DNA, 516 bp, Homo sapiens
  source 1..516: mol_type = unassigned DNA
aatggtgcagaaactatggttctttgaccaagttagtcctgaaaacatgtttctcagtgctgttggctgtttttcattggagcgtgagaagcgctacaaagcagccactgtgcttactgaacggcctccccctgtatcgcttaattgagaaggtatacaaatgctctcagtccagccagacaccaagccgaaaggttgtgctggctgcaaccgaaagatcaaggaccggtatcttctaaaggcactggacaaatactggcatgaagactgcctgaagtgtgcctgctgtgactgtcgcttgggagaggtgggctccaccctgtacactaaagctaatcttatcctttgtcgcagagactatctgaggctctttggtgtaacgggaaactgcgctgcctgtagtaagctcatccctgcctttgagatggtgatgcgtgccaaggacaatgtttaccacctggactgctttgcatgtcagctttgtaatcagagattttgtgttggagacaaattttt

SEQ ID NO: 16298 - DNA, 622 bp, Homo sapiens
  source 1..622: mol_type = unassigned DNA
atcataagatatcagaggaaactggaggaggtttagctgttttggagaaggaaaatgtacaaaagtgcagattatagcttgacatttcttatcctataatgcatgcacatttggtgttttgtatccttctacatgcaagtttaaaactttatgcctaggagagcaaacataatgcagcagaagggtctctggactgtaagaaggccatttggctggagtctatagcgtaactgtctttcagctttgagcaagtctctgaacctctcttgggcctcggtaacataatttgtaaaatgagggaatttggaattgatgatgtctgcagtactttatagtgcttaaaatgagttatttgataaatatgaggcattggatagttggtccagcttcttgctaaagctgggtgttttaatacctaggaaataagaagacactcaaggtatacaaatgctctcagtccagccagacaccaagccgaaaggttgtgctggctgcaaccgaaagatcaaggaccggtatcttctaaaggcactggacaaatactggcatgaagactgcctgaagtgtgcctgctgtgactgtcgcttgggagaggtgggctccaccctgtacactaaagcta

SEQ ID NO: 16299 - DNA, 579 bp, Homo sapiens
  source 1..579: mol_type = unassigned DNA
ttcttctcagtgcattggctgagacagagcgcacgagacacacacacatgcatgcacacatatgcacacacacacactcacacatactggggtgttttcagagtggctgtagcagagaggtggggtagaacagtggggagctgtgcggatgggtgaagtgcatgtatgcctgcctagacgggccagaaaagccaaacttaagaaatctgcctatgtacagaacaagtcaactaaggggttctcattaatctaccgtctgtgaatatcgttatttttcaggtatacaaatgctctcagtccagccagacaccaagccgaaaggttgtgctggctgcaaccgaaagatcaaggaccggtatcttctaaaggcactggacaaatactggcatgaagactgcctgaagtgtgcctgctgtgactgtcgcttgggagaggtgggctccaccctgtacactaaagctaatcttatcctttgtcgcagagactatctgaggctctttggtgtaacgggaaactgcgctgcctgtagtaagctcatccctgcctttgagatggtgatgcgtgccaaggacaatgttt

SEQ ID NO: 16300 - DNA, 543 bp, Homo sapiens
  source 1..543: mol_type = unassigned DNA
aatgcatgcacatttggtgttttgtatccttctacatgcaagtttaaaactttatgcctaggagagcaaacataatgcagcagaagggtctctggactgtaagaaggccatttggctggagtctatagcgtaactgtctttcagctttgagcaagtctctgaacctctcttgggcctcggtatacaaatgctctcagtccagccagacaccaagccgaaaggttgtgctggctgcaaccgaaagatcaaggaccggtatcttctaaaggcactggacaaatactggcatgaagactgcctgaagtgtgcctgctgtgactgtcgcttgggagaggtgggctccaccctgtacactaaagctaatcttatcctttgtcgcagagactatctgaggctctttggtgtaacgggaaactgcgctgcctgtagtaagctcatccctgcctttgagatggtgatgcgtgccaaggacaatgtttaccacctggactgctttgcatgtcagctttgtaatcagagattttgtgttggagacaaattttt

SEQ ID NO: 16301 - DNA, 565 bp, Homo sapiens
  source 1..565: mol_type = unassigned DNA
agtatcaacctcatccttcccttgaccgagacctttcactgctcctggactttcagggtgtgctatcctttgcctccccccaacaacctgtctgctgccctaaaaaaaaaattaaaaaaaaaaaagacggcaacctaaccggagcatctctgggacgccacagaaatcgtaactgaacacccgcacacaaaagtaatctgtgaggtgtgttttaaagaaagaaacagctgaaaacttgaagacgtgtttagaaatatacatatatacacactattttcttgtgggagatctcctttgggcaaaggtatacaaatgctctcagtccagccagacaccaagccgaaaggttgtgctggctgcaaccgaaagatcaaggaccggtatcttctaaaggcactggacaaatactggcatgaagactgcctgaagtgtgcctgctgtgactgtcgcttgggagaggtgggctccaccctgtacactaaagctaatcttatcctttgtcgcagagactatctgaggctctttggtgtaacgggaaactgcgctgcctgtagtaagctcatcc

SEQ ID NO: 16302 - DNA, 1574 bp, Homo sapiens
  source 1..1574: mol_type = unassigned DNA
agatctaactgtcaatacagtgagtagagtggagtccggagaagcgctacaaagcagccactgtgcttactgaacggcctccccctgtatcgcttaattgagaaggtatacaaatgctctcagtccagccagacaccaagccgaaaggttgtgctggctgcaaccgaaagatcaaggaccggtatcttctaaaggcactggacaaatactggcatgaagactgcctgaagtgtgcctgctgtgactgtcgcttgggagaggtgggctccaccctgtacactaaagctaatcttatcctttgtcgcagagactatctgaggctctttggtgtaacgggaaactgcgctgcctgtagtaagctcatccctgcctttgagatggtgatgcgtgccaaggacaatgtttaccacctggactgctttgcatgtcagctttgtaatcagagattttgtgttggagacaaatttttcctaaagaataacatgatcctttgccagacggactacgaggaaggtttaatgaaagaaggttatgcaccccaggttcgctgatctatcaacatcaccccattaagaatacaaagcactacattcttttatcttttttgctccacatgtacataagaattgacacaggaacctactgaatagcgtagatataggaaggcaggatggttatatggaataaaaggcggactgcatctgtatgtagtgaaattgccccagttcagagttgaatgtttattattaaagaaaaaagtaatgtacatatggctggatttttttgcttgctattcgtttttgtgtcacttggcatgagatgtttattttggactattgtatataatgtattgtaatatttgaagcacaaatgtaatacagttttattgtgttaccatttgtgttccatttgcttctttgtattgttgcatttagtacaatcagtgtttaaacttactgtatatttatgctttctgtatttaccagctattttaaatgagctgtaactttctagtaaagaattgaaaagcaaatctcactaatgatacacagatagataaagcaagtctatcaacattaaaaatactaaaaaataaagacacacacagagcattttagtgacatccactacttattgccgctatgagttagagtctatcagtgttcttgttataaccccctattttcagggggttaaaaatcagctttaaaaaaatacataaaaatttcatcttaaagcactttcattttataccaacgtgaaaagtgccatttttagaataactttaaagcttaacaggtttccttttaatatcctttttttgtgtgctctttacttacacaatggctttgttttgctttttcagccacaccccttatgtgaactagtgcctttgggtatcacgtaaaattttttccaaagggttactttaaaaatctgttaccacaattatgagatgatttttaagtgataaattaaacttcttcttgtataaattctgcccagatctctccacaagagctgagggtttcataactttatggcttaataaatgtatgacactgaaaagattt

SEQ ID NO: 16303 - DNA, 983 bp, Homo sapiens
  source 1..983: mol_type = unassigned DNA
actcgggctgcagctctactgagacggttttgtttaaatcatgtgaggcttcattatttttatgatgagacatgaaatagatgcaggcggaagatgttgatggaaggagggagagcggctgcggcgcggaacgtctcaagtatacaaatgctctcagtccagccagacaccaagccgaaaggttgtgctggctgcaaccgaaagatcaaggaccggtatcttctaaaggcactggacaaatactggcatgaagactgcctgaagtgtgcctgctgtgactgtcgcttgggagaggtgggctccaccctgtacactaaagctaatcttatcctttgtcgcagagactatctgaggctctttggtgtaacgggaaactgcgctgcctgtagtaagctcatccctgcctttgagatggtgatgcgtgccaaggacaatgtttaccacctggactgctttgcatgtcagctttgtaatcagagattttgtgttggagacaaatttttcctaaagaataacatgatcctttgccagacggactacgaggaaggtttaatgaaagaaggttatgcaccccaggttcgctgatctatcaacatcaccccattaagaatacaaagcactacattcttttatcttttttgctccacatgtacataagaattgacacaggaacctactgaatagcgtagatataggaaggcaggatggttatatggaataaaaggcggactgcatctgtatgtagtgaaattgccccagttcagagttgaatgtttattattaaagaaaaaagtaatgtacatatggctggatttttttgcttgctattcgtttttgtgtcacttggcatgagatgtttattttggactattgtatataatgtattgtaatatttgaagcacaaatgtaatacagttttattgtgttaccatttgtgttccatttgcttctttgtattgttgcatttagtacaatcagtgttt

SEQ ID NO: 16304 - DNA, 573 bp, Homo sapiens
  source 1..573: mol_type = unassigned DNA
gagaaaacacagctctgtcaatggactgaatgcaccattaaaactggcgtcactacaaaggttagagcagatctaactgtcaatacagtatacaaatgctctcagtccagccagacaccaagccgaaaggttgtgctggctgcaaccgaaagatcaaggaccggtatcttctaaaggcactggacaaatactggcatgaagactgcctgaagtgtgcctgctgtgactgtcgcttgggagaggtgggctccaccctgtacactaaagctaatcttatcctttgtcgcagagactatctgaggctctttggtgtaacgggaaactgcgctgcctgtagtaagctcatccctgcctttgagatggtgatgcgtgccaaggacaatgtttaccacctggactgctttgcatgtcagctttgtaatcagagattttgtgttggagacaaatttttcctaaagaataacatgatcctttgccagacggactacgaggaaggtttaatgaaagaaggttatgcaccccaggttcgctgatctatcaacatcaccccattaagaatacaaagcactacat

SEQ ID NO: 16305 - DNA, 1762 bp, Homo sapiens
  source 1..1762: mol_type = unassigned DNA
atgtacagaacaagtcaactaaggggttctcattaatctaccgtctgtgaatatcgttatttttcaggagaagcgctacaaagcagccactgtgcttactgaacggcctccccctgtatcgcttaattgagaaggtatacaaatgctctcagtccagccagacaccaagccgaaaggttgtgctggctgcaaccgaaagatcaaggaccggtatcttctaaaggcactggacaaatactggcatgaagactgcctgaagtgtgcctgctgtgactgtcgctgggagaggctctttggtgtaacgggaaactgcgctgcctgtagtaagctcatccctgcctttgagatggtgatgcgtgccaaggacaatgtttaccacctggactgctttgcatgtcagctttgtaatcagagattttgtgttggagacaaatttttcctaaagaataacatgatcctttgccagacggactacgaggaaggtttaatgaaagaaggttatgcaccccaggttcgctgatctatcaacatcaccccattaagaatacaaagcactacattcttttatcttttttgctccacatgtacataagaattgacacaggaacctactgaatagcgtagatataggaaggcaggatggttatatggaataaaaggcggactgcatctgtatgtagtgaaattgccccagttcagagttgaatgtttattattaaagaaaaaagtaatgtacatatggctggatttttttgcttgctattcgtttttgtgtcacttggcatgagatgtttattttggactattgtatataatgtattgtaatatttgaagcacaaatgtaatacagttttattgtgttaccatttgtgttccatttgcttctttgtattgttgcatttagtacaatcagtgtttaaacttactgtatatttatgctttctgtatttaccagctattttaaatgagctgtaactttctagtaaagaattgaaaagcaaatctcactaatgatacacagatagataaagcaagtctatcaacattaaaaatactaaaaaataaagacacacacagagcattttagtgacatccactacttattgccgctatgagttagagtctatcagtgttcttgttataaccccctattttcagggggttaaaaatcagctttaaaaaaatacataaaaatttcatcttaaagcactttcattttataccaacgtgaaaagtgccatttttagaataactttaaagcttaacaggtttccttttaatatcctttttttgtgtgctctttacttacacaatggctttgttttgctttttcagccacaccccttatgtgaactagtgcctttgggtatcacgtaaaattttttccaaagggttactttaaaaatctgttaccacaattatgagatgatttttaagtgataaattaaacttcttcttgtataaattctgcccagatctctccacaagagctgagggtttcataactttatggcttaataaatgtatgacactgaaaagatttgagtgtgaatctactgaaatcactataatgcacattgaagctatgatggtatttgagtagtgaggttacttttgatcggagcaacataatgctcatagaatcttctagaagaagagaaacaaagggattgataaaatgctgagaactagtgattatatatttttctgtatttacctgacatttattttaatgttcaaaaagtaaacactttaagtttga

SEQ ID NO: 16306 - DNA, 530 bp, Homo sapiens
  source 1..530: mol_type = unassigned DNA
atcatagatgcactttgctggcgctctgcactcctggccgctcaaaagcctttctgcttttccgctgcttttgtgtctttctgaaagaaccgaaatattattgttgtaactgctttgaaagactgctgcttaaaccaattaatcttgctagatgcaacaaatactgctacattctttgcaaaccatccctgtgtggctgcaaagacacaaccacaaaaggctggagcataaactccgcaagggattctttgttagagtgtatacaaatgctctcagtccagccagacaccaagccgaaaggttgtgctggctgcaaccgaaagatcaaggaccggtatcttctaaaggcactggacaaatactggcatgaagactgcctgaagtgtgcctgctgtgactgtcgcttgggagaggtgggctccaccctgtacactaaagctaatcttatcctttgtcgcagagactatctgaggctctttggtgtaacgggaaactgcgctgcctgtagtaagctcatccctgcctttgag

SEQ ID NO: 16307 - DNA, 590 bp, Homo sapiens
  source 1..590: mol_type = unassigned DNA
ctctccttctctctctctctctcctccttgcttggcagtattacttgcttataagtgtgggggaaatggtaaaattgagaggaaaaggaagattggggaaaaaggaagaggatgggatgcacttagagatctgggtgtttgtcccttaagaaaaaggtgacaaagtggttaatgtctttgcaggagaagcgctacaaagcagccactgtgcttactgaacggcctccccctgtatcgcttaattgagaaggtatacaaatgctctcagtccagccagacaccaagccgaaaggttgtgctggctgcaaccgaaagatcaaggaccggtatcttctaaaggcactggacaaatactggcatgaagactgcctgaagtgtgcctgctgtgactgtcgcttgggagaggtgggctccaccctgtacactaaagctaatcttatcctttgtcgcagagactatctgaggctctttggtgtaacgggaaactgcgctgcctgtagtaagctcatccctgcctttgagatggtgatgcgtgccaaggacaatgtttaccacctggactgctttgcatgtcagctttgtaatcagag

SEQ ID NO: 16308 - DNA, 496 bp, Homo sapiens
  source 1..496: mol_type = unassigned DNA
agtcctgaaaacatgtttctcagtgctgttggctgtttttcattggagcgtgtgagttttaaatagagaagcgctacaaagcagccactgtgcttactgaacggcctccccctgtatcgcttaattgagaaggtatacaaatgctctcagtccagccagacaccaagccgaaaggttgtgctggctgcaaccgaaagatcaaggaccggtatcttctaaaggcactggacaaatactggcatgaagactgcctgaagtgtgcctgctgtgactgtcgcttgggagaggtgggctccaccctgtacactaaagctaatcttatcctttgtcgcagagactatctgaggctctttggtgtaacgggaaactgcgctgcctgtagtaagctcatccctgcctttgagatggtgatgcgtgccaaggacaatgtttaccacctggactgctttgcatgtcagctttgtaatcagagattttgtgttggagacaaattttt

SEQ ID NO: 16309 - DNA, 1260 bp, Homo sapiens
  source 1..1260: mol_type = unassigned DNA
ggggctgggaggaggtgccgcgaggggtggagcgcgcagcggagcctgctctcggagttttgacagtaccggagctgaaattgtcagcggcggcaagcgcaggaaagttgagaggagctcgtggccccagaacaaagcttgagaaaaaccatggtgaatccgggcagcagctcgcagccgcccccggtgacggccggctccctctcctggaagcggtgcgcaggctgcgggggcaagattgcggaccgctttctgctctatgccatggacagctattggcacagccggtgcctcaagtgctcctgctgccaggcgcagctgggcgacatcggcacgtcctgttacaccaaaagtggcatgatcctttgcagaaatgactacattaggttatttggaaatagcggtgcttgcagcgcttgcggacagtcgattcctgcgagtgaactcgtcatgagggcgcaaggcaatgtgtatcatcttaagtgttttacatgctctacctgccggaatcgcctggtcccgggagatcggtttcactacatcaatggcagtttattttgtgaacatgatagacctacagctctcatcaatggccatttgaattcacttcagagcaatccactactgccagaccagaaggtctgctaaaaggtcagagtaatgcagaatgcgtgccttcatctcagatttgttcatcacaggtggatcccatgtgtcttcagtagacaagtcacctttgtagctagcaccagtgccagctccatgccattgcaccttctttagtcttgattgcccttcccgcatttattggtgtattaaaatgactgaatatgaacattaaggactccatgaacctgggctaatgggagactgtagagaaaatgaaaaaagatccaccagaggacatcttggggagggggagggagctgggggggagggaaatgactaatgaagctaattaaaagaagcattcaaatctgctttctaccctcattaacaattagcagggcactggccagagtttgtaccctgtgttttaccttaacaacattctatttgctctttgtatatttaagtgttgtaaggaaacgtgtttcaatcaaaactgaccatgagataaaggaaagagatgtggcttttgtgatattctatcacaaacacttattgtatctctgtaaaatacaatgtatgtatgcatgtaagtgtttttgtcctaatgttgctactcccatggcaaagaaaaaaaaaagaatgaaaaaa

SEQ ID NO: 16310 - DNA, 3587 bp, Homo sapiens
  source 1..3587: mol_type = unassigned DNA
gctctgtcagtaacacatgtgtaagagccgcggagggagcgagcgagccggctagaggccagcgccgccgccgccgccgcctccgagccgggcagcaacagccccggcagcggcgcaggctccagcgcgccgggcccggccggccgcagcccccgacgcctgggtgcgcctgcctgccggcctccgcaccgtccgccgccgctcccggggctgttgtgtctgcgactgctcccggccggaggtgcagggagctcagccgagccgccgctgccatcccggagcgagcaagcgagcgagcgcgcgggagggaggaaggcggcggcggaggaggaggaggagcgggaggagcgcgggcgggggcgggggcccccgggcgggggaatatacaaagtgaagccacattgccaaacttgcagcagcgattgcagcagttgctgccgctgcgccgcgcctgaagccgcgccgcgcgggccgagggctcctgcagctgctcgcgcgcagtcggaggcggagaaggacgaagactgagactgacacttctgctcccggccgcccggcacttacgcgggggccccccaacccgccccagagcaacgcgatttaaaaaaaaaaaaaaagccgcccttagccccctcctcccctttcctgcttctgcgagaactccctccctccctccagctccgccagcccaggcgccccttccctggaagccgagcggcttcgctcgcatttcaccgccgccgcctctcgcaatattgcaatataggggaaaagcagaccatggtgaatccgggcagcagctcgcagccgcccccggtgacggccggctccctctcctggaagcggtgcgcaggctgcgggggcaagattgcggaccgctttctgctctatgccatggacagctattggcacagccggtgcctcaagtgctcctgctgccaggcgcagctgggcgacatcggcacgtcctgttacaccaaaagtggcatgatcctttgcagaaatgactacattaggttatttggaaatagcggtgcttgcagcgcttgcggacagtcgattcctgcgagtgaactcgtcatgagggcgcaaggcaatgtgtatcatcttaagtgttttacatgctctacctgccggaatcgcctggtcccgggagatcggtttcactacatcaatggcagtttattttgtgaacatgatagacctacagctctcatcaatggccatttgaattcacttcagagcaatccactactgccagaccagaaggtctgctaaaaggtcagagtaatgcagaatgcgtgccttcatctcagatttgttcatcacaggtggatcccatgtgtcttcagtagacaagtcacctttgtagctagcaccagtgccagctccatgccattgcaccttctttagtcttgattgcccttcccgcatttattggtgtattaaaatgactgaatatgaacattaaggactccatgaacctgggctaatgggagactgtagagaaaatgaaaaaagatccaccagaggacatcttggggagggggagggagctgggggggagggaaatgactaatgaagctaattaaaagaagcattcaaatctgctttctaccctcattaacaattagcagggcactggccagagtttgtaccctgtgttttaccttaacaacattctatttgctctttgtatatttaagtgttgtaaggaaacgtgtttcaatcaaaactgaccatgagataaaggaaagagatgtggcttttgtgatattctatcacaaacacttattgtatctctgtaaaatacaatgtatgtatgcatgtaagtgtttttgtcctaatgttgctactcccatggcaaagaaaaaaaaaagaatgaaaaaaagaaaaaaatttggaaaaaaaaatcaggctcatagcagctactgtgtagaaaattccccctacttctaatttgctgaatgaagaaaaaaaaaaatcttttatttgtgatattttcagagacatttgctctagtatggtgtatttaaataataaaaacttaaaagaaaaaatatttaatggtgtttgggtttaaacactgctttttctcttctgtattttgaagaaatttagtttttattgttgttgaataacaagctcactttaaatttgaaggagttgagggaggtggagtgtatatttatttagctctgggccagtaaggtattcttcaaattacttaaccacgccattattggcaggggtacaaagtagtttctaacagggtcctttctataagtcaagaatattctgttaacagcatttcgttacacttctatatcacagtaagtcttttgtgtttataaatacttgagtgtccactattttgtttattctttttctcaatagcaaacaaagccttgggtattgatgaaaagtatgtataaaaaaaaatacggcacaaccatcctgttctcttattgagtttatagcttttgaaggaagtcacaatttctaagtcatacctgtacatattttgaagctcacttagttgtagggacccagagctctttttttatggtgatctttgattggtgaagtagccatttcctggtgacccttaggctcgtgtggttggctgtaaggtgtttattttgttttgctcctacacttctttactgactgcgtttccgtatgtattttgggggaagattctgacttcatttagtcttagtcttgagatactgagttgctggttgcaggcagcagagtgtccaccacagtgcctgcactgcccgcagagctgccctccggaaagcatgcagtataacagctagtgctggaaggaggaaaaccaaataggcctggaggctgaggttgtactgccagcttccttagatgtgagcaaatttcaactacaacttccatcacaggctaataaaaccaggtgtgtgaacgctactattttaaattttcttttttaagatggcattttattttgttccagaaaagcgcctgatgtagaccctccctctgagaatagccgtggagccatgtagagaggtgtagctcagcacatctcaactaccagtcagcttccctttgagaacttctgtgctcacttcctgttttcagagattccagggcaggggaaaaaaaaaatcagttgaacttcaaacctcctagaggagattgtaaaggcatagagttgaggtgaatagttttgttagaaccttataaaaataaaatgcaagaaaataatatgaagaaatcacatatatatgtttgaattagatgtctgtttgaattagatccttggggaatttcttcaaactagttctggttcttatatttgttttttttcctttaaggaactttctgaaggaagttagactgcgatggtaaagggggaaatgggttaatgagattgcaggcattttctatattctttttggcataagcacttatgtccctgatatgtacaaattcaaaggaggtggttaataactttagtaaataatatattgtcgcatttaatgatgtggagggctaaggtcattacggactttaaataaactattatatggctggttcctcaa

SEQ ID NO: 16311 - DNA, 11331 bp, Homo sapiens
  source 1..11331: mol_type = unassigned DNA
gcccggacacctgtctgcagcatggataagtatgacgacctgggcctggaggccagtaaattcatcgaggacctgaacatgtatgaggcctctaaggatgggctcttccgagtggacaagggtgcaggcaacaaccccgagtttgaggaaactcgcagggtgttcgccaccaagatggccaaaatccacctccagcagcagcagcagcagctcctgcaggaggagactctgcccagggggagtagaggccctgtcaatggagggggccgcctgggcccacaggcccgttgggaagttgtgggcagcaagctgactgtggatggtgctgccaagcctcctcttgctgcctcgacaggggcacctggggcagtcaccaccctcgctgctgggcagcccccgtacccaccgcaggagcagagatccaggccatacctgcatggcacgaggcatggcagccaggactgtggttccagggagagcctggcgacttctgagatgtctgctttccaccagccaggcccctgtgaggatccttcctgcctcactcatggagactattatgacaacctctccttggcaagcccaaagtggggtgacaaaccaggagtgtcccccagcatcggcctgagtgtagggagtgggtggcctagctccccggggagtgacccaccactgcccaaaccctgcggggaccatcccctaaatcaccgacagctctccctgagctccagcaggtcttctgagggtagcctcggtggtcagaatagtggcattggtggccgcagcagcgagaagccaacaggcctttggtccactgcctcctcccagcgggtgagccctggcctgccttccccaaacttggagaacggagcaccagctgtggggcctgttcagcccaggaccccttctgtgtcagcacccttggccctgagctgccccaggcaaggaggtcttccaagatcaaactcggggctggggggtgaggtttcaggtgtgatgtccaaacccaatgtggacccccaaccctggttccaggatgggcccaaatcttacctttccagttctgccccgtcatcctcgccagctggtctggacggttcacagcagggtgcggtccctgggctggggccgaagcctggctgcacagaccttggcactggtcccaagctcagccccaccagtcttgtccatccagtgatgtccaccctgcctgagttatcttgtaaagagggtcccctgggctggtcttctgatggtagcctgggatctgtgctcctggacagccccagctcccctagggtaaggctgccctgccagcccctcgtcccaggtcctgagctgagaccctctgctgctgagttgaaattagaagccctcacccaacgtctggagcgagagatggatgctcacccgaaggctgattactttggagcctgtgtgaaatgcagcaaaggggtgtttggggctggccaggcctgtcaggccatggggaacctctaccatgacacatgcttcacctgtgcagcttgcagccggaagctgagaggaaaagccttttattttgtcaacggcaaagtgttttgtgaagaagacttcctgtactctggtttccagcagtcggctgacaggtgttttctttgtggacatctgatcatggacatgatcctgcaagccctggggaagtcctaccaccccggctgtttccgctgtgtcatctgtaatgagtgtttggatggggtgcccttcaccgtggactcagagaacaagatctactgtgtccgagattaccacaaggtgctggcccccaagtgtgcagcctgtgggcttcccatccttccacctgagggctcagatgagaccatccgtgtcgtgtccatggacagagactaccacgtggagtgttaccactgcgaggactgtggtctggagctcaatgatgaagatggccaccgctgttatccgctggaggaccacctgttctgtcactcctgccacgtgaagaggctggagaagagaccctcatctacagcccttcaccagcaccacttctagccagagccacttgcagacatcacggcaggggatgaggagccggggttgctgctgctgcttccggtggcccctggggtggaagtggggtaggggaagaggaggggcaggagggagagttcctgtgagcatgtggggggtgcctttcctttaaccagggaggtgaacactacctgcctcctgcgtgtattttccaagtgcttttctctgttgccacattttcctcaggttactcaggaaaatgctccagcatgtgcgagcacatgacctgaggttgcatcatagcaccaaaggaatcctcctgtcccctctgggaacatttcatgcttcagagggagaggtttttattgagcttgtttcacaatatccccttgaagggacagctcagctgccaatacattcaaccctttctcttccttcaggaaaatacctatacccaaatgttccctcccccgacatatatcatggcatgatttaaggcttcttttcacctgagagcttcagttcttctgcagaatggctgcaaatttaattgcattaaggcaagaaggaagctctaatgtgtgctttgtatcctaagataaatttgcttagaaaaccagagtcaagatttgaaataggtgaggcagggtttcctccttagacactgacagcattctctgtaccccttcaaatccttactctcctaaaggcagctgagtccgcgacagaaatttgccctatgtgagtaaaacatactttgggagaagaacttggtgcaggcaccaggatttttttttttgcccacgtgtttgcgctgtttttctctggagttctcaagagttggtgacttggaaggccgcttctgcaaggcaagtctcaggaacccatgcaggtacatcgcttgcacctgtttttagcttatttaatgacgggcttttgggaagagctgcccgcatactgagagacagcttcttataaacaaggagagtttttgtgtgtgcgagatctctaagccagcgtgggagggagcgcctcaggataagttattatattcatttcgttggtttctctcctgcccaattcttggcacaggcattatgtttgaagaaaccaggataaggtacactgcttttgtctgtttaatttttttagttgtttcccttcactttcagtcttccacacacaaaaaatacctcacagagcttcaccaaatcacagattcaggaggaatttggctttcacactggactcagataccttcttcagtgtgttggaaatcactggcttcacacaggcccaactccagctggtcagggcagagtgatcgtaactaaaggtcagtggggaatagatccgattcagtgcttttgccttatgcatttcagcatcctggctccccagggtggcaggagctgagggagggccacacactggcaagatttcaagaccactctctgcactgaagaggtaaaatttgcactgcaagtcacatccctgaggccagaggtcagtaccctttggtatttcgattagaagaagctgcaaaagaaaggcagcccattttaccattgccagccaggccggggacacaggagccggtgtgtgcactctgcctcctcaccttgcacccagagcaagaggactgggtgctgggctgcagaggccggtcagtggagcccctagcacgtgtgaactcaggcttttcattgggcccggctccacttctaggccatgttttgactcatttggtaaccattgcctgtaagcagcacagaattggtgccatggattatcttttccatgttgatggaattcattctgttggaatcctttggccagatgtcacttcagccagggtgtgcatcatcattggttctttttcacaggctgagcctcctgaaaacccatgaacgctggggctggggaagtgaaccctgaggtggggaccctctcttcccatcaaatcatccagctcagtgtggggcgtggcaggggggtaaatgaagccagccaatgtgttaacctgtctctgtcaacctaagaatgttggccttactgacacacctttgctccatgttcaagaccagaagtagctgggatttgtttgcaaattgggtaattagtttaaaaatctgtgattacatttttaaatgaaattttcaaagtggcctagattgaggtgattcagataggtttgcgaatataccattttatattgttgagaaagaacaaaaagggaatttccagatgtcctagaaatcctagcaacagatttctctggttgtcagtttccctggagaaggcgccagataggaatctccaatcagttgtttttctcttcgcttcaggcccttacacaaaagccatgaagagatgttcacctacccggtattttaaatgttctgtaaattattagccaaatagaactgtaatggggttgtatttatgggcgcctagaaagaaaacacaaggacttggtaggccaggaagaaaagattttaaaatttagaatgaatagcccttctgggttttctttttgacaattcttggacttgaggtaaaacaaggaggattgtggccggatttcagatcccaaagccagcctccatcttaggcctttgcctcattgtgccttttaggttttcttacccaccgtctcctgttttgtcttttttttcttttctcctacccctatcttgggacattcagaaactgcctgggtggtttgagaagagacaacccagtttgatctgcaatacaaggatccattcgtaatctctctctcactgatgttattcccccatctgccgtcttggttcatctcaccacagaagggcatttagtcctacccagccatcggctgcgtatgacagcaggatggcacttcccatttctctgtggttagtgctcgagtgaaaacctctttcagctgagtcctctgaggttctgctgttgagtcctgggtggctgatggaatgattgaggaggtctggtcaccctcaagcgccgtcatcgccttgtttccatgggcttctgtcacacaaaatgaagaacagaaatgttaggacttaagagaatgtttggaattcacacctctttgcagtcctttcaaggctgctgctctgtgctgtgtcccatgcatgtgaaagtagagctgtgatggctgctgggacgcttgcaaagatcatgtgtgagaattgagcacaagaccacaaattattactgcttgatgcgcttgttaaaactctatctgccaggaaaccaaattttcttttcttttctttttttttttgagacagggcctcactctgttgcccaggctggagtgcagtggcgcgatctcagctcactgcagcctccacctactgggctcaagtgatcctcccacctcagcctcccgagtagccgggaccacaggcgtgtatgactggctacgcctggctaatttttgtatttttaatagagacgagtttcaccatgttgcccaggatggtctggaactcctgggctcaagtgatctgcccacttccgcctcccaaagtgttgggattatggccattagccactgtacctggcacaatttttttttgtaccctcctttatgccaagaatcagtcctaatttctttactatgtgaagtaacttttaaaggtaatagaaaaggccaggcacagtggctcatgcctgtaatcccaggcgccgtggctcacgcctgtaatcccagcactttgagaggctgaggcgggtggatcacttaaggtcaggagttagagaccagcctgaccaacatggtgaaacactgtctctactaaaaatacaaaattagctgggtttggtggcgcacgcctgtaatcccagctacctgagaggttgaggcaggagaatcgcttgaacctgggaggcagaggttgcagtgagccgagatggtgccattgcactccgacctgggcaacagagcgaaacactgtctcaaaaaaaaaaaaaaaagtaacagaaaaaagagtgaaatatattagctatcttttattctgagccaaaacttgacagatgtgggaaatcttcatatagtgtatgaaaatttcattgtacagggaaattattttcctctgtgtcttttcttttactataaagtgattcagaattttactgttactataaaattatgcaaagtattgtgacaaaactgcatcaatttgttgactattaaagtgctccttgaacattatatttcctgggtcttttctgtgtgtggagtcagcaaactgttttttgctacctggactttgtcttcttttacagctctggattcttaaaagtaccacataggtagcaaacctgtgaagggtatgagattttaccctacttgcaggctaataaagtgagcacaccacatgggttcatggatcctggcagaagttatgagactcataggtcagagacaaaggacagtttattatagcaatagcagtggccagattatcagcatttacactggttccctgagccccaggccccaagaagagggccaggtgagacctgcacacgcagtgggctgcattacaagaggaacccccatgcttaggggaccctggtatttgataatgggcagtaagcctgcctgacttttgctccagagacagacactatctctgtcatccaagactgttcactagataaacatccttgaaaatataagtctggaacctggcaattggtgtctattcttaccagatgtataaaaatgtgagaggccttggagaatcatatcccaagaatcagcagtttcttttactggacctttaagattgagacttgtaaggtcctgatgcagtgacttgtaaggtcactttgtctctcttgtgaatgttactgttttttctcttctgaggttatgaccaaagaatcctcaaggcgagtgatccttcaggtttgagacagccacatgcaggaagacaggacttgtagagtgttggggccaagtgtgtggttagaatccttggggtggggaaagagtttgttctagactccagtgtagtccttgtggctaccaggtctgacgtgccaaggacacgggaaagctgggagtgaggatactcatagtcatagcaccttacaccagaataaaagttttttttttctttttaagtgatgagagaatggctagtctgattttgccaacatgggctgctatttgcttaagaccttgatggtataaggagtgaagatgcaatcagggtaaaaggcggtctggagttgtggtgtgctggcaaaccagccctctggggcaaaaaattaaaaagccttgatatggagtgtttgctgatacctatgatgtaaatattcccgccatggccactttccagctaccagcaaggcatcctggcaccagggattgggaggagatggcatagtcctaagagtcagccttgggcattgggccatgtgggactgggcagtggggtatctggtctggttctaagtgctgtgatgaagcagtagcagctgtaatagctggcatttcccgtgtgctcatcacatagcagatgttattccaaggactgtatgttctttatcatccctcatttgatagacaagacaactgagacacaaaagggtgaaataaacagtaagtactccatcccaggccatctcatccagagggtgctgtcttgaccactctactactctggttgatgggaggcagtaaattgtccatcagtatacttcttcatcaaagctacatagtcaaaaagccacaggaggctgtgaggagaagctcactgctgctctgttgaagtctgtattggtttcctatggccactcttaacaaattaccacaacctcagtggcttaaaacaacacaaatatatcattctgtcatcctggacacgagccaaaggttgtcggcagaagcgaattgcttccagaggtgctatagggtgctgcccattccttgccccttttccgcttctagaggctgcccattttccttggcttgtggctgcatcattctggctgcttctattgtcacacctcctctctgaccctccctgcctccttgtaaggacacttgggattacgcccatccagataatctagaataatctcccattttgtgattcttaataacatctgcaaagcctcttttaccttgcagaataagatattcacaggttctggtgaggaggacagggacatctctgaaggggagggaagcaggagatagggtctggaggcatggaattggcttcctaaggccaattcaggctgacttcctagaactaagtcaaaaggaaaaccccaactttccacgctcaagtaacaaaaggaccagaggctactccctttgcaacctccccacccccagccccttttctgcatggcaggtgaaaaattgaaagtatcgctaattgatcccctcccacaaccaatcagactggtcttaggccaagtcttcatttgcctaggagtataactttgtaacttcagcctctgattgggcgttttacacaaccagtcagatgtttgtatagggtggtgtaactttgtaactttgcttcagcctctgattggtcccctcccacaaccaatcaaactgatcatggacctctgcttcatttacatagggtgtacaccaagtaaccaatgggaaacctctagagggtatttaaatcccagaaaattctgtaaccgggttcttgagctgcttgggctgctcccaccctgtggagcgtactttcgtttttcaataaatctcttttgttgcttcattctttacttgctttgtgcgttttgtccatttctttatcaagacgccaagaacctggacaccctccaccggtaacaggaggagcattagtcagcctaccacagactccaacgaacgttttttgagaggaaatgaaagaatattcctaagttattgggtgccttttcttcaggaatccctgaaagtgggggtttgcaattttccctggattgaaaacagaaatgcttcctacacaaacatgattgagaccttgtactctaggtgtaaaaaaacagagtaggtcatactctgtgggttatggtcagagagatctggttagaagttcccaggtaggcgacagccctagatgtgtgacacttctaggagaatctctggctatgtggatacgtccaggtgtgtaaggcagcctcagggactgccaccacttggtcacatacatgtccctccaactaatcctagctctcaaggacaggtggttctgggccctgtgttgcccatgagacttggtccacggcaagcctgtgacggagtgaaagtgaggggacacccaatttgaaaactcggcaggaagccagactccatgacatacaaatagatcaaagtgaatcggctccgttgtttggggaaatacctgaggtttgttgtttcgtgccaagaagattaacaacacggacacacgtgggtgggttaaggagcagaaagtttaacaggcagaaaaaagagaacagctcccccatgcagagggaggaggactccgaatggatctccccattcctggcgggaagcagactgatatatagaggagggggtttgaagaggtggtatttgatttacatagagcccaagggattggtttgaccaggtgtgccatttacatagccctcgaagaaactggccattccaccttgatcttttattatgcagatagggttttttacttggccagagccttgacacctgcacacatggcaacaaacagaagggaggcgaaatcttccatattggatgcacctgtcttccaggtgcagctgccggcatttatctgtgcaagcttctagcttgcttatttatgcttgcagcttgacttttcaggctgctttctgttggaaaagaaatggttttgggggctgctttttattaaaagaaaagccttaccaaggactcctgtaccctatctgcctaaattttttttaactactatattaaaaggtctgtaagtgggagctggccctaaaagtaggttgtagagattatttggatgtgccaacaagcttcatctgcagcttggactgtctccattggaaggcctctggcagattttgtaaaaagttatataacaattttactataggaaaaacttggctacagatatgaatttatattacccatcattggctggttccttatcctgaacattggtttccttggaatctgattttggcttgtttggcctttaaaaaccccagaagaatggggtttctgccagattattttctggttttcagtctcactgaatgtcacaaaggccttggtttatggttcccaactggtaaagaaacgtcaaactttgcctctcttagttccttctacatgacaatgggtggcagttgctcatatggaagcatttcttttccccctaaagcctatgagacaggctgcaacttaaacccctattttattaaaggagaggaaatgtccaagagcccagagatagtgggtaaaagcatcataaggactagaaatggggtcttcttgttgctaattagtaggggtgaggggtaagtggcagatgtgactgccgtccatgcccagacagggaattgtccttgaacctactcatgcggtgtcttctggggtacagtgagtccacagggcaggacggccttggagtcaagagcccagactcacattctatctcaggcttcataactcaattgctccatgaccttaagccaatttagttccctcatctgtaaaaatggggataacaactgaatttacctcatgggattgtgtaatgcccaaccttgtttttactaaccctgtttttagactctccctcttcctttaatcacctagccttgtttccacctgaattgactctcccttagctaagacagccagacagactccatcttggctctttcactggcaccccttcctcaaggacttaacttgtgcaagctgactcccagcacatccaagaatgcaattaactgataagatactgtggcaagctatatccgcaattcccaggaattcgtctgattgataacgcccaaagccccgggtctatcaccttgtaatagtcttaaagcccctgcacctggaactgtttactttcctgtaaccatttatccttttaactttttgcctactttatttctgtaaaattgttttaactagacccccccctcccctttctaaaccaaagtataaaagaaaatctagccctttcctcagggctgagaaaattttgagtgttagccgtctctcggtcgctggctaataaaggactcttaattcgtctt

SEQ ID NO: 16312 - DNA, 3433 bp, Homo sapiens
  source 1..3433: mol_type = unassigned DNA
ccaagatcttcctcctaccctcccctctttcccttctcccgcggtcggccctcgccccctcccccaggcccagcgcgggcgctcggcgcgtccagacccgcggcgcgatgccggcagtttaggatccaaagcttctctgctccttttgttctttccttcccttttttaaaaaaagaggggggaaatcccagtggtgggcagcctggcacgcacacagtcgccctcataccccgacaaaagcagatgcactttgacttctgacagctctacctcaagccccggagaactcagcggcgctttcctcgcaacccgagctcggcgagtcgtcgtcttcttcttctccgtttttatttatttatttccgttcccgccgccgttctcgctgaccttcactcctccgcgggctctgagcagaagggtcgcattctctcccgcctgagacttcttttcctcgccccgggagctcaggcggcgccgctccagcccggggccccgggactccccggctgcacacttcactgagacgcccccccaggccccgatcagcctcgtttcctccaccctactttgatttcctggtgcgagttttggcttgcacggccgagtgtgtgtcctctttttggagagactggggagctcgtgccgattgtcttcaggagtcatcccctgggctctactttgcccctctctctctctgggcctcatcagaccaaaccaaagaccatggttcactgtgccggctgcaaaaggcccatcctggaccgctttctcttgaacgtgctggacagggcctggcacgtcaagtgcgtccagtgctgtgaatgtaaatgcaacctgaccgagaagtgcttctccagggaaggcaaactctactgcaagaacgacttcttccggtgtttcggtaccaaatgcgcaggctgcgctcagggcatctcccctagcgacctggtgcggagagcgcggagcaaagtgtttcacctgaactgcttcacctgcatgatgtgtaacaagcagctctccactggcgaggaactctacatcatcgacgagaataagttcgtctgcaaagaggattacctaagtaacagcagtgttgccaaagagaacagccttcactcggccaccacgggcagtgaccccagtttgtctccggattcccaagacccgtcgcaggacgacgccaaggactcggagagcgccaacgtgtcggacaaggaagcgggtagcaacgagaatgacgaccagaacctgggcgccaagcggcggggaccgcgcaccaccatcaaagccaagcagctggagacgctgaaggccgccttcgctgctacacccaagcccacccgccacatccgcgagcagctggcgcaggagaccggcctcaacatgcgcgtcattcaggtctggttccagaaccggcgctccaaggagcggaggatgaagcagctgagcgccctgggcgcccggcgccacgccttcttccgcagtccgcgccggatgcggccgctggtggaccgcctggagccgggcgagctcatccccaatggtcccttctccttctacggagattaccagagcgagtactacgggcccgggggcaactacgacttcttcccgcaaggccccccgtcctcgcaggcccagacaccagtggacctacccttcgtgccgtcatctgggccgtccgggacgcccctgggtggcctggagcacccgctgccgggccaccacccgtcgagcgaggcgcagcggtttaccgacatcctggcgcacccacccggggactcgcccagccccgagcccagcctgcccgggcctctgcactccatgtcggccgaggtcttcggacccagcccgcccttctcgtcgctgtcggtcaacggtggggcgagctacggaaaccacctgtcccacccccccgaaatgaacgaggcggccgtgtggtagcggggtctcgcacggtctgcggagttcgtggttgtacagaaatgaacctttatttaagaaaaatagaaaaaaaaaaaaacataaaaagcaagtccccacccccttcctccagcctcgagaaccattctccttctggggagaccggatggaaaagggggacacgaaataggatccaaatcggcctcgaggtgggactgggatccgcgcactggctgtcgacgtgcagaactggggctccccaaaggaaacgcagacctctccccaactcccacctggacccggatccgtagacagaccccgcgggcgtgtgcgcctggcaggcgggcggcgaaaagacgtccagggcagccgcgggtgcgcacagccgttggcgatgccaggagccgtggggagggaggccgtgagcacagccgggtgaaggaagtgaagcggcccagggcgctcccgggccagccaggagggttctagctctgggatatcccttattagtgttgtctcagagttcaacaacagcgacaaaaaactcttatagcttcagaaacgccgacctgccgtgcatcaggtgggactatatatatattttttgtctatctggatttttggtttttgtttttgccaaaattgcaaaattctaaatgtaaagccctccgtatcaactcttctaccttcgcaaaactacacatacacacatacacacgtacacggacacactcggtaagatggtctccagccagaccgctcagtaaaatgacttgaacatcagctgtacaagaaaagtattctaccttcacacacaaaaagttaaaaaaaaaaaaaaaagactattgaactaaaaacagtcaactgtttacgtataatgttaaattcaggagttcagtgttttactaatatatcctgttttgaaacctcttgttcgaaaacaaaatgttttgagcaatcaaccaaaattgttccttttcttttcctgtagatgttctgacagatttgcagggctttcggctcactgtgctagtatgtaaaaaggtgttgtttacacgaggcaaagagaaaacatgctattcagacagttgccaaatagaataattatagcacaaatactgtaaaggtgcctggcaccagcaacctgagaaagtgttaaaaaaaaaaaaaaaaaagtgttacaagatttaaaaaaaaacatctttgctaatttttttgtcctgttgaacattcatggaattgttaatatgacttatatagacccacacaggttttatttttgtgtctttaaaataaaagtccaaaatatttaaattttatggtcaaatatgcagtcaacagctgctactttttctttatatattaaatttctcatatgtcttttattgttctaataaacctaagcttgtgtgacctccagtgcatattagaccattcactgtatgaaagaaaacatgttgaataaatttgtgagtttttaataaaaatagaaaatctgatgtttagataa

SEQ ID NO: 16313 - DNA, 2554 bp, Homo sapiens
  source 1..2554: mol_type = unassigned DNA
gactgcagagccggggctgggctaggcgcgcgcttggagagcattgcgcgcggctgggcccgcggccggcggctcctcctcccactctgctcctcctcttttttctcctcctccacctcctcctccgcctcctcctcctcctcttcctcctcctcttcaattctcccggtggctcgactcggctcgcaggcttcggagaaacccctactccagtcgccgactcagcgcccaagagggtcgccttgggctgggggcgcaccccagggaggggaggggtccaggcagctgggccgccgcggacacctagcggcttcagggtgaaccccgaccgcagccgtcgccgcctcgggcagagtttgcgcccttgctttgcgccccgggcgctgaagccgggcgggcgatgcccgcggcgtgaaagcgcccgcggcgggcgccgacctctgtcctagtctcctgctccccccgccccgcttgtcccgtgcccttgtgaccctggctttggcgccgtcgcccaggcgccccgcaatgtagctgcccctgcgcctcggcgggaggcgtcctgccccgcgagcgcccggggcccggagcccggcctgggggctcagccgagctcgggcggggccggggccgcggtggcgatgcaccgggcccgttagcgccaggagcgccaggcagctgaggcggggggcaagccctccctcggaggagccgcgcccccggccccgccggtcccgccgcgatgctgttccacagtctgtcgggccccgaggtgcacggggtcatcgacgagatggaccgcagggccaagagcgaggctcccgccatcagctccgccatcgaccgcggcgacaccgagacgaccatgccgtccatcagcagtgaccgcgccgcgctgtgcgccggctgcgggggcaagatctcggaccgctactacctgctggcggtggacaagcagtggcacatgcgctgcctcaagtgctgcgagtgcaagctcaacctggagtcggagctcacctgtttcagcaaggacggtagcatctactgcaaggaagactactacaggcgcttctctgtgcagcgctgcgcccgctgccacctgggcatctcggcctcggagatggtgatgcgcgctcgggacttggtttatcacctcaactgcttcacgtgcaccacgtgtaacaagatgctgaccacgggcgaccacttcggcatgaaggacagcctggtctactgccgcttgcacttcgaggcgctgctgcagggcgagtaccccgcacacttcaaccatgccgacgtggcagcggcggccgctgcagccgcggcggccaagagcgcggggctgggcgcagcaggggccaaccctctgggtcttccctactacaatggcgtgggcactgtgcagaaggggcggccgaggaaacgtaagagcccgggccccggtgcggatctggcggcctacaacgctgcgctaagctgcaacgaaaacgacgcagagcacctggaccgtgaccagccatacccgagcagccagaagaccaagcgcatgcgcacgtccttcaagcaccaccagcttcggaccatgaagtcttactttgccattaaccacaaccccgacgccaaggacttgaagcagctcgcgcaaaagacgggcctcaccaagcgggtcctccaggtctggttccagaacgcccgagccaagttcaggcgcaacctcttacggcaggaaaacacgggcgtggacaagtcgacagacgcggcgctgcagacagggacgccatcgggcccggcctcggagctctccaacgcctcgctcagcccctccagcacgcccaccaccctgacagacttgactagccccaccctgccaactgtgacgtccgtcttaacttctgtgcctggcaacctggagggccatgagcctcacagcccctcacaaacgactcttaccaaccttttctaatgactcgcaacccctcaccccacaatttctttaaaaaagaaattatctttagttgaattccaagtgtattttaaaatagaggctttgagcaactaactaaccacattttaggatctcgcctggaaacagaggtaaaaaaaagaagtgtgcgcccggctaatgcagcggtgtggaccgaggaacaacttggaagatctacctgcaacacaacatttgtgtcactgtacagttttgtggactgagcgaggaaaaacaacaaataatttaagttggctagagcttctgtattttcaaagactgccacgtgccttaggaatactgttttatctccatactttggatgacttgttcatttttctctccctctttttctctgtatatttatgaccagagcaaaaatgtaaaaaacaaaaaaaacaacaaaaaaagtttgttactttgaatagtcctaaaaagaaaaaaagaaaaaaaaaaaaggaaaaatcaaaccccctccaacggtcgctttgttgttttagaattttaaggtggaagtctgttcgaatatcagaatttgtaaaatctaaccagtaataaaaccacttattgaaacta

SEQ ID NO: 16314 - DNA, 1313 bp, Homo sapiens
  source 1..1313: mol_type = unassigned DNA
cgcagcgcccagcagcacccggagtcgcttggacgccggttcggggctattgcggggtggcgtcgctgggcccgggaaagttcgggactggagagtggcgacgccgggcggcgggacccatggaggcgcgcggggagctgggcccggcccgggagtcggcgggaggcgacctgctgctagcactgctggcgcggagggcggacctgcgccgagagatcccgctgtgcgctggctgtgaccagcacatcctggaccgcttcatcctcaaggctaccgccactggcacagcaagtgtctcaagtgcagcgactgccacaccactggccgagcgctgcttcagccgaggggagagcgtttactgcaaggacgactttttcaagcgcttcgggaccaagtgcgccgcgtgccagctgggcatcccgcccacgcaggtggtgcgccgcgcccaggacttcgtgtaccacctgcactgctttgcctgcgtcgtgtgcaagcggcagctggccacgggcgacgagttctacctcatggaggacagccggctcgtgtgcaaggcggactacgaaaccgccaagcagcgagaggccgaggccacggccaagcggccgcgcacgaccatcaccgccaagcagctggagacgctgaagagcgcttacaacacctcgcccaagccggcgcgccacgtgcgcgagcagctctcgtccgagacgggcctggacatgcgcgtggtgcaggtttggttccagaaccgccgggccaaggagaagaggctgaagaaggacgccggccggcagcgctgggggcagtatttccgcaacatgaagcgctcccgcggcggctccaagtcggacaaggacagcgttcaggaggggcaggacagcgacgctgaggtctccttccccgtgagccttccttggcggaaatgggcccggccaatggcctctacgggagcttgggggcacccaggccttgggccggccctcgggagccctgggcaacttctccctggagcatggaggcctggcaggcccagagcagtaccgagagctgcgtcccggcagcccctacggtgtccccccatcccccgccgccccgcagagcctccctggccccccctcctctccagcctggtgtacccagacaccagcttgggccttgtgccctcgggagcccccggcgggcccccacccatgagggtgctggcagggaacggacccagttctgacctatccacggggagcagcgggggttaccccgacttccctgccagccccgcctcctggctggatgaggtagaccacgctcagttctga

SEQ ID NO: 16315 - DNA, 2403 bp, Homo sapiens
  source 1..2403: mol_type = unassigned DNA
cgcagcgcccagcagcacccggagtcgcttggacgccggttcggggctattgcggggtggcgtcgctgggcccgggaaagttcgggactggagagtggcgacgccgggcggcgggacccatggaggcgcgcggggagctgggcccggcccgggagtcggcgggaggcgacctgctgctagcactgctggcgcggagggcggacctgcgccgagagatcccgctgtgcgctggctgtgaccagcacatcctggaccgcttcatcctcaaggctctggaccgccactggcacagcaagtgtctcaagtgcagcgactgccacacgccactggccgagcgctgcttcagccgaggggagagcgtttactgcaaggacgactttttcaagcgcttcgggaccaagtgcgccgcgtgccagctgggcatcccgcccacgcaggtggtgcgccgcgcccaggacttcgtgtaccacctgcactgctttgcctgcgtcgtgtgcaagcggcagctggccacgggcgacgagttctacctcatggaggacagccggctcgtgtgcaaggcggactacgaaaccgccaagcagcgagaggccgaggccacggccaagcggccgcgcacgaccatcaccgccaagcagctggagacgctgaagagcgcttacaacacctcgcccaagccggcgcgccacgtgcgcgagcagctctcgtccgagacgggcctggacatgcgcgtggtgcaggtttggttccagaaccgccgggccaaggagaagaggctgaagaaggacgccggccggcagcgctgggggcagtatttccgcaacatgaagcgctcccgcggcggctccaagtcggacaaggacagcgttcaggaggggcaggacagcgacgctgaggtctccttccccgatgagccttccttggcggaaatgggcccggccaatggcctctacgggagcttgggggaacccacccaggccttgggccggccctcgggagccctgggcaacttctccctggagcatggaggcctggcaggcccagagcagtaccgagagctgcgtcccggcagcccctacggtgtccccccatcccccgccgccccgcagagcctccctggcccccagcccctcctctccagcctggtgtacccagacaccagcttgggccttgtgccctcgggagcccccggcgggcccccacccatgagggtgctggcagggaacggacccagttctgacctatccacggggagcagcgggggttaccccgacttccctgccagccccgcctcctggctggatgaggtagaccacgctcagttctgacccaggcccggctccaccctgcacctcacacgagggagctgcccctgggtgggcggctcggggctgctggggtttccgaggaagtggggccagggcgtcaagggagggctggtgccttcggagcctcccactgccgaccgcacagctccctctctgggggctgagggacccacctggcccctcctctgacacagggctggcccgccaggtggcctcccagcaagccagccttttttgtaagcaaatttctcccctttattgaccaattaactgagcacttgctgctatttctagacatgaaatgtcaccttgctgaggcccagcccagcccagcatagcccgagggctggaaaaacgctttcatctctaaaactgagaaatcatcataattgtgctttcacttcccaggctccatgtgtcttggagccgtcaccccgaggctccctctttaggtcggagattggccttgcctgtcgaggcaagaggctgcagaggcggggacacacctgtgtcctccgggagaggccccctcctctccccagaccacagggggcctctctgcctccagccccaccttccccgggagaagctttccccaatccccaggtctctagatcattctgttctcgagtatcctgtggaggaggcaaaaatgcctggcgccccttctctccaagctcaattctctaagcccctcagggtctcctcctcaccccaccccaggcccttggtgtccaggctgcacccacagatgtctgttgccaaacagcctgccctccctgccggagccggctctgccagccccagattgggaagtctccccgctggagaagggtggggctcctctgagcctgccctgcctcctccatcagatcctttgggaagaagtttctgggagatgcccgcagctgtgcgtgccccagacacaaaggctggcctgtgtgtaagtcaaagtcactcccgcaaacctgaatctcgagctacctattggttctgtgaatgttctgtgtcttttatttattctcgggtgatcagctctttccaagacttcaataaatttgtcagttacagtcaa

SEQ ID NO: 16316 - DNA, 2337 bp, Homo sapiens
  source 1..2337: mol_type = unassigned DNA
gccccgcacgacgcggcgggacttgggagccccgaaccctccaggggacgctgacctaggaggagcgcgtctcgcgccactcggcctggtggccgcgatgctgctggaaacggggctcgagcgcgaccgagcgaggcccggggccgccgccgtctgcaccttgggcgggactcgggagatcccgctgtgcgctggctgtgaccagcacatcctggaccgcttcatcctcaaggctctggaccgccactggcacagcaagtgtctcaagtgcagcgactgccacacgccactggccgagcgctgcttcagccgaggggagagcgtttactgcaaggacgactttttcaagcgcttcgggaccaagtgcgccgcgtgccagctgggcatcccgcccacgcaggtggtgcgccgcgcccaggacttcgtgtaccacctgcactgctttgcctgcgtcgtgtgcaagcggcagctggccacgggcgacgagttctacctcatggaggacagccggctcgtgtgcaaggcggactacgaaaccgccaagcagcgagaggccgaggccacggccaagcggccgcgcacgaccatcaccgccaagcagctggagacgctgaagagcgcttacaacacctcgcccaagccggcgcgccacgtgcgcgagcagctctcgtccgagacgggcctggacatgcgcgtggtgcaggtttggttccagaaccgccgggccaaggagaagaggctgaagaaggacgccggccggcagcgctgggggcagtatttccgcaacatgaagcgctcccgcggcggctccaagtcggacaaggacagcgttcaggaggggcaggacagcgacgctgaggtctccttccccgatgagccttccttggcggaaatgggcccggccaatggcctctacgggagcttgggggaacccacccaggccttgggccggccctcgggagccctgggcaacttctccctggagcatggaggcctggcaggcccagagcagtaccgagagctgcgtcccggcagcccctacggtgtccccccatcccccgccgccccgcagagcctccctggcccccagcccctcctctccagcctggtgtacccagacaccagcttgggccttgtgccctcgggagcccccggcgggcccccacccatgagggtgctggcagggaacggacccagttctgacctatccacggggagcagcgggggttaccccgacttccctgccagccccgcctcctggctggatgaggtagaccacgctcagttctgacccaggcccggctccaccctgcacctcacacgagggagctgcccctgggtgggcggctcggggctgctggggtttccgaggaagtggggccagggcgtcaagggagggctggtgccttcggagcctcccactgccgaccgcacagctccctctctgggggctgagggacccacctggcccctcctctgacacagggctggcccgccaggtggcctcccagcaagccagccttttttgtaagcaaatttctcccctttattgaccaattaactgagcacttgctgctatttctagacatgaaatgtcaccttgctgaggcccagcccagcccagcatagcccgagggctggaaaaacgctttcatctctaaaactgagaaatcatcataattgtgctttcacttcccaggctccatgtgtcttggagccgtcaccccgaggctccctctttaggtcggagattggccttgcctgtcgaggcaagaggctgcagaggcggggacacacctgtgtcctccgggagaggccccctcctctccccagaccacagggggcctctctgcctccagccccaccttccccgggagaagctttccccaatccccaggtctctagatcattctgttctcgagtatcctgtggaggaggcaaaaatgcctggcgccccttctctccaagctcaattctctaagcccctcagggtctcctcctcaccccaccccaggcccttggtgtccaggctgcacccacagatgtctgttgccaaacagcctgccctccctgccggagccggctctgccagccccagattgggaagtctccccgctggagaagggtggggctcctctgagcctgccctgcctcctccatcagatcctttgggaagaagtttctgggagatgcccgcagctgtgcgtgccccagacacaaaggctggcctgtgtgtaagtcaaagtcactcccgcaaacctgaatctcgagctacctattggttctgtgaatgttctgtgtcttttatttattctcgggtgatcagctctttccaag

SEQ ID NO: 16317 - DNA, 7083 bp, Homo sapiens
  source 1..7083: mol_type = unassigned DNA
aacctgggatgtgcaccaaccccggagagcgagatcaaagggactggaaacagactggggactggcggggggagggggccggccagcctgtggagtcctccctgagaagcggagggcccggcttccaccgtgactccagcggcctgcttggggttttaattattattttgaaatttctgaatcgagctagagcgagagagcgagagatctccgtagactgcgactcgctggctttcgctccgagatgatgcagagtgcgactgtccccgcggaaggggctgtcaaggggctcccggagatgctaggtgtgccgatgcaacagattccccagtgcgctggctgcaaccagcacatcctggacaagttcatcctgaaggtcctggacagacactggcacagctcctgcctcaagtgtgcagactgccagatgcagctggcggacaggtgcttctccagggctgggagcgtctactgcaaggaggacttcttcaagcgcttcggcacaaaatgcacggcctgccagcagggtatccccccaacccaggtggtccgcaaggcccaggactttgtctaccacctgcactgctttgcttgcatcatctgcaaccggcagctggccacgggggacgaattctacctcatggaggacgggcggctggtgtgcaaggaagactacgagacagccaagcagaacgatgactcagaggctggagctaagcggccccggaccaccatcacagccaagcagctggagacattaaagaatgcatacaagaactcccccaagcctgcccggcacgtgagggagcagctgtcctcagagacaggcctggacatgagggtcgtacaggtttggtttcagaacagaagggccaaagagaaacgcctgaagaaggatgcagggcggcaccgctgggggcagttctataagagcgtcaagaggagccggggcagcagcaagcaggagaaggagagctctgcagaggactgtggggttagtgacagtgagctgagcttccgagaggatcaaattctctcagaacttggccacaccaataggatttatggcaacgtgggggacgttacaggcggacagttaatgaatgggagcttctccatggacgggacaggacaatcctatcaggacttgagggatgggagcccctatggaatcccccagtctccatcctccatatcgtccctgccatcccacgctcctttgctcaatgggctggattacacggtggacagtaatttgggcatcattgcgcatgcagggcagggagtaagccagacgctgagagccatggctgggggacccacctctgacatctccacaggaagcagtgtaggctatcccgactttccaactagcccaggctcttggctcgatgaaatggatcatcctcctttttaaacttctctcctccccaccctacctgcccccctggcttgagagaatatcttcaaggatcaaaagagacttgccttttaaggatcgaaagtacgccaatgtgaatttccattattttcaatggaagtcctccgctgattcctagaaggctgtgagaccacactagggcattgtttccctggggaagcagtgggagagcagactcatctcagaacacagcacagggggtaatggcctagagctctagggacactggcttgttgggtctctcccctgctgttctgcttaggggcttggctgctcagtgctttggtagcacaaggtgactgtgataggcccccttggcctttgggaactttgctccaactggtgtgtctcacacaatgcctcccaaaacactgctctcaccagaactgagactcctaaggtagaggcctcacagcccttgagtaaaataaaagtgatttctggaccatccttattgaaccctatatttcaaaatgaaaagatcagttattaaaggtcagtgaacactttgatggccagtttgatattaaaaacatgccccctccttttttatttttgctgtgaagatatgaattctttcctacaaaccagagaatatgaacctgttttggtttttaagtgtcccatctatatcattgactctgatggcaagaggtggttttcattgcaggtgactgaggctgagctgagtagccctggaccaccgctgcagattgcctgagtcgtccccttggtgcacagtgtgccttcttcaattgcttgtatcatttattccacaagacaggctgtgggctgtaaaatgagcaaaactaaaatgtggggagaacaaaatgacaatcaatcagtgaacatttgtagacacatttggattccaaacctgcagtctgttcagccatatcggctgatgccagtcttccagagttccccatcccttgtagggtgaaatatttggagtctgttttgaaggagttggtttagatgagcttgcaagtctacccctctgaaagctttctctgctgtcctagctgactcaattggaggacagttttggtcatttccaggaaccagcaatttttttttggcctaccttggttgggaagagtaatttagggagcagccctaaaattgtccaaagggttctaagtggttcttgggctgcatctctctggattgctggctggacacctgccatgccttgggctgcagtcccatggtcagaaagccagaactctctggccagtggtggtgcagggactccccgttgtgcaggtttgcagtagcaaatcactaagcctgaggccagagcaaggccaacccccgctttacgagttgccactcctgcgacagactgcactgctgtgggaaacgctgtcctgaatggtgctgcagctcccacccaccttgtgcacccatctaccatcaggaagctctccatgtgcaaactggaatttagccagctggaatttattcctgtccctctgggaagctgtgtttgcttcttctggcctcccattctcttaaatgagatcagcagagtaggaaagggtgagaaggcattgcctatcacatgaagtgatggggccagagaccctaaggacccttccttctacgaatggttggtcaccttttgaggactgcaaagacttaggcatgtcataggcagactaaaggaagaatacacagttcctcttggactgctacatcttttgtaagcccttttccaggactaaactaagttcaattaagtaagttctttaaaacagtaaattccgggatcagccttcgggccctcttctctgaccaattttatagcgtaccctcgttttttggtgtgctgcagtggtcatgatttttgcttgagaagtctgcaaacatagacacttctcttgaggttccatgtttatggatgatgttgtgttaatcctagccaattctgtgctattgggaattctccaatcatgaacactggggtggggaggaagacacaaatgccatgtgaggaaaggaaaatgcagtcgtctttttggaggatggctttttaaatacacccttcttagcaggctgcttaaaatacacaggagaaaaggctctgctgggcaatgaaccagatgaaaagctgcccacccagatcactgttgcaggttgactatttggcttagcaactcatgggatttcagaggcccttgaagtttttggtgagtatagtgtgggggagagcaggctttttaaaaggggggggggcatcctcctctgtgtagcactgtttaagatcactgtaagtaagttgaccagtttttgtaagttaatcatactaattcccagttcaatagtggaaggagaggccttcctcatttatactaataatataataaatctcttgaggaactcagtgagcagttgacgaggtcaatagttctttggcatcagtagggctggttagctggaaaaacccttgagagcactggcctgaaaaccaggagagctttgttttccagagccacctccccagaaagcagcaaacactgctgcctgtttagaagcacagccacagtaggtctaagattttaaatggatctccctacaggttgggttagcattatgggtgggctggtgccactaatgagccattgcatgacaggactcttctggggtttggaaatggagaaaagccgggcattcattacttttagcttctcttagaggcactcctctgttgcttggaagtctattatggggtataaggtgctacatggtagctgtttccccccttgctaaaatgacatggatgaattttaaaaatgaaatgagaccttctagaggcaaccattatctgcagtgcctggctggtcgactttagagtaggaagctcttgaatccaggagcaaattagttaaaaccccaagttccagtggtaactggtataagcaaaatggaaactgaggggctatggaggaatctctgtttgttggaacgtaatgaaaccatggaggaaataccagatttaagggctaagaagctggcccgatgggtaaatcagtgttgggagtcaggttcttggcccttcaaggacttgctatgcaacctcaggcaaattcctctcagtctttgtgctttctctttcttgtctcatctgacagttatgaatataacgtaaaataaagatcaactatcattgataacactgttcctgcaaatgaatactgtgaaacatcagggaaagaggaaaaaattaagccacaagaaaaccatttggcagtgtccttaaactttttttgggggggggcagtgtaaaacatgaaacctagtaagataattgggccattagatcttcatcattaaactcactttgcaaggaagtgtaagaaatctgtaaaacaaaagacattcctatctcagaagctcaaactggtgatttccaactgcctctttacaggagggggctcaaggcttctgatgagcaaaggctgtgtgttgtatgacagtccactctctgcacctacacttccacgtgccacgactgacaacttggttataaccatgaaaataatgaccatacctccccagccagcagggtctggaaggcctgaggaggctcatttttaaacactgcactttaaaaattggaaaccgtgagatgaagaaaaattcaattaagcggaaatgagttttgttttattgcctgctgctgaagggctctgggcatgctgaaagctaaatgaaaagcacatcactggctctcttctttcttggattggtcaattggccctttttgcagtagttgctccaactgttctaaacagtgagtgactggagccaaaaagagagagctcagcaaagccatcccatccacactctgcttggtaggaccacactaaaagcacagtttcatgctgctagctctggtaaggagacagctgcaggtttgggaggtgcaccaagcattcctttgcttagggaggcagagcacaggtgaacagaggaaggacacccccactctcatctattgcccaccgagaggcaagaatcacaccaactttcccacttgaggactgtgttcggccaaacaagcaggttcagggctgcgggattccagaagttgctctgagcttgcaatcagacctcaaagccccagatcccctcagctctggatcgttgccctcatccttcacaatgtaaattttgtacagttaaagagaaatgaagtctcgtttcctggggaaaaaaaagaaaaaaagaaaaaaaaaagacccacccatccttatttattgccatatgactttggaaaacagaagctggtgcgtttgtttgtatatgcctcctgtgtgttggcatgagatgtgtacggtaaaattatgtaaaataaatatggaaattctttagatgctgatgtgtcttgcttttcatttggtttgctggaagttttttctcttgacataaatagaataaaaactgagtgatgtgaggtcctttccttttatcatcagaaggaaaccaaatatacaactctgaatgccagaactattatacttagagccatgaaataccagaaccactcaataaaggactgattagaggaagttccctggtttttctaatagtcatttcctgggcacgatcctctgcccccagacttaggaaatgagcagtagaaatgttgaccatataacttttagttcctgtttgttcagtggcatttttaaaatttttttttgagacagagtcttgcgctgttgcccaggctggagtgcagtggtgtgatctcagctcactgcaacctctgcttcctgggttcgagtgattttcgtgcctcagcctccagagtacgtgggattacaggcatgcgcaaacacgcctggctaattttttgtatttttagtagagacggggttttgccacgttggccaggctggtctcgaactcctgacctcaagtgatccgcccacctgggcctcccaaagtgctggaattacaggtgtgagccaccatgcccggcctgtccagtagcattttaaaagtccttcacactcatacatttttctttctagagaaagtatatgcaaatgtctatatttacagagggacagaaacacctcatcagagtcatcagggctcctggacaaacattttccaggagaatctccatttaggtttgttttctctgcaggagtctttattagtgtgcagaccctaagtttagctggaatggaaacagcaacagggactttttcattacattaaaaaaaaaaaaagtcatagcatttctttacagctgggattccactgtggaaaaactacagcgtgtttcttttccccactagtcattagttttgtttggctgaagagaagatccaaagcagtggcactgtccaatatggtagctactagccacacatggctatttaaatttaaattagtattaaataaaactaaaagtttagttccttacactagacacattttaggtgctcaacagcttcatgtgaccagtggctactgtatttggacgacactgatataaaacagttctatcattgcagatggctctactggacggtgctcatagagtcttgttagggagagtgggcaaggaaatctcattcatcacatgtttagctattagttatcctggaatacttggtgaa

SEQ ID NO: 16318 - DNA, 2940 bp, Homo sapiens
  source 1..2940: mol_type = unassigned DNA
aaccaggtacaagctaatactcaacaatactgatgccttgttttttttgctctgtccggacagcaacgctgtagccaatttagatatgctataaatttaagaggttgccatggccacggtgcgcccattggccgctgggccccctacgtgcagcgccacgtcaccaaatctgaataaggatgcgcgaattacgcggcgaccagacaaagatgaggatccggaccgcttgaaagtgggggaaagtgccggcgcctccgccaccggggaaagccgctccgcagcgccgaggccagcagccacccgagatacctggggaagcccggaacaggcgccggggcgtgcggcccgtggcatgaggttgtgaacgccacccgccccccaccaccccactccgggcagcccagcgccaggccagagattgcccaaggactggaccggctgagtcttggtccggaccagactcgccctgcagctgctgagacaagaggcgaagggcagcggagggcccggcaggcccgagggccaggggcccaaagggagggcaaggcggccgaagccgccggggcgcggggctatgatggtgcactgcgccggttgcgagcggcccatcctcgaccgctttctgctgaacgtgctggaccgcgcgtggcacatcaaatgtgttcagtgctgcgagtgcaaaaccaacctctcggagaagtgcttctcgcgcgagggcaagctctactgcaaaaatgactttttcaggcgctttggcacgaaatgcgccggctgcgcgcaaggcatctcgcccagcgacctggtgcgcaaggcccggagcaaagtctttcacctcaactgtttcacctgcatggtgtgtaacaagcagctgtccaccggcgaggagctctacgtcatcgacgagaacaagttcgtgtgcaaagacgactacctgagctcatccagcctcaaggagggcagcctcaactcagtgtcatcctgtacggaccgcagtttgtccccggacctccaggacgcactgcaggacgaccccaaagagacggacaactcgacctcgtcggacaaggagacggccaacaacgagaacgaggagcagaactcgggcaccaagcggcgcggcccccgcaccaccatcaaggccaagcagctggagacgctcaaggctgccttcgccgccacgcccaagcccacgcgccacatccgcgagcagctggcgcaggagaccggcctcaacatgcgcgtcatccaggtgtggtttcagaaccgacggtccaaagaacgccggatgaaacagctgagcgccctaggcgcccggaggcacgccttcttccggagtccgcggcgcatgcgtccgctgggcggccgcttggacgagtctgagatgttggggtccaccccgtacacctactacggagactaccaaggcgactactacgcgccgggaagcaactacgacttcttcgcgcacggcccgccttcgcaggcgcagtccccggccgactccagcttcctggcggcctctggccccggctcgacgccgctgggagcgctggaaccgccgctcgccggcccgcacgccgcggacaaccccaggttcaccgacatgatctcgcacccggacacaccgagccccgagccaggcctgccgggcacgctgcaccccatgcccggcgaggtattcagcggcgggcccagcccgcccttcccaatgagcggcaccagcggctacagcggacccctgtcgcatcccaaccccgagctcaacgaagccgccgtgtggtaaggccgccgggccgccccccgcgctcggcccccgggggccccgccccgaagcagcctcctgaaaccaaaacgcccgacgcagacgcggtgggagacgtgggtgtccctcgggggttctctctcgggtccgcactcaactggcagctgctcctcggctgggcgccgagggggggccgacccccatctccaccccgcgggctctccaggagcctcagcccaccgccagtactctcccagcaaccgcgagcaatttcttgggaccaaagtcaatactccggagggtcaagagatttcgagcacgctctagactttccccgggcccccacccacccacccagccaccgccacctctttggactgagagagggtgaggccaaggggcggagacggtgtttttccctctctctgcaatccgagtggcattttgtaatcttatttctcgctgtgctttccccgtctttaaaaaaaaagatgataagaaaaggagagagattgaaagagagggagaggaaagggggcaagatgaggaggagatggagagacagcgtcagccagagggagaagacggagagcgagcgaggaactcgcgtgaaccgggagccaccgagagggagaccgagccacctgcacgctggcgctccctggtggccaatcttgaggctcaaggtcagcttctctaggaatagggctgtgggtcaggaagtggccagccgggtccagctcccgctcttccttactttgacgtttatgttgagcccgagggagcaggccggactcgaacacgcacacatcctgctctccccctgggtggggcgccaggattgctgggctcagacccacagaccaccctccctgcccagggcctggaggctgggccgtcaggatgtacaatattatacttttttggaagttgaacgcttctagtttccttattttgtataaagaagaaacaaataaagtatgtttttgtgtttactgtttatttattgtactctagttatccggggttggacatttttatatttttaagaggaggtagggcagagtgacggaggggaagcagaaagaggtttacctaaaaaaaacaaaaaacaaaaacaaaaaaaatcaactttttttaaagagaaagattaataaaaaaaaatcttttttccctca

SEQ ID NO: 16319 - DNA, 2373 bp, Homo sapiens
  source 1..2373: mol_type = unassigned DNA
agaggcaagaggctagcggctggaccacttgtgctggagtggtaaagaactatcatgaatccatttactgaaagtgtccatttctgaactcaccctaaagaggacaaacaccgcaaagtagttaaaagtcaggcattcgcgtcggacgtctgggtttgaattctgccctggcttgactggaaacgcttcccctatttcttccgtagcggaccgggagagcttactggcgctctgcgaaccggctggaaagaaacaccgagtcactcgtacagactcttggtcgcagaacttggctttccgctattggtcctccagaaccgcttgaaacaactggccccagctggcgcatcagaccgcagtgaggaatgccgcggggcgggtggcgaaggcagggtctgcccgccagtggattcccgggtgtcccgcgtggagcaggcttgcccagctgggaagcccatcaaacctcagtcttggcccacagtgggagagagaccagtgggtcccagacggaggccctcgcccgcttttggcgacctccactggcgtgaataaaagcacccctctcttaccctcagaaactgtgggtagcaaggtataaaacggagtctgggaccggtaagtcccaaggtgagcccgtatacagctctgccatctctgaggggttatgcagattctgagcaggtgtcaggggctcatgtcagaggagtgcgggcggactacagccctggcggccgggaggactcgcaaaggcgccggggaagagggactggtgagccccgagggagcgggggacgaggactcgtgctcctcctcggccccgctgtccccgtcgtcctcgccccggtccatggcctcgggctccggctgccctcctggcaagtgtgtgtgcaacagttgcggcctggagatcgtggacaaataccttctcaaggtgaatgacctatgctggcatgtccggtgtctctcctgcagtgtttgcagaacctccctaggaaggcacaccagctgttatattaaagacaaagacattttctgcaaacttgattatttcagaaggtatggaactcgctgctctcgatgtgggagacacatccattctactgactgggtccggagagccaaggggaatgtctatcacttggcatgctttgcctgcttttcctgcaaaaggcaactttccacaggagaggagtttgctttggtggaagagaaagtcctctgcagagtacattatgactgcatgctggataatttaaaaagagaagtagaaaatgggaatgggattagtgtggaaggtgccctcctcacagagcaagatgttaaccatccaaaaccagcaaaaagagctcggaccagctttacagcagatcagcttcaggttatgcaagcacaatttgctcaggacaacaacccagatgcacagacactccagaaattggcagaaaggacaggcttgagcagacgtgtgatacaggtgtggtttcagaattgtagagcacgccacaagaaacacgtcagtcctaatcactcatcctccaccccagtcacagcagtcccaccctccaggctgtctccacccatgttagaagaaatggcttattctgcctacgtgccccaagatggaacgatgttaactgcgctgcatagttatatggatgctcattcaccaacaactcttggactccagcccttgttaccccattcaatgacacaactgccaataagtcatacctaattcttttttcagggatagacttgattaaggatataaatttgtcatttattatgtataaaataccattgaaaagatattactgttaattttttatttaacacctaaagcatttccaacatcactttgctgcccaggtatgtatctatagttggcctgcaagacacttttattaattcttcattttttgtaaaacttatgtttacaagaagaaaacaaatcaaaacattttttgtattgtctggaaatagttcactctagtgtgtatctgttaatttatttgtcatcaaaagagcactttgcctaaaagaaaggactgacaagtgtgcaaaatgtttacaatcttttgtgaaattgtagtttatcattagtttgtatctgtaagttattgtaataaatattacctgtattttttgttatatacaactttatactttgaagcttgtatctgtgaatttgcaactgaaatttattttgccaatgttttctgaatgaactgaataaagcttctgttgtagcatgccatgcaaacacattattgtgtttgtggttgatgaattatggctgtaaataacactatagtttaataagcccaccattctgagtttattaaacattttccattcttgtgaaaatttcaa

SEQ ID NO: 16320 - DNA, 1764 bp, Homo sapiens
  source 1..1764: mol_type = unassigned DNA
ctcacttaacctgagacatggagactgtaatttgggagatgaagcctcgagcctaaggcgctctcaggtccattgtcaggggctcatgtcagaggagtgcgggcggactacagccctggcggccgggaggactcgcaaaggcgccggggaagagggactggtgagccccgagggagcgggggacgaggactcgtgctcctcctcggccccgctgtccccgtcgtcctcgccccggtccatggcctcgggctccggctgccctcctggcaagtgtgtgtgcaacagttgcggcctggagatcgtggacaaataccttctcaaggtgaatgacctatgctggcatgtccggtgtctctcctgcagtgtttgcagaacctccctaggaaggcacaccagctgttatattaaagacaaagacattttctgcaaacttgattatttcagaaggtatggaactcgctgctctcgatgtgggagacacatccattctactgactgggtccggagagccaaggggaatgtctatcacttggcatgctttgcctgcttttcctgcaaaaggcaactttccacaggagaggagtttgctttggtggaagagaaagtcctctgcagagtacattatgactgcatgctggataatttaaaaagagaagtagaaaatgggaatgggattagtgtggaaggtgccctcctcacagagcaagatgttaaccatccaaaaccagcaaaaagagctcggaccagctttacagcagatcagcttcaggttatgcaagcacaatttgctcaggacaacaacccagatgcacagacactccagaaattggcagaaaggacaggcttgagcagacgtgtgatacaggtgtggtttcagaattgtagagcacgccacaagaaacacgtcagtcctaatcactcatcctccaccccagtcacagcagtcccaccctccaggctgtctccacccatgttagaagaaatggcttattctgcctacgtgccccaagatggaacgatgttaactgcgctgcatagttatatggatgctcattcaccaacaactcttggactccagcccttgttaccccattcaatgacacaactgccaataagtcatacctaattcttttttcagggatagacttgattaaggatataaatttgtcatttattatgtataaaataccattgaaaagatattactgttaattttttatttaacacctaaagcatttccaacatcactttgctgcccaggtatgtatctatagttggcctgcaagacacttttattaattcttcattttttgtaaaacttatgtttacaagaagaaaacaaatcaaaacattttttgtattgtctggaaatagttcactctagtgtgtatctgttaatttatttgtcatcaaaagagcactttgcctaaaagaaaggactgacaagtgtgcaaaatgtttacaatcttttgtgaaattgtagtttatcattagtttgtatctgtaagttattgtaataaatattacctgtattttttgttatatacaactttatactttgaagcttgtatctgtgaatttgcaactgaaatttattttgccaatgttttctgaatgaactgaataaagcttctgttgtagcatgccatgcaaacacattattgtgtttgtggttgatgaattatggctgtaaataacactatagtttaataagcccaccattctgagtttattaaacattttccattcttgtgaaaatttcaa

SEQ ID NO: 16321 - DNA, 2503 bp, Homo sapiens
  source 1..2503: mol_type = unassigned DNA
ggaacttgcaagcagccagggaacgctgaaaatagcacgtctttttctttctttgtgttcaaaactattttctttcttcaccagattttgttttcctccccccgctgcagttgtttcccattagtaactcgatctctcagagcagtaagattcgccttctacgcctctttttccctccgcccgaattgtttgttttctgcacatctccttcagggagccgctgaggcttccccccaactcttcccagttctttttgcttcccctcggccccccaagcagaccgatttccactccatctgtttcttctcctcctttctctccctctttccctccatcctcgagcgtctctgcgctcctacagggcagccctctctggtcccttgcctccttcactcggatgagctgaaagccccgggcgtgtgtatatggaaatagtggggtgccgagcagaagacaactcgtgtcctttccgccccccagccatgctctttcacgggatctccggaggccacatccaaggcatcatggaggagatggagcgcagatccaagactgaggcccgtctggccaaaggcgcccagctcaacggccgcgacgcgggcatgcccccgctcagcccggagaagcccgccctgtgcgccggctgcgggggcaagatctcggacaggtactatctgctggctgtggacaaacagtggcatctgagatgcctgaagtgctgtgaatgtaagctggccctcgagtccgagctcacctgctttgccaaggacggtagcatttactgcaaggaggattactacagaaggttctctgtgcagagatgtgcccgctgccaccttggcatttccgcctcggagatggtcatgcgcgcccgagactctgtctaccacctgagctgcttcacctgctccacttgcaacaagactctgaccacgggcgaccatttcggcatgaaggacagcctggtgtactgccgcgcccacttcgagaccctcttgcaaggagagtatccaccgcagctgagctacacggagctggcggccaagagcggcggcctggccctgccttacttcaacggtacgggcaccgtgcagaaagggcggccccggaagcggaagagcccagcgctgggagtggacatcgtcaattacaactcaggttgtaatgagaatgaggcagaccacttggaccgggaccagcagccttatccaccctcgcagaagaccaagcgcatgcgaacctctttcaagcatcaccagctccggaccatgaaatcctactttgccatcaaccacaacccggatgccaaggacctcaagcagcttgcccagaaaacaggtctgaccaaaagagttttgcaggtttggttccaaaacgcacgagccaaattcagaaggaaccttttgcggcaggagaatgggggtgttgataaagctgacggcacgtcgcttccggccccgccctcagcagacagcggagctctcactccacccggcactgcgaccactttaacagacctgaccaatcccactatcactgtagtgacatccgtgacctctaacatggacagccacgaatccggaagcccctcacaaactaccttaacaaaccttttctaacattggttttttttttttagtttttaaattcttcctcttctttttattattattctaattattattattttattatttacaagactttttttttcttctaacccacaagatatttggggaataaaaataacagcttggtgtgtagcatctgcagccacttggcaaatgagtttacagtattgtctcctttaagtgaatatattttgtctacaaagtgtatttggatttaaaaaaattaattaggtctttcagttggtaaggagagtttttgaataattctaataagtgcctcttaaaattgtatgttacttatttccagaatctcgaagaaaaaagaaaaaagagtggtattattatgggcaaataatcatattcccacttaaatgattaggttaataaagaaccagataattaattagttactttttaaatcttgcaattgtatgtgtgattatggagttttgaaaacgttacattttttaaatcttaaaactgaaaacttgtttttagtatttctatttcttacctgaactgttaattcaagtgaggaatatgatgaaataaaagcattaactacagacattttaaatagtaatgattaattaggtgagaaatctattacaggaatgtgacttttccttctcttaggggtgtacaactctaaaaactttttacttggttatttgtttttcaacatttgaaaaatacttaagctccctatgtatccatgaaaattccgcattgattttgacattccatacttttaacctcctaaagctaaaaacaatagctcggaaaccattctttctagttactttttttcccagggaaaatggaaataagcaaaatataatgttttaagaagtaaaaaaatcaatataatt

SEQ ID NO: 16322 - DNA, 7413 bp, Homo sapiens
  source 1..7413: mol_type = unassigned DNA
gcgtgatccactccttttcctctaagaatgctgaacggtaccactctagaggcagccatgctctttcacgggatctccggaggccacatccaaggcatcatggaggagatggagcgcagatccaagactgaggcccgtctggccaaaggcgcccagctcaacggccgcgacgcgggcatgcccccgctcagcccggagaagcccgccctgtgcgccggctgcgggggcaagatctcggacaggtactatctgctggctgtggacaaacagtggcatctgagatgcctgaagtgctgtgaatgtaagctggccctcgagtccgagctcacctgctttgccaaggacggtagcatttactgcaaggaggattactacagaaggttctctgtgcagagatgtgcccgctgccaccttggcatttccgcctcggagatggtcatgcgcgcccgagactctgtctaccacctgagctgcttcacctgctccacttgcaacaagactctgaccacgggcgaccatttcggcatgaaggacagcctggtgtactgccgcgcccacttcgagaccctcttgcaaggagagtatccaccgcagctgagctacacggagctggcggccaagagcggcggcctggccctgccttacttcaacggtacgggcaccgtgcagaaagggcggccccggaagcggaagagcccagcgctgggagtggacatcgtcaattacaactcaggttgtaatgagaatgaggcagaccacttggaccgggaccagcagccttatccaccctcgcagaagaccaagcgcatgcgaacctctttcaagcatcaccagctccggaccatgaaatcctactttgccatcaaccacaacccggatgccaaggacctcaagcagcttgcccagaaaacaggtctgaccaaaagagttttgcaggtttggttccaaaacgcacgagccaaattcagaaggaaccttttgcggcaggagaatgggggtgttgataaagctgacggcacgtcgcttccggccccgccctcagcagacagcggagctctcactccacccggcactgcgaccactttaacagacctgaccaatcccactatcactgtagtgacatccgtgacctctaacatggacagccacgaatccggaagcccctcacaaactaccttaacaaaccttttctaacattggttttttttttttagtttttaaattcttcctcttctttttattattattctaattattattattttattatttacaagactttttttttcttctaacccacaagatatttggggaataaaaataacagcttggtgtgtagcatctgcagccacttggcaaatgagtttacagtattgtctcctttaagtgaatatattttgtctacaaagtgtatttggatttaaaaaaattaattaggtctttcagttggtaaggagagtttttgaataattctaataagtgcctcttaaaattgtatgttacttatttccagaatctcgaagaaaaaagaaaaaagagtggtattattatgggcaaataatcatattcccacttaaatgattaggttaataaagaaccagataattaattagttactttttaaatcttgcaattgtatgtgtgattatggagttttgaaaacgttacattttttaaatcttaaaactgaaaacttgtttttagtatttctatttcttacctgaactgttaattcaagtgaggaatatgatgaaataaaagcattaactacagacattttaaatagtaatgattaattaggtgagaaatctattacaggaatgtgacttttccttctcttaggggtgtacaactctaaaaactttttacttggttatttgtttttcaacatttgaaaaatacttaagctccctatgtatccatgaaaattccgcattgattttgacattccatacttttaacctcctaaagctaaaaacaatagctcggaaaccattctttctagttactttttttcccagggaaaatggaaataagcaaaatataatgttttaagaagtaaaaaaatcaatataatttaattaatagctctattaattggcttcagctgtaccatgatattgtatctggcattctatatgaataatgtttaaaatacccagcctggtagacttataccaacaattggttttgttttgttttattttattttgacataggttgacttatgtattgaaaataatttttctgatattagagatttgaagttattagtcttaaagtagataaactcagaagccttgtggatgctgatctgaatatatttcctagtttacagtagcatttttttcttttaatttaagctaaaatcttaatggtctgggcagtggtgaatgttcatctattacgcttctgttgtagttaaataccaattagattgtggatttcctaaaaaaataaaaaagaagtcaagatatatgtcttgctttagtggattgttaagaataactttgcacatattttccactttttggaccccttaaatctcctttggtggtcgaagtggctatttaatagattttaaaggtgtccttctggctgtataaatgtgtggttacatattgacagttcactgcccacattaaagtgcattattgtaacttttgctcagggtctttagaaaattagcacagaaagtagcttattttttaaaaaaagatgatggaagataagttaacactgtaacagaagaaaggtgtgattgccattatatatttagcaagtatggttatcatcttatatggagcttaaatcttgacttttcatacttctattacattttgggcatttaccactaaccagaccaaacaaccttggtaaggctgagatcttattaatacacttttacaggtaaaatattgacacttataaattttgttctttgacagaacaatatatggtactatatagatctactttattaagtagactaattataactcagttctcctatgtgccttatgatataacttggaagtaagtttgtgaaaaatcaggatatatgtgttgtttgttaaattaactgttttaagcccttttaacacctcactagttttgtactgttttacctcttatttctgaaactctttttatggtgtatcctgttagaggggacaaacatgtcatagaaagcagttgtgcactctttcaaatatagttgataaattcaataatcttatatattgagcttcgtgtttatagtacagtaagtggtctagcaaaattgtccatgtttctttgtttattgataaatgcattgtatagaaactatttcccctaaatatttatggaccaaacaattgtgatatatcctattaaatttgtgtgaataaaacattttgaatctaaggagttttctttcccatcagttttatttaagttttaaccgtactagtgtgttccagcatctatatgtaaaagcttttcaaatggtaatacaacattgttagaaatatttaaacatacaaatagtttttagacttccaaacttctgattcatatgaaatgttacacattgttgcacaggcagtgtaattcaacctagaaatacctttgaatatatttgcttataacaaaagtaatgccccactgatttgactcagtccaatttttagaataaaaaggctaattagcatataaagtaattgcatggaacgaaaccttaaatatgattaagatttcatgttaggtctattgagcacaaatggatatttgtaaatctaaatagaaattgcagacccctaaaagccaagttgctctgtagttaataaattgtcactatgatttttttcagggagaacaaatcttggggcattacagccaaacatcccgacgtttgaaaattccctaaagtattaaaagaaggggaaaagtttgatcggaaatccactgcagtgaagacaaagacactattaggttatgataatcatacattaaaaaatttattaagccaaaaaaaaagagagagagagagacttaaatgtcatttactgaatgttaacgaaacttgtgttctttatggtgtctaacacaactgaaggcctaaaattatgtggtttaaacaaaattagataaaccatgtacaaaaccagagcaacctggcagtaatatgcccaccccatatttgaaaaaaattattattgaaaaaaatttcacacatttgtcaagcacagttgtaaaataaagtccaaaacattcatttcacctgcttgctaatgtgtattagtcctgttaatggcattttccaactgtaaattcaaagaaaagctatcacccatttaagagtatagggatcaaaccccagtaattttagcattattgtttatcacttcctttttaaacagaaatctctgcatgcacttttacatatgtcacctctagtgtacacctctgtatgatgacttatctttgctgtttcttgtatgataaatagctttcattaataaacatttatttgatgcaaacatagttaactttatgttaaacacatgctgttgaaattaattttgaacacttaaagaggcagcacagtacatttacaacttgttatactaatgaaaaaatacaaacagcatagtgagattaaattctggtaatctaggataaaattacttacttggtttttaccttttcatgacttattttcatttgttgtattcaattgccacatgtattaaaaataaaaaacaaagtgaacccaaattacaacaaaataaaccttagaataaactattgtgtaaaatttcagcaacttttttagattactagggtaaaatttatagatcctatgtgagtttacatgtttgctatgcaatgaacaaatttattgatgtatacaaatatattctgaactataaaaagatccaatctttgcatagttcaattacatatgattattacaaacaaaaaagcaaatggaaagacagacaaatatttaggaatgaggttttttttaattgttaaagggaatatttgaagaataaaattttagctattcctatttagccgtatatccaaagcatatgttaaacaaactaacatatactttccagaaaatttttcattatgatgaaatttttattatatacaaatgaaccctatgtaaatgatgtaacttttatgaatgacagacattaaatatttcacttacatgtattctcagaattttgaatgttttcttaaatgctttcacttcctgaataataaaaagaaaaaattttaaagaagagagagcaacttactaataaaaaaaagcaatgcaccatgacaagtagactattttgagtgatcacaaatcatgctggttttgtcagtaacttgaatgtttatgcctcattgaaacctcatccacagctatagcaacttaaatagattttccaatgcatttccagccagtttattcaaatctttgccctacagtcttgccttctttccctgttctgtcacctgtggcaatttcatttagaagtattttggaacttcgcctggttttacagacctttaaatatttgtctggtatgtgaaatgcaggaagagaccagagagggaaagaacataactgaaattagacatctgaaaaaaaaatacaaatttgaaacaggcacattttttaaaaccaaaaaaaaaaaaaaaaagagagagagagagaaaggagtactaattatgtgagtgggaagaggaagcgtgtgatgcagagctggaaggtctgttgtgctttactgtgatgtaaagcagtctttgagtctgggcaactgcacatttactgtttggtgtggaatagaaaaatgtggacctcttagttgagagcaggacactaaattttcatagcttctacctcccagttgcctgggttagtctaacttctggcagattgatcttgggcaaaaagcttcactgagagttagtgtctgtgtgctttggttgaatagccaccttaatactgacttacatagtgggtaggtttttgatacctcaaataaggataaaactccataataaaggacccaaagcaaatacttttaaaacttaggtgatttttcatcacctaaaacataaatagctttatttagcaaaatcccagtggaatctaccacacattcttttataataacccttttttgggagtcaaagtattgtttttttattagccacatataaatatcatctcattttctgttgcagtgtgactgcaaggcatgttgtggtggaaatcattagaactgggaagctctggaatggaaatttggaatcgtgtcattctaggctcttaaagagaatattagggataatactgttgtaaaaaataaatataaacacctaattttgtatgaagttttgctatttaaattttaactatgttataaacaaagctagctttacttgtagagagttcgtgtactcttgagctcattcaatagcttttacattttgtagtctcttccacaacagggcaaaataagcacagtaggacttagtccaaattgacgaaatatcattgaattttctttgaaagcatatatatagataaactctggattggtcttttagatctgttttctgtttttagtaattgggaacaaactcttgatattaaaataaataaaatgcctctaatgtaaagccacagccctgcttctagccaatgtcaaaaataggaagtttttttaatggtttactgttgattttaaacattttaataatagtgctctgccctcacaacagtttttttttcagaataatattatgatttaccttattttaaaaataaattataattctaacttaaaatattattttaaatgcccctctgggaagatttccgttttattttatgaggttccctggcagttgggggggtggtgaggttgggagagggaaagtttagaactgtgcatgatactcaaggaaaagtctatgaatatgatgtaagtagtaacattattgccacaactaaatttctgtttaactgtgttgcagaatatgataatgtcatctaacatcactccctacttgcaacattcctctgtgaatattaatatagttaaccctcccttattatgtatcatatcaataagtttctcttcccttggattaatttttgcttctttgcattacattttatcttgtgctaagataacaaaaagcaagcaagaataaagatccagatattagccatatgtagaaagttcctggtgtgcatttctgtgtacttttccctcacatattagaattgtcaggaaagtttttttcttttggaactttctgtttacattttgcatgatcttataaattaacctgaagagtaattggataccttttatggttatttgaaaataaaatttgctacaaataaga

SEQ ID NO: 16323 - DNA, 3350 bp, Homo sapiens
  source 1..3350: mol_type = unassigned DNA
ctcttttgcttctgcagacattcccggcactggccgactggcgggaggacctccccgcgcgccccgcacaccggctcctgcgcgcaccccaacagagcgcagcgccaggagtccagaagcgggcgggacgccctccgggtcccttacagtgccccttctcgacctggggcaggtcctcccggcccggcccgaacatgctggacggcctaaagatggaggagaacttccaaagcgcgatcgacacctcggcctccttctcctcgctgctgggcagagcggtgagccccaagtctgtctgcgagggctgtcagcgggtcatcttggacaggtttctgctgcggctcaacgacagcttctggcatgagcagtgcgtgcagtgcgcctcctgcaaagagcccctggagaccacctgcttctaccgggacaagaagctgtactgcaagtatgactacgagaagctgtttgctgttaaatgtgggggctgcttcgaggccatcgctcccaatgagtttgttatgcgggcccagaagagtgtataccacctgagctgcttctgctgctgtgtctgcgagcgacagcttcagaagggtgatgagtttgtcctgaaggaggggcagctgctctgcaaaggggactatgagaaggagcgggagctgctcagcctggtgagcccagcagcctcagactcaggtaaaagtgatgatgaagaaagtctctgcaagtcagcccatggggcagggaaaggaactgctgaggaaggcaaggaccataagcgccccaaacgtccgagaaccatcttgacaactcaacagaggcgagcattcaaggcctcatttgaagtatcctccaagccctgcaggaaggtgagagagactctggctgcagagacagggctgagtgtccgtgtcgtccaggtgtggttccaaaaccagagagcgaagatgaagaagctggccaggcgacagcagcagcagcagcaagatcagcagaacacccagaggctgagctctgctcagacaaacggtggtgggagtgctgggatggaaggaatcatgaacccctacacggctctgcccaccccacagcagctcctggccatcgagcagagtgtctacagctcagatcccttccgacagggtctcaccccaccccagatgcctggagaccacatgcacccttatggtgccgagccccttttccatgacctggatagcgacgacacctccctcagtaacctgggtgattgtttcctagcaacctcagaagctgggcctctgcagtccagagtgggaaaccccattgaccatctgtactccatgcagaattcttacttcacatcttgagtcttcccctagagttctgtgactaggctcccatatggaacaaccatattctttgaggggtcactggctttaggacagggaggccagggaagaggtgggttggggagggagttttgttggggatgctgttgtataatgatatggtgtagctcagcatttccaaagactgaatacattatggattgcatagtttaatgtttctaataagagtcttagcattagatatgaagacgtgtttatcattaaggacagagacttttaatatagacattctcatgcaaactagatacttagggactcctaacaacttcccaccatgtcggggaagctcttgtcaagaggtgcatatgtctatccatctacacaccaatagacagaaggacagatagatagatgtgtgtgtgtgagtgtgtaacctttcgtattttaccctcaaagtttattcctaattataacagacaccaactgtacagcaaaagtaactttattttcagtgtgaactatatttaaggaaatgcttgatgcacttaagttataaaatgagataatttacttttataaactttatttttagcttgacaagacttgtcagcagggcagagagggctgctccacctagccccatagctttgagtgctggggttcattctgttttcagagtgtctttcagatctggaaagaaattctgtgtggctgatggtgttctctcttgcattcttgctctctttggggttgaatcactgggcaggggtgggacagaataatctctgatcatgttctgagaaaatgtaaagcccagactcctgggctttcttttaaattctgacaagtggttgttgggcagtgctaggatgattggttcagctcttgagcttcagcatctgcaaatgtggatgaggctaatagtatgtacctacctcactgggaaacaccaaggcttaattcattcccaggacacatgagcagggctgagactaatatctgatatttgtttaagatacaaccaggccactcacttggcaaaggagggtacatagggttgcagagcaggagggctcctgaactccagagggcagttctgcctgctgaagtccctctgcaaagcctgtgctgaaggagacaccagctcagagcagttcagagggatcccagagtcccagagtggggaggaggtgaaggctgaggggatagaggagggcctggtggtgttctagagcagggttgggcaaactcctgcttgcgggcctgctttctatggcttgccagcaaagaatggtttttactttttttttgaggtcattaaaaaaaaggagaagaagaatatataacaggctgtctgtggcctggaaagcctgaaatatttgctatctgtattgtctggcccttacagaaaaagtttggggccccttgttttagagggtctgtttctaaagaacctcatggcgctcatagaggcagaaggttccagtggaaacccttggctcttccttccaactcactcctctgatcctcggcacagaagacccagcagccattgtacatggggacagttccacaccctggtctccagttgcggtgctaggatggtattgttctgtgctaggaagtctcctgggaacccagaatgagttggtggggaagacagcgggtcactgtggacccatccaggaggggccaggataggcttggcctcatttctggggacatcattggagacttgaacacagagacacgtccctatcactctggcaaggccagagggaacatgtccccttatggtagagtctatgttgtgtgatttttgtgctcttgtttataatttatgcaaaccaccaagaaacccaaaccagtctgatgagtgaaaattatgcagatgctgtatggccccacaggtttctgtggtaaagaccagttggagaatgtaggagatactatgtgagtgaaaatgaatagagatccttattccactccttaatggcataccaagatgaaattaaaatctcttac

SEQ ID NO: 16324 - DNA, 3545 bp, Homo sapiens
  source 1..3545: mol_type = unassigned DNA
agaagctgcaggatccgccccggcgaagcagggccgactcgcacccaggaccctgggcctctgccttccctcctagccttggagaagcaactggccctctcctcccgctgaggagcgacgcgggctggtaggacgtcccgggaaggccggcagctcgcgaccacgtcccggcccagcctgggcgcgccgaggagcagagccagcggccggcgttcgctccggctccctccccggcgctccgaagccgagggcggctcctccggctgcagtctcgggggcgacgccttcccgggcagaagcttccagcagcgctccgcaacttctctctgctccagtcactgggagagagctcgcctaccaggtcctcccggcccggcccgaacatgctggacggcctaaagatggaggagaacttccaaagcgcgatcgacacctcggcctccttctcctcgctgctgggcagagcggtgagccccaagtctgtctgcgagggctgtcagcgggtcatcttggacaggtttctgctgcggctcaacgacagcttctggcatgagcagtgcgtgcagtgcgcctcctgcaaagagcccctggagaccacctgcttctaccgggacaagaagctgtactgcaagtatgactacgagaagctgtttgctgttaaatgtgggggctgcttcgaggccatcgctcccaatgagtttgttatgcgggcccagaagagtgtataccacctgagctgcttctgctgctgtgtctgcgagcgacagcttcagaagggtgatgagtttgtcctgaaggaggggcagctgctctgcaaaggggactatgagaaggagcgggagctgctcagcctggtgagcccagcagcctcagactcaggtaaaagtgatgatgaagaaagtctctgcaagtcagcccatggggcagggaaaggaactgctgaggaaggcaaggaccataagcgccccaaacgtccgagaaccatcttgacaactcaacagaggcgagcattcaaggcctcatttgaagtatcctccaagccctgcaggaaggtgagagagactctggctgcagagacagggctgagtgtccgtgtcgtccaggtgtggttccaaaaccagagagcgaagatgaagaagctggccaggcgacagcagcagcagcagcaagatcagcagaacacccagaggctgagctctgctcagacaaacggtggtgggagtgctgggatggaaggaatcatgaacccctacacggctctgcccaccccacagcagctcctggccatcgagcagagtgtctacagctcagatcccttccgacagggtctcaccccaccccagatgcctggagaccacatgcacccttatggtgccgagccccttttccatgacctggatagcgacgacacctccctcagtaacctgggtgattgtttcctagcaacctcagaagctgggcctctgcagtccagagtgggaaaccccattgaccatctgtactccatgcagaattcttacttcacatcttgagtcttcccctagagttctgtgactaggctcccatatggaacaaccatattctttgaggggtcactggctttaggacagggaggccagggaagaggtgggttggggagggagttttgttggggatgctgttgtataatgatatggtgtagctcagcatttccaaagactgaatacattatggattgcatagtttaatgtttctaataagagtcttagcattagatatgaagacgtgtttatcattaaggacagagacttttaatatagacattctcatgcaaactagatacttagggactcctaacaacttcccaccatgtcggggaagctcttgtcaagaggtgcatatgtctatccatctacacaccaatagacagaaggacagatagatagatgtgtgtgtgtgagtgtgtaacctttcgtattttaccctcaaagtttattcctaattataacagacaccaactgtacagcaaaagtaactttattttcagtgtgaactatatttaaggaaatgcttgatgcacttaagttataaaatgagataatttacttttataaactttatttttagcttgacaagacttgtcagcagggcagagagggctgctccacctagccccatagctttgagtgctggggttcattctgttttcagagtgtctttcagatctggaaagaaattctgtgtggctgatggtgttctctcttgcattcttgctctctttggggttgaatcactgggcaggggtgggacagaataatctctgatcatgttctgagaaaatgtaaagcccagactcctgggctttcttttaaattctgacaagtggttgttgggcagtgctaggatgattggttcagctcttgagcttcagcatctgcaaatgtggatgaggctaatagtatgtacctacctcactgggaaacaccaaggcttaattcattcccaggacacatgagcagggctgagactaatatctgatatttgtttaagatacaaccaggccactcacttggcaaaggagggtacatagggttgcagagcaggagggctcctgaactccagagggcagttctgcctgctgaagtccctctgcaaagcctgtgctgaaggagacaccagctcagagcagttcagagggatcccagagtcccagagtggggaggaggtgaaggctgaggggatagaggagggcctggtggtgttctagagcagggttgggcaaactcctgcttgcgggcctgctttctatggcttgccagcaaagaatggtttttactttttttttgaggtcattaaaaaaaaggagaagaagaatatataacaggctgtctgtggcctggaaagcctgaaatatttgctatctgtattgtctggcccttacagaaaaagtttggggccccttgttttagagggtctgtttctaaagaacctcatggcgctcatagaggcagaaggttccagtggaaacccttggctcttccttccaactcactcctctgatcctcggcacagaagacccagcagccattgtacatggggacagttccacaccctggtctccagttgcggtgctaggatggtattgttctgtgctaggaagtctcctgggaacccagaatgagttggtggggaagacagcgggtcactgtggacccatccaggaggggccaggataggcttggcctcatttctggggacatcattggagacttgaacacagagacacgtccctatcactctggcaaggccagagggaacatgtccccttatggtagagtctatgttgtgtgatttttgtgctcttgtttataatttatgcaaaccaccaagaaacccaaaccagtctgatgagtgaaaattatgcagatgctgtatggccccacaggtttctgtggtaaagaccagttggagaatgtaggagatactatgtgagtgaaaatgaatagagatccttattccactccttaatggcataccaagatgaaattaaaatctcttacaaatga

SEQ ID NO: 16325 - DNA, 1342 bp, Homo sapiens
  source 1..1342: mol_type = unassigned DNA
ctgatctctcctcccaccctacattctcttggctggaccctatcctcctggctgattctggtcgccctggacactccctcagttctttcccaggagtgcggtggctgctggcgccgagtcccagcgggcacggacgtcagacgcatcgtttcttctcctctacaggtcctcccggcccggcccgaacatgctggacggcctaaagatggaggagaacttccaaagcgcgatcgacacctcggcctccttctcctcgctgctgggcagagcggtgagccccaagtctgtctgcgagggctgtcagcgggtcatcttggacaggtttctgctgcggctcaacgacagcttctggcatgagcagtgcgtgcagtgcgcctcctgcaaagagcccctggagaccacctgcttctaccgggacaagaagctgtactgcaagtatgactacgagaagctgtttgctgttaaatgtgggggctgcttcgaggccatcgctcccaatgagtttgttatgcgggcccagaagagtgtataccacctgagctgcttctgctgctgtgtctgcgagcgacagcttcagaagggtgatgagtttgtcctgaaggaggggcagctgctctgcaaaggggactatgagaaggagcgggagctgctcagcctggtgagcccagcagcctcagactcaggtaaaagtgatgatgaagaaagtctctgcaagtcagcccatggggcagggaaaggaactgctgaggaaggcaaggaccataagcgccccaaacgtccgagaaccatcttgacaactcaacagaggcgagcattcaaggcctcatttgaagtatcctccaagccctgcaggaaggtgagagagactctggctgcagagacagggctgagtgtccgtgtcgtccaggtgtggttccaaaaccagagagcgaagatgaagaagctggccaggcgacagcagcagcagcagcaagatcagcagaacacccagaggctgagctctgctcagacaaacggtggtgggagtgctgggatggaaggaatcatgaacccctacacggctctgcccaccccacagcagctcctggccatcgagcagagtgtctacagctcagatcccttccgacagggtctcaccccaccccagatgcctggagaccacatgcacccttatggtgccgagccccttttccatgacctggatagcgacgacacctccctcagtaacctgggtgattgtttcctagcaacctcagaagctgggcctctgcagtccagagtgggaaaccccattgaccatctgtactccatgcagaattcttacttcacatcttgagtcttc

SEQ ID NO: 16326 - DNA, 5809 bp, Homo sapiens
  source 1..5809: mol_type = unassigned DNA
gcgtcccatggatatagcaacaggtcccgagtcgctggagaggtgcttccctcgcgggcagacggactgcgccaagatgttggacggcatcaagatggaggagcacgccctgcgccccgggcccgccactctgggggtgctgctgggctccgactgcccgcatcccgccgtctgcgagggctgccagcggcccatctccgaccgcttcctgatgcgagtcaacgagtcgtcctggcacgaggagtgtttgcagtgcgcggcgtgtcagcaagccctcaccaccagctgctacttccgggatcggaaactgtactgcaaacaagactaccaacagctcttcgcggccaagtgcagcggctgcatggagaagatcgcccccaccgagttcgtgatgcgggcgctggagtgcgtgtaccacctgggctgcttctgctgctgcgtgtgtgaacggcagctacgcaagggcgacgaattcgtgctcaaggagggccagctgctgtgcaagggtgactacgagaaggagaaggacctgctcagctccgtgagccccgacgagtccgactccgtgaagagcgaggatgaagatggggacatgaagccggccaaggggcagggcagtcagagcaagggcagcggggatgacgggaaggacccgcggaggcccaagcgaccccggaccatcctcaccacgcagcagcgaagagccttcaaggcctccttcgaggtctcgtcgaagccttgccgaaaggtccgagagacactggcagctgagacgggcctcagtgtgcgcgtggtccaggtctggtttcagaaccaaagagcaaagatgaagaagctggcgcggcggcaccagcagcagcaggagcagcagaactcccagcggctgggccagggtgagccggggccggggcagggcctgggccaggaggtcctgtccagccgcatggagggcatgatggcttcctacacgccgctggccccaccacagcagcagatcgtggccatggaacagagcccctacggcagcagcgaccccttccagcagggcctcacgccgccccaaatgccagggaacgactccatcttccatgacatcgacagcgatacctccttaaccagcctcagcgactgcttcctcggctcctcagacgtgggctccctgcaggcccgcgtggggaaccccatcgaccggctctactccatgcagagttcctacttcgcctcctgagagccagccaggcgcacggacgcttgggcaggggcctgggggggactgccagcctctgcggccagcctggccacccccgccctgctctccgcacagactacagacagccatacggtgccctcccctcggccagctgggcctgaccactgtgcccgttgggtacagccagaccggtagatgggcacagcctgggcaggggctgtgtcctgcccacagagaccttgtcatccccagggacccagagctctcggacggccactcgcctcccagccccacctcggcctccatcgcctcctccccatctcttttttgggaagcttaaattctctctatttttttaaatgtcctctctgtgtccatggccctccatgcaagccccaggacaatggtgtcatgaggcggtgacctgagaagcgtgtgtacctgtgccccagcaagggcaggggtggcctctgggggcaggcccactgcctggaaccgcacacccctcagcctgagtctggagcagcagtggagaggggcctgaggggaggcactgtcaggaggcgggctcggagcctgagcctgggcaggcgcaaagggacagagaggcacgtgcagacacatgcacacttgcagacaaacccacgcaaacacacacacagctgtatggggacaccagaagggacagggatgctcagcgggtctgtcctgccttgtcagaaagagaaaaggaggccaggcaggggaccccccagttcttaagagcgattggaaagggaggaaggggagaggaagaggcgaacttgaagcatcggacccagttgtatcccagcctgggcccaaatgggggcagcctgggcagggagggcagccccaggccccaccaactctagaggcagatggagcccccagaaccaggtagcatcagaccagacaacagagcctccaggggtcagggacttcagaagcacctgctgggcaccccatctgcaatgtggtcctctccccagccacctctgcctcccctcacatacctccagtgacaaggagctcactaggtcagcgagcccacagcagctgtgctgtcctgcatcccagagccaggcttccccagctctccctcttaacactgtcccccagcaggcctccggctgtccctctaaaggtgtggggcaggtatcacttcaccttcccactgatgtcagccggccagaagtgagcaggcacatcacctctcctgctgtggcacccttcctctgttaatttggcccaaaagacaatgatttggccacatgaccttagagattcaccctgccctgctgtagctaaatccctgggccccacacgcaagtgacagctaagccacatctgttttctgtgtatatgcaggatgggggcacctactgttttgttttgttttgttttgttttgttttgttttgttttgttttgttttgtttgagacggagtttcgctcttgttgcccaggctggagtgcaatggcgcgatctcggctcaccacaacctccgcctcccaggttcaagtgattctgatgcctcagcctccctagtagctgagattacaggcatgcgccaccacacccagctaattttgtatttttagtagcaacggggtttctccatgttggtcaggctggtctccaacccccgacctcaggtgatccgcctgcctcggcctcccaaagtgctgggattacaggcgtgagccaccgcacccagtctgcacttactgtttagactgaatgagggaccgtgacctctttccttttccattccttcttactcgattcattccagcctgtggaatttctctgcaccctgattcagtgaccactgctctcctctctcccagcacatctgcccagtgaggagttggccctgggtctcacctgaggtgtgtggaccgggctggcctctccctgtttgacattggcccattaatgcatcctctttgggggacacattccaattgcatttcctgcccccttctcccagggcaattgcagaagattgtgtcaggcgccctgctggaagtcaggtgcactagatccatccccagccccagtctgctcaactctatccctgtcagagcaaggaggctgggctgctggggcctgactggtgagcccaccctgtcccctggtgatcactgtgtccccttgttcaggtgctcacaaccctacctttaactctgaggtcaagccctaggccaccaccctaaagtctgcctggtccaacctttgagcaagtaaggataatgaatgtcccttttccacctttggggccctctgcctggatctctggaatcctctaagttcaacctgttctgtggttttgctcccgtttgctgggaaattcagtccccccagaatgtcctgggccaacctccttgcctgacatgtggcctcgtgtcacccattgggccccagcagccagctagcccttctgcagctcttcttacaaacagagcctctccaaggacctcagttgatgttctggtccttctgccgcctcagcccaccagggtccgtgccaccatgggtctcttgagcagcagctgcactggcttctggagagacacccctctttctccttttgcacatgcaccatctgaatcgtgccagggacatcctgggcagattcaggggcagatgccctatcccccaggagacctggcccttctctctcagacccaataagttggaagggacgtcagaagcggtcatctcatctgccccttattttatagttggaaaccctgaggcaagagagggaaagaggcctgtccaaggtccgggttagtgacagagctgagctgagaacagggacgttgtgccccactgtcccctgtggtttgtgaatgacctccaggtcagggggtcacaacttgttcttagtaaacttgccagctgttggggtcacatattcccattctggggcctcacaaacccccgaatccagccgggaccccatgccaggagctggtctagggacagcatgcttgtgacccacagactgttaaagccagaagggacctcagagagtcccttatgctggaggcgccctgtcagccgtggctaggggccccttgctctatgctgtgccttgctgcccacaggctcccagacaccagtgcccactctgcccagccccggactgggtgtggctcgcagatgaacaagatgcagggcctgccttgaggggtgtctcctagaaggaaagccagactctccggcccagccagagagtccagacatggcagggacccgtttctcagatgaggagcctgaggctcagagaagggaggcgatgtgttcagggccacccagcagaagcctgtggggctgggcaaccttctcccactttatgggaggagctgcagccttggctgggagctgggcggggagtagccaggaccaccccttgcccgtgccgtgacatggaaccttcatcactaagggggctggagtgggaagagggagataactgtgtggtctccagagcaaaagagaatgagaggtgggcagggggagtcttggcaaaagaccaagttccacttccctgctggggaagtcaaggctcagaaagaggaaataattgccccaggtaacacagggcagaggagggacaaaaagctgggcatggccccagccagagcctcatctgcctactccgtgaagcctcccaggtactctgctatcctgggaaacgcacagggaggccacacagagacactgctcacaagagtcagaccaaggtgccagcacagcctggaaagagctcagaaagggggttggtgcacgtggctgggcatcttaggaggcttcctgagggtgggtaaaggtgggaaggccctggcgctgcatcagatgagcagggcctggcagggacaagcctcttctcctttgggaagccctgcagcctcctagcaagaggctgattccccactctgcccccatctgaatgtccttttcatgttgcacgcagggaacctcaggaaggaggattgcctgatgcctgcctggctccatccttgagctctgggcaccacctagggtgagggagagcctgcagctctggggctaagtctgccctggggggaaagggctccacgctcacacgcacgcgctcgcacacacacactcacacctggacgcacacggaggcttgcggacccatactcacaggcacatgtggcctggggactgggggagcaggaaagacccctccaacatttggcccttggaaggcaccattgccaatgagcctctttgctggttcccccgaccccacctgggggtcccatgggagcccagcccagccaggtgtggggatgggccaccggccattcctgttttccttgtacagacagattctcactacccacccgccatccccagacacattttatttaataacttgtcattgttaaattatttattagcgtttaccacaccaccacccccaccctgccctccactctcaccttccacctcttcccacaacagcagaaaatggaaacaacaacaaaaaaagatgagacatcagtatatttgtaaataaaccgacctgtacactc

SEQ ID NO: 16327 - DNA, 1522 bp, Homo sapiens
  source 1..1522: mol_type = unassigned DNA
gcgtcccatggatatagcaacaggtcccgagtcgctggagaggtgcttccctcgcgggcagacggactgcgccaagatgttggacggcatcaagatggaggagcacgccctgcgccccgggcccgccactctgggggtgctgctgggctccgactgcccgcatcccgccgtctgcgagggctgccagcggcccatctccgaccgcttcctgatgcgagtcaacgagtcgtcctggcacgaggagtgtttgcagtgcgcggcgtgtcagcaagccctcaccaccagctgctacttccgggatcggaaactgtactgcaaacaagactaccaacagctcttcgcggccaagtgcagcggctgcatggagaagatcgcccccaccgagttcgtgatgcgggcgctggagtgcgtgtaccacctgggctgcttctgctgctgcgtgtgtgaacggcagctacgcaagggcgacgaattcgtgctcaaggagggccagctgctgtgcaagggtgactacgagaaggagaaggacctgctcagctccgtgagccccgacgagtccgactccgtgaagagcgaggatgaagatggggacatgaagccggccaaggggcagggcagtcagagcaagggcagcggggatgacgggaaggacccgcggaggcccaagcgaccccggaccatcctcaccacgcagcagcgaagagccttcaaggcctccttcgaggtctcgtcgaagccttgccgaaaggtccgagagacactggcagctgagacgggcctcagtgtgcgcgtggtccaggtctggtttcagaaccaaagagcaaagatgaagaagctggcgcggcggcaccagcagcagcaggagcagcagaactcccagcggctgggccaggaggtcctgtccagccgcatggagggcatgatggcttcctacacgccgctggccccaccacagcagcagatcgtggccatggaacagagcccctacggcagcagcgaccccttccagcagggcctcacgccgccccaaatgccaggtgaccacatgaacccctatgggaacgactccatcttccatgacatcgacagcgatacctccttaaccagcctcagcgactgcttcctcggctcctcagacgtgggctccctgcaggcccgcgtggggaaccccatcgaccggctctactccatgcagagttcctacttcgcctcctgagagccagccaggcgcacggacgcttgggcaggggcctgggggggactgccagcctctgcggccagcctggccacccccgccctgctctccgcacagactacagacagccatacggtgccctcccctcggccagctgggcctgaccactgtgcccgttgggtacagccagaccggtagatgggcacagcctgggcaggggctgtgtcctgcccacagagaccttgtcatccccagggacccagagctctcggacggccactcgcctcccagccccacctcggcctccatcgcctcctccccatctct

SEQ ID NO: 16328 - DNA, 5776 bp, Homo sapiens
  source 1..5776: mol_type = unassigned DNA
gcgtcccatggatatagcaacaggtcccgagtcgctggagaggtgcttccctcgcgggcagacggactgcgccaagatgttggacggcatcaagatggaggagcacgccctgcgccccgggcccgccactctgggggtgctgctgggctccgactgcccgcatcccgccgtctgcgagggctgccagcggcccatctccgaccgcttcctgatgcgagtcaacgagtcgtcctggcacgaggagtgtttgcagtgcgcggcgtgtcagcaagccctcaccaccagctgctacttccgggatcggaaactgtactgcaaacaagactaccaacagctcttcgcggccaagtgcagcggctgcatggagaagatcgcccccaccgagttcgtgatgcgggcgctggagtgcgtgtaccacctgggctgcttctgctgctgcgtgtgtgaacggcagctacgcaagggcgacgaattcgtgctcaaggagggccagctgctgtgcaagggtgactacgagaaggagaaggacctgctcagctccgtgagccccgacgagtccgactccgtgaagagcgaggatgaagatggggacatgaagccggccaaggggcagggcagtcagagcaagggcagcggggatgacgggaaggacccgcggaggcccaagcgaccccggaccatcctcaccacgcagcagcgaagagccttcaaggcctccttcgaggtctcgtcgaagccttgccgaaaggtccgagagacactggcagctgagacgggcctcagtgtgcgcgtggtccaggtctggtttcagaaccaaagagcaaagatgaagaagctggcgcggcggcaccagcagcagcaggagcagcagaactcccagcggctgggccaggaggtcctgtccagccgcatggagggcatgatggcttcctacacgccgctggccccaccacagcagcagatcgtggccatggaacagagcccctacggcagcagcgaccccttccagcagggcctcacgccgccccaaatgccagggaacgactccatcttccatgacatcgacagcgatacctccttaaccagcctcagcgactgcttcctcggctcctcagacgtgggctccctgcaggcccgcgtggggaaccccatcgaccggctctactccatgcagagttcctacttcgcctcctgagagccagccaggcgcacggacgcttgggcaggggcctgggggggactgccagcctctgcggccagcctggccacccccgccctgctctccgcacagactacagacagccatacggtgccctcccctcggccagctgggcctgaccactgtgcccgttgggtacagccagaccggtagatgggcacagcctgggcaggggctgtgtcctgcccacagagaccttgtcatccccagggacccagagctctcggacggccactcgcctcccagccccacctcggcctccatcgcctcctccccatctcttttttgggaagcttaaattctctctatttttttaaatgtcctctctgtgtccatggccctccatgcaagccccaggacaatggtgtcatgaggcggtgacctgagaagcgtgtgtacctgtgccccagcaagggcaggggtggcctctgggggcaggcccactgcctggaaccgcacacccctcagcctgagtctggagcagcagtggagaggggcctgaggggaggcactgtcaggaggcgggctcggagcctgagcctgggcaggcgcaaagggacagagaggcacgtgcagacacatgcacacttgcagacaaacccacgcaaacacacacacagctgtatggggacaccagaagggacagggatgctcagcgggtctgtcctgccttgtcagaaagagaaaaggaggccaggcaggggaccccccagttcttaagagcgattggaaagggaggaaggggagaggaagaggcgaacttgaagcatcggacccagttgtatcccagcctgggcccaaatgggggcagcctgggcagggagggcagccccaggccccaccaactctagaggcagatggagcccccagaaccaggtagcatcagaccagacaacagagcctccaggggtcagggacttcagaagcacctgctgggcaccccatctgcaatgtggtcctctccccagccacctctgcctcccctcacatacctccagtgacaaggagctcactaggtcagcgagcccacagcagctgtgctgtcctgcatcccagagccaggcttccccagctctccctcttaacactgtcccccagcaggcctccggctgtccctctaaaggtgtggggcaggtatcacttcaccttcccactgatgtcagccggccagaagtgagcaggcacatcacctctcctgctgtggcacccttcctctgttaatttggcccaaaagacaatgatttggccacatgaccttagagattcaccctgccctgctgtagctaaatccctgggccccacacgcaagtgacagctaagccacatctgttttctgtgtatatgcaggatgggggcacctactgttttgttttgttttgttttgttttgttttgttttgttttgttttgttttgtttgagacggagtttcgctcttgttgcccaggctggagtgcaatggcgcgatctcggctcaccacaacctccgcctcccaggttcaagtgattctgatgcctcagcctccctagtagctgagattacaggcatgcgccaccacacccagctaattttgtatttttagtagcaacggggtttctccatgttggtcaggctggtctccaacccccgacctcaggtgatccgcctgcctcggcctcccaaagtgctgggattacaggcgtgagccaccgcacccagtctgcacttactgtttagactgaatgagggaccgtgacctctttccttttccattccttcttactcgattcattccagcctgtggaatttctctgcaccctgattcagtgaccactgctctcctctctcccagcacatctgcccagtgaggagttggccctgggtctcacctgaggtgtgtggaccgggctggcctctccctgtttgacattggcccattaatgcatcctctttgggggacacattccaattgcatttcctgcccccttctcccagggcaattgcagaagattgtgtcaggcgccctgctggaagtcaggtgcactagatccatccccagccccagtctgctcaactctatccctgtcagagcaaggaggctgggctgctggggcctgactggtgagcccaccctgtcccctggtgatcactgtgtccccttgttcaggtgctcacaaccctacctttaactctgaggtcaagccctaggccaccaccctaaagtctgcctggtccaacctttgagcaagtaaggataatgaatgtcccttttccacctttggggccctctgcctggatctctggaatcctctaagttcaacctgttctgtggttttgctcccgtttgctgggaaattcagtccccccagaatgtcctgggccaacctccttgcctgacatgtggcctcgtgtcacccattgggccccagcagccagctagcccttctgcagctcttcttacaaacagagcctctccaaggacctcagttgatgttctggtccttctgccgcctcagcccaccagggtccgtgccaccatgggtctcttgagcagcagctgcactggcttctggagagacacccctctttctccttttgcacatgcaccatctgaatcgtgccagggacatcctgggcagattcaggggcagatgccctatcccccaggagacctggcccttctctctcagacccaataagttggaagggacgtcagaagcggtcatctcatctgccccttattttatagttggaaaccctgaggcaagagagggaaagaggcctgtccaaggtccgggttagtgacagagctgagctgagaacagggacgttgtgccccactgtcccctgtggtttgtgaatgacctccaggtcagggggtcacaacttgttcttagtaaacttgccagctgttggggtcacatattcccattctggggcctcacaaacccccgaatccagccgggaccccatgccaggagctggtctagggacagcatgcttgtgacccacagactgttaaagccagaagggacctcagagagtcccttatgctggaggcgccctgtcagccgtggctaggggccccttgctctatgctgtgccttgctgcccacaggctcccagacaccagtgcccactctgcccagccccggactgggtgtggctcgcagatgaacaagatgcagggcctgccttgaggggtgtctcctagaaggaaagccagactctccggcccagccagagagtccagacatggcagggacccgtttctcagatgaggagcctgaggctcagagaagggaggcgatgtgttcagggccacccagcagaagcctgtggggctgggcaaccttctcccactttatgggaggagctgcagccttggctgggagctgggcggggagtagccaggaccaccccttgcccgtgccgtgacatggaaccttcatcactaagggggctggagtgggaagagggagataactgtgtggtctccagagcaaaagagaatgagaggtgggcagggggagtcttggcaaaagaccaagttccacttccctgctggggaagtcaaggctcagaaagaggaaataattgccccaggtaacacagggcagaggagggacaaaaagctgggcatggccccagccagagcctcatctgcctactccgtgaagcctcccaggtactctgctatcctgggaaacgcacagggaggccacacagagacactgctcacaagagtcagaccaaggtgccagcacagcctggaaagagctcagaaagggggttggtgcacgtggctgggcatcttaggaggcttcctgagggtgggtaaaggtgggaaggccctggcgctgcatcagatgagcagggcctggcagggacaagcctcttctcctttgggaagccctgcagcctcctagcaagaggctgattccccactctgcccccatctgaatgtccttttcatgttgcacgcagggaacctcaggaaggaggattgcctgatgcctgcctggctccatccttgagctctgggcaccacctagggtgagggagagcctgcagctctggggctaagtctgccctggggggaaagggctccacgctcacacgcacgcgctcgcacacacacactcacacctggacgcacacggaggcttgcggacccatactcacaggcacatgtggcctggggactgggggagcaggaaagacccctccaacatttggcccttggaaggcaccattgccaatgagcctctttgctggttcccccgaccccacctgggggtcccatgggagcccagcccagccaggtgtggggatgggccaccggccattcctgttttccttgtacagacagattctcactacccacccgccatccccagacacattttatttaataacttgtcattgttaaattatttattagcgtttaccacaccaccacccccaccctgccctccactctcaccttccacctcttcccacaacagcagaaaatggaaacaacaacaaaaaaagatgagacatcagtatatttgtaaataaaccgacctgtacactc

SEQ ID NO: 16329 - DNA, 1195 bp, Homo sapiens
  source 1..1195: mol_type = unassigned DNA
gcgtcccatggatatagcaacaggtcccgagtcgctggagaggtgcttccctcgcgggcagacggactgcgccaagatgttggacggcatcaagatggaggagcacgccctgcgccccgggcccgccactctgggggtgctgctgggctccgactgcccgcatcccgccgtctgcgagggctgccagcggcccatctccgaccgcttcctgatgcgagtcaacgagtcgtcctggcacgaggagtgtttgcagtgcgcggcgtgtcagcaagccctcaccaccagctgctacttccgggatcggaaactgtactgcaaacaagactaccaacagctcttcgcggccaagtgcagcggctgcatggagaagatcgcccccaccgagttcgtgatgcgggcgctggagtgcgtgtaccacctgggctgcttctgctgctgcgtgtgtgaacggcagctacgcaagggcgacgaattcgtgctcaaggagggccagctgctgtgcaagggtgactacgagaaggagaaggacctgctcagctccgtgagccccgacgagtccgactccgtgaagagcgaggatgaagatggggacatgaagccggccaaggggcagggcagtcagagcaagggcagcggggatgacgggaaggacccgcggaggcccaagcgaccccggaccatcctcaccacgcagcagcgaagagccttcaaggcctccttcgaggtctcgtcgaagccttgccgaaaggtccgagagacactggcagctgagacgggcctcagtgtgcgcgtggtccaggtctggtttcagaaccaaagagcaaagatgaagaagctggcgcggcggcaccagcagcagcaggagcagcagaactcccagcggctgggccaggaggtcctgtccagccgcatggagggcatgatggcttcctacacgccgctggccccaccacagcagcagatcgtggccatggaacagagcccctacggcagcagcgaccccttccagcagggcctcacgccgccccaaatgccagggaacgactccatcttccatgacatcgacagcgatacctccttaaccagcctcagcgactgcttcctcggctcctcagacgtgggctccctgcaggcccgcgtggggaaccccatcgaccggctctactccatgcagagttcctacttcgcctcctga

SEQ ID NO: 16330 - DNA, 2933 bp, Homo sapiens
  source 1..2933: mol_type = unassigned DNA
ggggctgagtgctcagtggagagcggggagttgtgtccaccttgccgacgtcgctagccgtggggctgtcctgggaaggcggacggcgagcgcccggtgtccgcactcggccgcctgccgtgcccgtctgcgcccgtgtcatcctcactcgggacgcagggaccgtttttaaatcacaggggcgtgtgtcagcctgccctaggacttcatgtctatatatttccccattcactgccccgactatctgagatcggccaagatgactgaggtgatgatgaacacccagcccatggaggagatcggcctcagcccccgcaaggatggcctttcctaccagatcttcccagacccgtcagattttgaccgctgctgcaaactgaaggaccgtctgccctccatagtggtggaacccacagaaggggaggtggagagcggggagctccggtggccccctgaggagttcctggtccaggaggatgagcaagataactgcgaagagacagcgaaagaaaataaagagcagtagagtccctgtggactcccatgggtcataccagccagcatctgttcctgaactgtgtttttcccatcatgacggaagaagagagtgagccgcaattgttctgaaaatgtcaaacgaggcttctgttttgcacctgcagatcaccgagttggttttcttttcttttcttgcctttttttttttttgaaatttgccgagcagtggagccctctgacaatttgcaaggccctctgagaaaggaagctgcttagagccagggggttagtgggtgaggggagcgagtgctgtttttgagatcattatctgaactcaggcagcctagtagaggcagtggtgggattccaatgggtcttggtgggtgggaggtggggcatgtgcaaagcaagcaaggaacatttggggtaagaaaacaaacatgaggcaaaagaaaaaatacatgtttttaagaaaacattgagcagagaactgcagccaggatgcgctcagcagacattcactctggctgctgggacatcagaaaacaaagtcttcatctctctctccagtttcacccaccccaccctttgctttcatttcaggtgtgttggtctatatgacagggaggagagtaaaggagagcaggagcaattggctgcctgcaaagccagctggaggtgaagtgcaggaaaggaaaggtcaccccattctactccatggcctctctgctcccagctgtggtaggctcacatagccagtgtgatcggtttttaagaggcagtgcttttcagcttttctccctgatatatccattttgcttcccagcactttttaggagtagtgagagcacttcctgcccttgttggaagccccagggtggacactcagcacgaaggtctctcccttaactgctgcccttccaagacttgctcccgagatggagtgggcgtggtcttccaggctggcccttccttctcctcaccgccaccttccctgccccagccccagcagccatgggtacatgggtccccagctcacctatggattcccgccagtctgcccagctgcagtactcacgccccatgggggatcttggtctgtttttcttgtgggagcctagtggagagcagacgtggctttttatgtgtcttgttggggaggtgacttgcatggtggggacaaggctgtcgtggcaaccttgggatcgagtttgagactaaaggatgtcatgagatccctggcttctccccatgttgttcccggacaagggcagaagggaggcatggcaagggacctctgctgtccttactcaacagtggtcctcatccctccccacctcccactgcttcctgcaagggcaccagttgtatgagaaagttggcctttggacttaggatttcttattgtagctaagagccatctgaagcagcaggttgcaggacaaatgcttcagtccgccgagagcagtaccgtgtggccaagaggtggactcagagccttccttgagctaaactcggccaaccaaggcacgcagcatgtcccctcaggtctccagtcagtccaggttgaccctcagttctggacgtgtgtatatagctgtatttaatacctcaaggtcattgtggctctggggatgccggggcaggaggacgagggtgcgctgtggacacagcagtccgcggaattccgttctgggaagccaatggtcgccggcaccccttgcttcctccctctgttgtctgcctgtgtgacacacatcaatggcaataacttcttccaactcctcgcagaagtgggagaggccggcagcctgcaccgagaggggctttcctctctcttgctccccgcttcgttctgttttggctgcagagagtggttcatccatactctcattccctcgcctccccttgtggacgggggtcttgccttttcaattcctgtgttttggtgtcttcccttatctgctaccctgaatcacctgtcctggtcttgctgtgtgatgggaacatgcttgtaaactgcgtaacaaatctactttgtgtatgtgtctgtttatgggggtggtttattatttttgctggtccctagaccactttgtatgaccgtttgcagtctgagcaggccaggggctgacagctaatgtcaggaccctcagcggtggagcctgctggggggacccagctgctcttggacaagtggctgagctcctatctggcctcctctttttttttttttcaagtaatttgtgtgtatttctaactgattgtattgaaaaaattcctagtatttcagtaaaaatgcctgttgtgagatgaacctcctgtaacttctatctgttcttttttgaggctcagggagaaactagcatttttttttttccaaactactttttgtcactgtgacagttgtaaataaagtttgaaaatgctttcca

SEQ ID NO: 16331 - DNA, 1363 bp, Homo sapiens
  source 1..1363: mol_type = unassigned DNA
ggcgcggcggcgggcatgaaggaggatggaagggcaggacgaggtgtcggcgcgggagcagcacttccacagccaagtgcgggagtccacgatatgtttccttctttttgccattctctacgttgtttcctacttcatcatcacaagatacaagagaaaatcagatgaacaagaagatgaagatgccatcgtcaacaggatttcgttgtttttgagcacgttcactctcgcagtgtcagctggggctgttttgcttttacccttctcaatcatcagcaatgaaatcctgctttcttttcctcagaactactatattcagtggctaaatggctccctgattcatggtttgtggaatcttgcttcccttttttccaacctttgtttatttgtattgatgccctttgcctttttctttctggaatcagaaggctttgctggcctgaaaaagggaatccgagcccgcattttagagactttggtcatgcttcttcttcttgcgttactcattcttgggatagtgtgggtagcttcagcactcattgacaacgatgccgcaagcatggaatctttatatgatctctgggagttctatctaccctatttatattcctgtatatcattgatgggatgtttgttacttctcttgtgtacaccagttggcctttctcgtatgttcacagtgatgggtcagttgctagtgaagccaacaattcttgaagacctggatgaacaaatttatatcattaccttagaggaagaagcactccagagacgactaaatgggctgtcttcatcggtggaatacaacataatggagttggaacaagaacttgaaaatgtaaagactcttaagacaaaattagagaggcgaaaaaaggcttcagcatgggaaagaaatttggtgtatcccgctgttatggttctccttcttattgagacatccatctcggtcctcttggtggcttgtaatattctttgcctattggttgatgaaacagcaatgccaaaaggaacaagggggcctggaataggaaatgcctctctttctacgtttggttttgtgggagctgcgcttgaaatcattttgattttctatcttatggtgtcctctgttgtcggcttctatagccttcgattttttggaaactttactcccaagaaagatgacacaactatgacaaagatcattggaaattgtgtgtccatcttggttttgagctctgctctgcctgtgatgtcgagaacactggggcttcataaacttcacttaccaaatacttcaagggattcagaaacagcctcagtgatgacctcgtctgccagggacacaggttttcatcatttacaggctcttatgtgctag

SEQ ID NO: 16332 - DNA, 841 bp, Homo sapiens
  source 1..841: mol_type = unassigned DNA
gccggtgtcgtggtcgcggtacctgttccaacacggctcgcgggcccgtgccggctccggtccccggcgcggctgtccgagcccctgcggcgggcggacgatggtgtggcggagcacgcggacgcgggcggcgcggcggcgggcatgaaggaggatggaagggcaggacgaggtgtcggcgcgggagcagcacttccacagccaagtgcgggagtccacgatatgtttccttctttttgccattctctacgttgtttcctacttcatcatcacaagatacaagagaaaatcagatgaacaagaagatgaagatgccatcgtcaacaggatttcgttgtttttgagcacgttcactctcgcagtgtcagctggggctgttttgcttttacccttctcaatcatcagcaatgaaatcctgctttcttttcctcagaactactatattcagtggctaaatggctccctgattcatggtttgtggaatcttgcttcccttttttccaacctttgtttatttgtattgatgccctttgcctttttctttctggaatcagaaggctttgctggcctgaaaaagggaatccgagcccgcattttagagactttggtcatgcttcttcttcttgcgttactcattcttgggatagtgtgggtagcttcagcactcattgacaacgatgccgcaagcatggaatctttatatgatctctgggagttctatctaccctatttatattcctgtatatcattgatgggatgtttgttacttcacttaccaaatacttcaagggattcagaaacagccaagccttctgtaaatgggcatcagaaagcactgtga

SEQ ID NO: 16333 - DNA, 4911 bp, Homo sapiens
  source 1..4911: mol_type = unassigned DNA
gccccgcccccgccccgcccccgactgcgcggcgcccgccctcccttagtcagagctgctcgtctgaggctgctgaggcgacggccggtgtcgtggtcgcggtacctgttccaacacggctcgcgggcccgtgccggctccggtccccggcgcggctgtccgagcccctgcggcgggcggacgatggtgtggcggagcacgcggacgcgggcggcgcggcggcgggcatgaaggaggatggaagggcaggacgaggtgtcggcgcgggagcagcacttccacagccaagtgcgggagtccacgatatgtttccttctttttgccattctctacgttgtttcctacttcatcatcacaagatacaagagaaaatcagatgaacaagaagatgaagatgccatcgtcaacaggatttcgttgtttttgagcacgttcactctcgcagtgtcagctggggctgttttgcttttacccttctcaatcatcagcaatgaaatcctgctttcttttcctcagaactactatattcagtggctaaatggctccctgattcatggtttgtggaatcttgcttcccttttttccaacctttgtttatttgtattgatgccctttgcctttttctttctggaatcagaaggctttgctggcctgaaaaagggaatccgagcccgcattttagagactttggtcatgcttcttcttcttgcgttactcattcttgggatagtgtgggtagcttcagcactcattgacaacgatgccgcaagcatggaatctttatatgatctctgggagttctatctaccctatttatattcctgtatatcattgatgggatgtttgttacttctcttgtgtacaccagttggcctttctcgtatgttcacagtgatgggtcagttgctagtgaagccaacaattcttgaagacctggatgaacaaatttatatcattaccttagaggaagaagcactccagagacgactaaatgggctgtcttcatcggtggaatacaacataatggagttggaacaagaacttgaaaatgtaaagactcttaagacaaaattagagaggcgaaaaaaggcttcagcatgggaaagaaatttggtgtatcccgctgttatggttctccttcttattgagacatccatctcggtcctcttggtggcttgtaatattctttgcctattggttgatgaaacagcaatgccaaaaggaacaagggggcctggaataggaaatgcctctctttctacgtttggttttgtgggagctgcgcttgaaatcattttgattttctatcttatggtgtcctctgttgtcggcttctatagccttcgattttttggaaactttactcccaagaaagatgacacaactatgacaaagatcattggaaattgtgtgtccatcttggttttgagctctgctctgcctgtgatgtcgagaacactgggaatcactagatttgatctacttggcgactttggaaggtttaattggctgggaaatttctatattgtattatcctacaatttgctttttgctattgtgacaacattgtgtctggtccgaaaattcacctctgcagttcgagaagaacttttcaaggccctagggcttcataaacttcacttaccaaatacttcaagggattcagaaacagccaagccttctgtaaatgggcatcagaaagcactgtgagacgcacagacggcgtcttctgccaccaagagacccgagaactccagattcacgacattcctgtcccatgtagaagcatttccattcaaccgtggcccctcttcagaacctagacctatcagtgccatttttttttcataatctacgaagaacttggctatggctgatcttttttaaatttaactttctgatggaccctgtagtttccagttaagtgcagattccttacagacatatagaacagcgcattcttctgtagacatttgctcatgttggtaaatacaatcacccatatgaaaaaattgttttcacctgatatgaaaatgttagaaaaggcaaactccgggacttctaaagatttacttaaatcccattatgtactttattcagaatgtagaagctgacttgaaaggcatccttggtactaagtgaagcttattcagaaaatgcatttttcaaatgcaatggcaactgcttgtagatatcatttttgcagtgtatgttggagctgtaatggttgcaattatgtttcttatttccttaaaagcaaaaagcgtagtttctgatttatgttatagaatgatactgattagactttgagccaaggggaaaatactaaattcttttaaacctggagccttagagagccacaggaatatcttctgttgtacagtctaataagctgtggtaggaagtatcatgtaatcacagtttaatgacagtttatgtatatatataattcagtattccctctgataacatagttgccagtgtttaatacacttgtaacttggatttttaccttataggctatatgtatactcagttttttaaagcatttttttcagagatcacttaattccccatgcttctgcaatgcatataaaaactataaatgccgagtggtagaaactcctctttcttcatagtcctcaggctttggttacatttgcatatgccatttgaagcctccagcttttaccagtttaacatccaaagttcacagcatcagcattcatggtgtaagaacagttttgcagtataacacgatctgataatcattcagttattaaattgtaaataattattgggatggtttcttggctttaagtccactgaataaaaactatgaaattgcactctgtgtcaaccatccactaggatagaataccgaaatctgtgcatgcaaaaataggagatgggcccatttgcacacaattcgtagttatgcagtctgctatataaatatgttcacatgcactgtgtgtatgaaaatagatggtctgtgttcagacaaaagtaaaacatttttttcaaattgttacatttaaaggttttctgggagaaatttatgaaacgcaggctgtgtctatttgacatcagaaatttccactttaaaccaaaataataagaaactttaatctgtatatttacaacctttgttgagtacacttcccccttatttatacgtctgcatttccttccgagcttcacatctttctaaaatgcagcttggttttaaaataaaagaacattcattttgtgattctaaacaagcttcagtaaataccaccagtatagtactggtgaatttctcagcataaaatcgacatacctaaaaagttaataaaattcagctcttttccaatttcattgttatgcctattgaagtattaattgccaggtttgatttttagtgaagcttggagtccatactttgagcagaccaagtgaagggaagaacagaaagaaactcaggagtagagtaatatcacttctcacttacaccactttcaggcacatccaaagagttcctagatacttggaaaatgtctgaaaatttttaagtaaaatactaaacttttcagtgtttagctcaactttttgttcatttggaagtttctctccatccgaggacttaagccagttttggatttgtaagccctgagtacaatacacttcctggaggcatcctcactgctgttgaagcaaaggatatgcatggggtggaaggacggcttcgaacctgggactcatatgccttgagaacaaatagattgttacagccttgggctgctgcgtaatcacggttcctcgaggctcttcctgagcacatgcccaagcatctgcctctggagagactgactccaaatgcaggtgcttccattggagctaggtcggaggctgctttatatgacgaactccagaaatggatgccagaatacggaggccaaacgttctgagtcctggtaaggacagtcgctctgggggtcctcattttactgcagttcctgcacgccagtgaaagagaggagatagaccctggaaggcagagctgcagatgctcatcatcaggtcaattctggagctacagttttgtttctgactggatagggatgcaccagtgactgtcacatcaagcagtccttttattctctctcctttagtatcgattttaaagggcattaggcactatggttccagagtttcttggggaaaacttgcagattcttattaattggttctgcaatacttaaataaattattttacaattataagttttcagattataacatttgtattaatttttactgattttccaagatacttcttagatttactatttacgtagctttatgtacattctctgtaaaaatagacctctaaatatgaggctttacatgaaatttgtacacacatacacactaatgttagctccttaaattgctgcactaaggtgctggttagtagagatggacggagcctctcgcgttttgctctcagatgtgttaaaggcgcacgtgtacctgctctcagcggcagtgcggcctccccatctgctgggtgcccatggccctccctgcagcctcagtgatgacctcgtctgccagggacacaggttttcatcatttacaggctcttatgtgctagttttgttggtagcacgttatttaatgcataaaggcagaattcttacaagtttttttttttaatgtgaacatagatgcagcaccgactttttaaacttgaaaaaactggtataatgttaacttttaaaaataacatttggacacactagtaattgatttttgtttacagattgttttgtttacaaattgttagtctttgtttctatgagatacttttagtgtgactttttaaatgtcttagaaattaaaagttgtacaaaaagtgatttc

SEQ ID NO: 16334 - DNA, 2888 bp, Homo sapiens
  source 1..2888: mol_type = unassigned DNA
gccggtgtcgtggtcgcggtacctgttccaacacggctcgcgggcccgtgccggctccggtccccggcgcggctgtccgagcccctgcggcgggcggacgatggtgtggcggagcacgcggacgcgggcggcgcggcggcgggcatgaaggaggatggaagggcaggacgaggtgtcggcgcgggagcagcacttccacagccaagtgcgggagtccacgatatgtttccttctttttgccattctctacgttgtttcctacttcatcatcacaagatacaagagaaaatcagatgaacaagaagatgaagatgccatcgtcaacaggatttcgttgtttttgagcacgttcactctcgcagtgtcagctggggctgttttgcttttacccttctcaatcatcagcaatgaaatcctgctttcttttcctcagaactactatattcagtggctaaatggctccctgattcatggtttgtggaatcttgcttcccttttttccaacctttgtttatttgtattgatgccctttgcctttttctttctggaatcagaaggctttgctggcctgaaaaagggaatccgagcccgcattttagagactttggtcatgcttcttcttcttgcgttactcattcttgggatagtgtgggtagcttcagcactcattgacaacgatgccgcaagcatggaatctttatatgatctctgggagttctatctaccctatttatattcctgtatatcattgatgggatgtttgttacttctcttgtgtacaccagttggcctttctcgtatgttcacagtgatgggtcagttgctagtgaagccaacaattcttgaagacctggatgaacaaatttatatcattaccttagaggaagaagcactccagagacgactaaatgtgggaatgctttgtgcgggaaatccagaagttgcaacaggaagacaagtgccagaagaacaagctggacagctacttttgggaaaatggattcaggagggaggagacatgatagcaaacccacggctgtcttcatcggtggaatacaacataatggagttggaacaagaacttgaaaatgtaaagactcttaagacaaaattagagaggcgaaaaaaggcttcagcatgggaaagaaatttggtgtatcccgctgttatggttctccttcttattgagacatccatctcggtcctcttggtggcttgtaatattctttgcctattggttgatgaaacagcaatgccaaaaggaacaagggggcctggaataggaaatgcctctctttctacgtttggttttgtgggagctgcgcttgaaatcattttgattttctatcttatggtgtcctctgttgtcggcttctatagccttcgattttttggaaactttactcccaagaaagatgacacaactatgacaaagatcattggaaattgtgtgtccatcttggttttgagctctgctctgcctgtgatgtcgagaacactgggaatcactagatttgatctacttggcgactttggaaggtttaattggctgggaaatttctatattgtattatcctacaatttgctttttgctattgtgacaacattgtgtctggtccgaaaattcacctctgcagttcgagaagaacttttcaaggccctagggcttcataaacttcacttaccaaatacttcaagggattcagaaacagccaagccttctgtaaatgggcatcagaaagcactgtgagacgcacagacggcgtcttctgccaccaagagacccgagaactccagattcacgacattcctgtcccatgtagaagcatttccattcaaccgtggcccctcttcagaacctagacctatcagtgccatttttttttcataatctacgaagaacttggctatggctgatcttttttaaatttaactttctgatggaccctgtagtttccagttaagtgcagattccttacagacatatagaacagcgcattcttctgtagacatttgctcatgttggtaaatacaatcacccatatgaaaaaattgttttcacctgatatgaaaatgttagaaaaggcaaactccgggacttctaaagatttacttaaatcccattatgtactttattcagaatgtagaagctgacttgaaaggcatccttggtactaagtgaagcttattcagaaaatgcatttttcaaatgcaatggcaactgcttgtagatatcatttttgcagtgtatgttggagctgtaatggttgcaattatgtttcttatttccttaaaagcaaaaagcgtagtttctgatttatgttatagaatgatactgattagactttgagccaaggggaaaatactaaattcttttaaacctggagccttagagagccacaggaatatcttctgttgtacagtctaataagctgtggtaggaagtatcatgtaatcacagtttaatgacagtttatgtatatatataattcagtattccctctgataacatagttgccagtgtttaatacacttgtaacttggatttttaccttataggctatatgtatactcagttttttaaagcatttttttcagagatcacttaattccccatgcttctgcaatgcatataaaaactataaatgccgagtggtagaaactcctctttcttcatagtcctcaggctttggttacatttgcatatgccatttgaagcctccagcttttaccagtttaacatccaaagttcacagcatcagcattcatggtgtaagaacagttttgcagtataacacgatctgataatcattcagttattaaattgtaaataattattgggatggtttcttggctttaagtccactgaataaaaactatgaaattgc

SEQ ID NO: 16335 - DNA, 3628 bp, Homo sapiens
  source 1..3628: mol_type = unassigned DNA
ggtttgtggaatcttgcttcccttttttccaacctttgtttatttgtattgatgccctttgcctttttctttctggaatcagaaggctttgctggcctgaaaaaggagggcaagatgtccaggcaaaaccttgtttaaatgttcatcaccatagaaacatgacagcttctccatagagcttttggaatccgagcccgcattttagagactttggtcatgcttcttcttcttgcgttactcattcttgggatagtgtgggtagcttcagcactcattgacaacgatgccgcaagcatggaatctttatatgatctctgggagttctatctaccctatttatattcctgtatatcattgatgggatgtttgttacttctcttgtgtacaccagttggcctttctcgtatgttcacagtgatgggtcagttgctagtgaagccaacaattcttgaagacctggatgaacaaatttatatcattaccttagaggaagaagcactccagagacgactaaatgggctgtcttcatcggtggaatacaacataatggagttggaacaagaacttgaaaatgtaaagactcttaagacaaaattagagaggcgaaaaaaggcttcagcatgggaaagaaatttggtgtatcccgctgttatggttctccttcttattgagacatccatctcggtcctcttggtggcttgtaatattctttgcctattggttgatgaaacagcaatgccaaaaggaacaagggggcctggaataggaaatgcctctctttctacgtttggttttgtgggagctgcgcttgaaatcattttgattttctatcttatggtgtcctctgttgtcggcttctatagccttcgattttttggaaactttactcccaagaaagatgacacaactatgacaaagatcattggaaattgtgtgtccatcttggttttgagctctgctctgcctgtgatgtcgagaacactggggcttcataaacttcacttaccaaatacttcaagggattcagaaacagccaagccttctgtaaatgggcatcagaaagcactgtgagacgcacagacggcgtcttctgccaccaagagacccgagaactccagattcacgacattcctgtcccatgtagaagcatttccattcaaccgtggcccctcttcagaacctagacctatcagtgccatttttttttcataatctacgaagaacttggctatggctgatcttttttaaatttaactttctgatggaccctgtagtttccagttaagtgcagattccttacagacatatagaacagcgcattcttctgtagacatttgctcatgttggtaaatacaatcacccatatgaaaaaattgttttcacctgatatgaaaatgttagaaaaggcaaactccgggacttctaaagatttacttaaatcccattatgtactttattcagaatgtagaagctgacttgaaaggcatccttggtactaagtgaagcttattcagaaaatgcatttttcaaatgcaatggcaactgcttgtagatatcatttttgcagtgtatgttggagctgtaatggttgcaattatgtttcttatttccttaaaagcaaaaagcgtagtttctgatttatgttatagaatgatactgattagactttgagccaaggggaaaatactaaattcttttaaacctggagccttagagagccacaggaatatcttctgttgtacagtctaataagctgtggtaggaagtatcatgtaatcacagtttaatgacagtttatgtatatatataattcagtattccctctgataacatagttgccagtgtttaatacacttgtaacttggatttttaccttataggctatatgtatactcagttttttaaagcatttttttcagagatcacttaattccccatgcttctgcaatgcatataaaaactataaatgccgagtggtagaaactcctctttcttcatagtcctcaggctttggttacatttgcatatgccatttgaagcctccagcttttaccagtttaacatccaaagttcacagcatcagcattcatggtgtaagaacagttttgcagtataacacgatctgataatcattcagttattaaattgtaaataattattgggatggtttcttggctttaagtccactgaataaaaactatgaaattgcactctgtgtcaaccatccactaggatagaataccgaaatctgtgcatgcaaaaataggagatgggcccatttgcacacaattcgtagttatgcagtctgctatataaatatgttcacatgcactgtgtgtatgaaaatagatggtctgtgttcagacaaaagtaaaacatttttttcaaattgttacatttaaaggttttctgggagaaatttatgaaacgcaggctgtgtctatttgacatcagaaatttccactttaaaccaaaataataagaaactttaatctgtatatttacaacctttgttgagtacacttcccccttatttatacgtctgcatttccttccgagcttcacatctttctaaaatgcagcttggttttaaaataaaagaacattcattttgtgattctaaacaagcttcagtaaataccaccagtatagtactggtgaatttctcagcataaaatcgacatacctaaaaagttaataaaattcagctcttttccaatttcattgttatgcctattgaagtattaattgccaggtttgatttttagtgaagcttggagtccatactttgagcagaccaagtgaagggaagaacagaaagaaactcaggagtagagtaatatcacttctcacttacaccactttcaggcacatccaaagagttcctagatacttggaaaatgtctgaaaatttttaagtaaaatactaaacttttcagtgtttagctcaactttttgttcatttggaagtttctctccatccgaggacttaagccagttttggatttgtaagccctgagtacaatacacttcctggaggcatcctcactgctgttgaagcaaaggatatgcatggggtggaaggacggcttcgaacctgggactcatatgccttgagaacaaatagattgttacagccttgggctgctgcgtaatcacggttcctcgaggctcttcctgagcacatgcccaagcatctgcctctggagagactgactccaaatgcaggtgcttccattggagctaggtcggaggctgctttatatgacgaactccagaaatggatgccagaatacggaggccaaacgttctgagtcctggtaaggacagtcgctctgggggtcctcattttactgcagttcctgcacgccagtgaaagagaggagatagaccctggaaggcagagctgcagatgctcatcatcaggtcaattctggagctacagttttgtttctgactggatagggatgcaccagtgactgtcacatcaagcagtccttttattctctctcctttagtatcgattttaaagggcattaggcactatggttccagagtttcttggggaaaacttgcagattcttattaattggttctgcaatacttaaataaattattttacaattat

SEQ ID NO: 16336 - DNA, 3457 bp, Homo sapiens
  source 1..3457: mol_type = unassigned DNA
gggcaggacgaggtgtcggcgcgggagcagcacttccacagccaagtgcgggagtccacgatatgtttccttctttttgccattctctacgttgtttcctacttcatcatcacaagatacaagagaaaatcagatgaacaagaagatgaagatgccatcgtcaacaggatttcgttgtttttgagcacgttcactctcgcagtgtcagctggggctgttttgcttttacccttctcaatcatcagcaatgaaatcctgctttcttttcctcagaactactatattcagtggctaaatggctccctgattcatggtttgtggaatcttgcttcccttttttccaacctttgtttatttgtattgatgccctttgcctttttctttctggaatcagaaggctttgctggcctgaaaaagggaatccgagcccgcattttagagactttggtcatgcttcttcttcttgcgttactcattcttgggatagtgtgggtagcttcagcactcattgacaacgatgccgcaagcatggaatctttatatgatctctgggagttctatctaccctatttatattcctgtatatcattgatgggatgtttgttacttctcttgtgtacaccagttggcctttctcgtatgttcacagtgatgggtcagttgctagtgaagccaacaattcttgaagacctggatgaacaaatttatatcattaccttagaggaagaagcactccagagacgactaaatgtgggaatgctttgtgcgggaaatccagaagttgcaacaggaagacaagtgccagaagaacaagctggacagctacttttgggaaaatggattcaggagggaggagacatgatagcaaacccacggctgtcttcatcggtggaatacaacataatggagttggaacaagaacttgaaaatgtaaagactcttaagacaaaattagagaggcgaaaaaaggcttcagcatgggaaagaaatttggtgtatcccgctgttatggttctccttcttattgagacatccatctcggtcctcttggtggcttgtaatattctttgcctattggttgatgaaacagcaatgccaaaaggaacaagggggcctggaataggaaatgcctctctttctacgtttggttttgtgggagctgcgcttgaaatcattttgattttctatcttatggtgtcctctgttgtcggcttctatagccttcgattttttggaaactttactcccaagaaagatgacacaactatgacaaagatcattggaaattgtgtgtccatcttggttttgagctctgctctgcctgtgatgtcgagaacactgggaatcactagatttgatctacttggcgactttggaaggtttaattggctgggaaatttctatattgtattatcctacaatttgctttttgctattgtgacaacattgtgtctggtccgaaaattcacctctgcagttcgagaagaacttttcaaggccctagggcttcataaacttcacttaccaaatacttcaagggattcagaaacagccaagccttctgtaaatgggcatcagaaagcactgtgagacgcacagacggcgtcttctgccaccaagagacccgagaactccagattcacgacattcctgtcccatgtagaagcatttccattcaaccgtggcccctcttcagaacctagacctatcagtgccatttttttttcataatctacgaagaacttggctatggctgatcttttttaaatttaactttctgatggaccctgtagtttccagttaagtgcagattccttacagacatatagaacagcgcattcttctgtagacatttgctcatgttggtaaatacaatcacccatatgaaaaaattgttttcacctgatatgaaaatgttagaaaaggcaaactccgggacttctaaagatttacttaaatcccattatgtactttattcagaatgtagaagctgacttgaaaggcatccttggtactaagtgaagcttattcagaaaatgcatttttcaaatgcaatggcaactgcttgtagatatcatttttgcagtgtatgttggagctgtaatggttgcaattatgtttcttatttccttaaaagcaaaaagcgtagtttctgatttatgttatagaatgatactgattagactttgagccaaggggaaaatactaaattcttttaaacctggagccttagagagccacaggaatatcttctgttgtacagtctaataagctgtggtaggaagtatcatgtaatcacagtttaatgacagtttatgtatatatataattcagtattccctctgataacatagttgccagtgtttaatacacttgtaacttggatttttaccttataggctatatgtatactcagttttttaaagcatttttttcagagatcacttaattccccatgcttctgcaatgcatataaaaactataaatgccgagtggtagaaactcctctttcttcatagtcctcaggctttggttacatttgcatatgccatttgaagcctccagcttttaccagtttaacatccaaagttcacagcatcagcattcatggtgtaagaacagttttgcagtataacacgatctgataatcattcagttattaaattgtaaataattattgggatggtttcttggctttaagtccactgaataaaaactatgaaattgcactctgtgtcaaccatccactaggatagaataccgaaatctgtgcatgcaaaaataggagatgggcccatttgcacacaattcgtagttatgcagtctgctatataaatatgttcacatgcactgtgtgtatgaaaatagatggtctgtgttcagacaaaagtaaaacatttttttcaaattgttacatttaaaggttttctgggagaaatttatgaaacgcaggctgtgtctatttgacatcagaaatttccactttaaaccaaaataataagaaactttaatctgtatatttacaacctttgttgagtacacttcccccttatttatacgtctgcatttccttccgagcttcacatctttctaaaatgcagcttggttttaaaataaaagaacattcattttgtgattctaaacaagcttcagtaaataccaccagtatagtactggtgaatttctcagcataaaatcgacatacctaaaaagttaataaaattcagctcttttccaatttcattgttatgcctattgaagtattaattgccaggtttgatttttagtgaagcttggagtccatactttgagcagaccaagtgaagggaagaacagaaagaaactcaggagtagagtaatatcacttctcacttacaccactttcaggcacatccaaagagttcctagatacttggaaaatgtctgaaaatttttaagtaaaatactaaacttttca

SEQ ID NO: 16337 - DNA, 1942 bp, Homo sapiens
  source 1..1942: mol_type = unassigned DNA
agagctgctcgtctgaggctgctgaggcgacggccggtgtcgtggtcgcggtacctgttccaacacggctcgcgggcccgtgccggctccggtccccggcgcggctgtccgagcccctgcggcgggcggacgatggtgtggcggagcacgcggacgcgggcggcgcggcggcgggcatgaaggaggatggaagggcaggacgaggtgtcggcgcgggagcagcacttccacagccaagtgcgggagtccacgatgaacaagaagatgaagatgccatcgtcaacaggatttcgttgtttttgagcacgttcactctcgcagtgtcagctggggctgttttgcttttacccttctcaatcatcagcaatgaaatcctgctttcttttcctcagaactactatattcagtggctaaatggctccctgattcatggtttgtggaatcttgcttcccttttttccaacctttgtttatttgtattgatgccctttgcctttttctttctggaatcagaaggctttgctggcctgaaaaagggaatccgagcccgcattttagagactttggtcatgcttcttcttcttgcgttactcattcttgggatagtgtgggtagcttcagcactcattgacaacgatgccgcaagcatggaatctttatatgatctctgggagttctatctaccctatttatattcctgtatatcattgatgggatgtttgttacttctcttgtgtacaccagttggcctttctcgtatgttcacagtgatgggtcagttgctagtgaagccaacaattcttgaagacctggatgaacaaatttatatcattaccttagaggaagaagcactccagagacgactaaatgggctgtcttcatcggtggaatacaacataatggagttggaacaagaacttgaaaatgtaaagactcttaagacaaaattagagaggcgaaaaaaggcttcagcatgggaaagaaatttggtgtatcccgctgttatggttctccttcttattgagacatccatctcggtcctcttggtggcttgtaatattctttgcctattggttgatgaaacagcaatgccaaaaggaacaagggggcctggaataggaaatgcctctctttctacgtttggttttgtgggagctgcgcttgaaatcattttgattttctatcttatggtgtcctctgttgtcggcttctatagccttcgattttttggaaactttactcccaagaaagatgacacaactatgacaaagatcattggaaattgtgtgtccatcttggttttgagctctgctctgcctgtgatgtcgagaacactggggcttcataaacttcacttaccaaatacttcaagggattcagaaacagccaagccttctgtaaatgggcatcagaaagcactgtgagacgcacagacggcgtcttctgccaccaagagacccgagaactccagattcacgacattcctgtcccatgtagaagcatttccattcaaccgtggcccctcttcagaacctagacctatcagtgccatttttttttcataatctacgaagaacttggctatggctgatcttttttaaatttaactttctgatggaccctgtagtttccagttaagtgcagattccttacagacatatagaacagcgcattcttctgtagacatttgctcatgttggtaaatacaatcacccatatgaaaaaattgttttcacctgatatgaaaatgttagaaaaggcaaactccgggacttctaaagatttacttaaatcccattatgtactttattcagaatgtagaagctgacttgaaaggcatccttggtactaagtgaagcttattcagaaaatgcatttttcaaatgcaatggcaactgcttgtagatatcatttttgcagtgtatgttggagctgtaatggt

SEQ ID NO: 16338 - DNA, 2349 bp, Homo sapiens
  source 1..2349: mol_type = unassigned DNA
tgtgtcgtcactagatctcttaaaaagatggaccctcagcggcgcttcctcgtagcgagcctagtggcgggtgtttgcattgaaacgtgagcgcgacccgaccttaaagagtggggagcaaagggaggacagagccctttaaaacgaggcgggtggtgcctgcccctttaagggcggggcgtccggacgactgtatctgagccccagactgccccgagtttctgtcgcaggctgcgaggaaaggcccctaggctgggtctgggtgcttggcggcggcggcttcctccccgctcgtcctccccgggcccagaggcacctcggcttcagtcatgctgagcagagtatggaagcacctgactacgaagtgctatccgtgcgagaacagctattccacgagaggatccgcgagtgtattatatcaacacttctgtttgcaacactgtacatcctctgccacatcttcctgacccgcttcaagaagcctgctgagttcaccacagtggatgatgaagatgccaccgtcaacaagattgcgctcgagctgtgcacctttaccctggcaattgccctgggtgctgtcctgctcctgcccttctccatcatcagcaatgaggtgctgctctccctgcctcggaactactacatccagtggctcaacggctccctcatccatggcctctggaaccttgtttttctcttctccaacctgtccctcatcttcctcatgccctttgcatatttcttcactgagtctgagggctttgctggctccagaaagggtgtcctgggccgggtctatgagacagtggtgatgttgatgctcctcactctgctggtgctaggtatggtgtgggtggcatcagccattgtggacaagaacaaggccaacagagagtcactctatgacttttgggagtactatctcccctacctctactcatgcatctccttccttggggttctgctgctcctggtgtgtactccactgggtctcgcccgcatgttctccgtcactgggaagctgctagtcaagccccggctgctggaagacctggaggagcagctgtactgctcagcctttgaggaggcagccctgacccgcaggatctgtaatcctacttcctgctggctgcctttagacatggagctgctacacagacaggtcctggctctgcagacacagagggtcctgctggagaagaggcggaaggcttcagcctggcaacggaacctgggctaccccctggctatgctgtgcttgctggtgctgacgggcctgtctgtgctcattgtggccatccacatcctggagctgctcatcgatgaggctgccatgccccgaggcatgcagggtacctccttaggccaggtctccttctccaagctgggctcctttggtgccgtcattcaggttgtactcatcttttacctaatggtgtcctcagttgtgggcttctatagctctccactcttccggagcctgcggcccagatggcacgacactgccatgacgcagataattgggaactgtgtctgtctcctggtcctaagctcagcacttcctgtcttctctcgaaccctggggctcactcgctttgacctgctgggtgactttggacgcttcaactggctgggcaatttctacattgtgttcctctacaacgcagcctttgcaggcctcaccacactctgtctggtgaagaccttcactgcagctgtgcgggcagagctgatccgggcctttgggctggacagactgccgctgcccgtctccggtttcccccaggcatctaggaagacccagcaccagtgacctccagctgggggtgggaaggaaaaaactggacactgccatctgctgcctaggcctggagggaagcccaaggctacttggacctcaggacctggaatctgagagggtgggtggcagaggggagcagagccatctgcactattgcataatctgagccagagtttgggaccaggacctcctgcttttccatacttaactgtggcctcagcatggggtagggctgggtgactgggtctagcccctgatcccaaatctgtttacacatcaatctgcctcactgctgttctgggccatccccatagccatgtttacatgatttgatgtgcaatagggtggggtaggggcagggaaaggactgggccagggcaggctcgggagatagattgtctcccttgcctctggcccagcagagcctaagcactgtgctatcctggaggggctttggaccacctgaaagaccaaggggatagggaggaggaggcttcagccatcagcaataaagttgatcccagggtttgctttgtttttttaaagca

SEQ ID NO: 16339 - DNA, 1956 bp, Homo sapiens
  source 1..1956: mol_type = unassigned DNA
atggttaatgtgaaagccctttgtgaacctgaagtgagcaactgctggatgaatgtcattacgggcacaggctctgtgtcatctcctctcctagtgcttccacagccaggaccagagacctccctgatgactggggaacctgtggatgatgaagatgccaccgtcaacaagattgcgctcgagctgtgcacctttaccctggcaattgccctgggtgctgtcctgctcctgcccttctccatcatcagcaatgaggtgctgctctccctgcctcggaactactacatccagtggctcaacggctccctcatccatggcctctggaaccttgtttttctcttctccaacctgtccctcatcttcctcatgccctttgcatatttcttcactgagtctgagggctttgctggctccagaaagggtgtcctgggccgggtctatgagacagtggtgatgttgatgctcctcactctgctggtgctaggtatggtgtgggtggcatcagccattgtggacaagaacaaggccaacagagagtcactctatgacttttgggagtactatctcccctacctctactcatgcatctccttccttggggttctgctgctcctggtgtgtactccactgggtctcgcccgcatgttctccgtcactgggaagctgctagtcaagccccggctgctggaagacctggaggagcagctgtactgctcagcctttgaggaggcagccctgacccgcaggatctgtaatcctacttcctgctggctgcctttagacatggagctgctacacagacaggtcctggctctgcagacacagagggtcctgctggagaagaggcggaaggcttcagcctggcaacggaacctgggctaccccctggctatgctgtgcttgctggtgctgacgggcctgtctgtgctcattgtggccatccacatcctggagctgctcatcgatgaggctgccatgccccgaggcatgcagggtacctccttaggccaggtctccttctccaagctgggctcctttggtgccgtcattcaggttgtactcatcttttacctaatggtgtcctcagttgtgggcttctatagctctccactcttccggagcctgcggcccagatggcacgacactgccatgacgcagataattgggaactgtgtctgtctcctggtcctaagctcagcacttcctgtcttctctcgaaccctggggctcactcgctttgacctgctgggtgactttggacgcttcaactggctgggcaatttctacattgtgttcctctacaacgcagcctttgcaggcctcaccacactctgtctggtgaagaccttcactgcagctgtgcgggcagagctgatccgggcctttgggctggacagactgccgctgcccgtctccggtttcccccaggcatctaggaagacccagcaccagtgacctccagctgggggtgggaaggaaaaaactggacactgccatctgctgcctaggcctggagggaagcccaaggctacttggacctcaggacctggaatctgagagggtgggtggcagaggggagcagagccatctgcactattgcataatctgagccagagtttgggaccaggacctcctgcttttccatacttaactgtggcctcagcatggggtagggctgggtgactgggtctagcccctgatcccaaatctgtttacacatcaatctgcctcactgctgttctgggccatccccatagccatgtttacatgatttgatgtgcaatagggtggggtaggggcagggaaaggactgggccagggcaggctcgggagatagattgtctcccttgcctctggcccagcagagcctaagcactgtgctatcctggaggggctttggaccacctgaaagaccaaggggatagggaggaggaggcttcagccatcagcaataaa

SEQ ID NO: 16340 - DNA, 2235 bp, Homo sapiens
  source 1..2235: mol_type = unassigned DNA
ctcgtagcgagcctagtggcgggtgtttgcattgaaacgtgagcgcgacccgaccttaaagagtggggagcaaagggaggacagagccctttaaaacgaggcgggtggtgcctgcccctttaagggcggggcgtccggacgactgtatctgagccccagactgccccgagtttctgtcgcaggctgcgaggaaaggcccctaggctgggtctgggtgcttggcggcggcggcttcctccccgctcgtcctccccgggcccagaggcacctcggcttcagtcatgctgagcagagtatggaagcacctgactacgaagtgctatccgtgcgagaacagctattccacgagaggatccgcgagtgtattatatcaacacttctgtttgcaacactgtacatcctctgccacatcttcctgacccgcttcaagaagcctgctgagttcaccacagtggatgatgaagatgccaccgtcaacaagattgcgctcgagctgtgcacctttaccctggcaattgccctgggtgctgtcctgctcctgcccttctccatcatcagcaatgaggtgctgctctccctgcctcggaactactacatccagtggctcaacggctccctcatccatggcctctggaaccttgtttttctcttctccaacctgtccctcatcttcctcatgccctttgcatatttcttcactgagtctgagggctttgctggctccagaaagggtgtcctgggccgggtctatgagacagtggtgatgttgatgctcctcactctgctggtgctaggtatggtgtgggtggcatcagccattgtggacaagaacaaggccaacagagagtcactctatgacttttgggagtactatctcccctacctctactcatgcatctccttccttggggttctgctgctcctggtgtgtactccactgggtctcgcccgcatgttctccgtcactgggaagctgctagtcaagccccggctgctggaagacctggaggagcagctgtactgctcagcctttgaggaggcagccctgacccgcaggatctgtaatcctacttcctgctggctgcctttagacatggagctgctacacagacaggtcctggctctgcagacacagagggtcctgctggagaagaggcggaaggcttcagcctggcaacggaacctgggctaccccctggctatgctgtgcttgctggtgctgacgggcctgtctgtgctcattgtggccatccacatcctggagctgctcatcgatgaggctgccatgccccgaggcatgcaggttgtactcatcttttacctaatggtgtcctcagttgtgggcttctatagctctccactcttccggagcctgcggcccagatggcacgacactgccatgacgcagataattgggaactgtgtctgtctcctggtcctaagctcagcacttcctgtcttctctcgaaccctggggctcactcgctttgacctgctgggtgactttggacgcttcaactggctgggcaatttctacattgtgttcctctacaacgcagcctttgcaggcctcaccacactctgtctggtgaagaccttcactgcagctgtgcgggcagagctgatccgggcctttgggctggacagactgccgctgcccgtctccggtttcccccaggcatctaggaagacccagcaccagtgacctccagctgggggtgggaaggaaaaaactggacactgccatctgctgcctaggcctggagggaagcccaaggctacttggacctcaggacctggaatctgagagggtgggtggcagaggggagcagagccatctgcactattgcataatctgagccagagtttgggaccaggacctcctgcttttccatacttaactgtggcctcagcatggggtagggctgggtgactgggtctagcccctgatcccaaatctgtttacacatcaatctgcctcactgctgttctgggccatccccatagccatgtttacatgatttgatgtgcaatagggtggggtaggggcagggaaaggactgggccagggcaggctcgggagatagattgtctcccttgcctctggcccagcagagcctaagcactgtgctatcctggaggggctttggaccacctgaaagaccaaggggatagggaggaggaggcttcagccatcagcaataaagttgatcccagggtttgctttgttttttt

SEQ ID NO: 16341 - DNA, 567 bp, Homo sapiens
  source 1..567: mol_type = unassigned DNA
agatctcttaaaaagatggaccctcagcggcgcttcctcgtagcgagcctagtggcgggtgtttgcattgaaacgctgcgaggaaaggcccctaggctgggtctgggtgcttggcggcggcggcttcctccccgctcgtcctccccgggcccagaggcacctcggcttcagtcatgctgagcagagtatggaagcacctgactacgaagtgctatccgtgcgagaacagctattccacgagaggatccgcgagtgtattatatcaacacttctgtttgcaacactgtacatcctctgccacatcttcctgacccgcttcaagaagcctgctgagttcaccacagtggatgatgaagatgccaccgtcaacaagattgcgctcgagctgtgcacctttaccctggcaattgccctgggtgctgtcctgctcctgcccttctccatcatcagcaatgaggtgctgctctccctgcctcggaactactacatccagtggctcaacggctccctcatccatggcctctggaaccttgtttttctcttctccaacctgtccctcatcttcct

SEQ ID NO: 16342 - DNA, 1740 bp, Homo sapiens
  source 1..1740: mol_type = unassigned DNA
ggggagagaggctctgggttgctgctgcttctgctgctgctgctgctgtgtggctgtttctgtacactcactggcaggcttggtgccggctccctcgcccgcccgcccgccagcctgggaaagtgggttacagagcgaaggagctcagctcagacactggcagaggagcatccagtcacagagagaccaaacaagaaccctttcctttggcttcctcttcagctcttccagagggcttgctatttgcactctctcttttgaaattgtgttgcttttacttttcacccttctgcttgggttttatgagggctttgttaagtcttagagggaaaagagactgagcgagggaaagagagaggcaaagtggaaaggaccataaactggcaaagcccgctctgcgctcgctgtggatgaaagccccgtgttggtgaagcctctcctcgcgagcagcgcgcacccctccagagcaccccgcggacccgcacctcggcgtggccaccatggtcaggagagttcagccggatcggaaacagttgccactggtcctactgagattgctctgccttcttcccacaggactgcctgttcgcagcgtggattttaaccgaggcacggacaacatcaccgtgaggcagggggacacagccatcctcaggtgcgttgtagaagacaagaactcaaaggtggcctggttgaaccgttctggcatcatttttgctggacatgacaagtggtctctggacccacgggttgagctggagaaacgccattctctggaatacagcctccgaatccagaaggtggatgtctatgatgagggttcctacacttgctcagttcagacacagcatgagcccaagacctcccaagtttacttgatcgtacaagtcccaccaaagatctccaatatctcctcggatgtcactgtgaatgagggcagcaacgtgactctggtctgcatggccaatggccgtcctgaacctgttatcacctggagacaccttacaccaactggaagggaatttgaaggagaagaagaatatctggagatccttggcatcaccagggagcagtcaggcaaatatgagtgcaaagctgccaacgaggtctcctcggcggatgtcaaacaagtcaaggtcactgtgaactatcctcccactatcacagaatccaagagcaatgaagccaccacaggacgacaagcttcactcaaatgtgaggcctcggcagtgcctgcacctgactttgagtggtaccgggatgacactaggataaatagtgccaatggccttgagattaagagcacggagggccagtcttccctgacggtgaccaacgtcactgaggagcactacggcaactacacctgtgtggctgccaacaagctgggggtcaccaatgccagcctagtccttttcagacctgggtcggtgagaggaataaatggatccatcagtctggccgtaccactgtggctgctggcagcatctctgctctgccttctcagcaaatgttaatagaataaaaatttaaaaataatttaaaaaacacacaaaaatgcgtcacacagaatacagagagagagagacagagagagagagagagagagagatgggggagaccgtttatttcacaactttgtgtgtttatacatgaagggggaaataagaaagtgaagaagaaaatacaacatttaaaacaattttacagtccatcattaaaaatttatgtatcattcag

SEQ ID NO: 16343 - DNA, 1077 bp, Homo sapiens
  source 1..1077: mol_type = unassigned DNA
atgaggacctactggctgcacagcgtctgggtgctgggctttttcctgtccctcttctcattgcaaggactgcctgttcgcagcgtggattttaaccgaggcacggacaacatcaccgtgaggcagggggacacagccatcctcaggtgcgttgtagaagacaagaactcaaaggtggcctggttgaaccgttctggcatcatttttgctggacatgacaagtggtctctggacccacgggttgagctggagaaacgccattctctggaatacagcctccgaatccagaaggtggatgtctatgatgagggttcctacacttgctcagttcagacacagcatgagcccaagacctcccaagtttacttgatcgtacaagtcccaccaaagatctccaatatctcctcggatgtcactgtgaatgagggcagcaacgtgactctggtctgcatggccaatggccgtcctgaacctgttatcacctggagacaccttacaccaactggaagggaatttgaaggagaagaagaatatctggagatccttggcatcaccagggagcagtcaggcaaatatgagtgcaaagctgccaacgaggtctcctcggcggatgtcaaacaagtcaaggtcactgtgaactatcctcccactatcacagaatccaagagcaatgaagccaccacaggacgacaagcttcactcaaatgtgaggcctcggcagtgcctgcacctgactttgagtggtaccgggatgacactaggataaatagtgccaatggccttgagattaagagcacggagggccagtcttccctgacggtgaccaacgtcactgaggagcactacggcaactacacctgtgtggctgccaacaagctgggggtcaccaatgccagcctagtccttttcaaacgtgttttacccacaatcccccaccccattcaagaaattggtaccaccgtgcacttcaagcaaaaaggacctgggtcggtgagaggaataaatggatccatcagtctggccgtaccactgtggctgctggcagcatctctgctctgccttctcagcaaatgttaa

SEQ ID NO: 16344 - DNA, 5505 bp, Homo sapiens
  source 1..5505: mol_type = unassigned DNA
aattgacaaagtcacgtgtgctcagggggccagaaactggagagaggagagaaaaaaatcaaaagaaggaaagcacattagaccatgcgagctaaatttgtgatcgcacaaaatcaagatgttagattgatgcagaagatcactccgttccaaagggaaagttttcatctcacgagtttggagctgagggcccgtggggcaacatggccgaaggcggggctagcaaaggtggtggagaagagcccgggaagctgccggagccggcagaggaggaatcccaggttttgcgcggaactggccactgtaagtggttcaatgtgcgcatgggatttggattcatctccatgataaaccgagagggaagccccttggatattccagtcgatgtatttgtacaccaaagcaaactattcatggaaggatttagaagcctaaaagaaggagaaccagtggaattcacatttaaaaaatcttccaaaggccttgagtcaatacgggtaacaggacctggtgggagcccctgtttaggaagtgaaagaagacccaaagggaagacactacagaaaagaaaaccaaagggagatagatgctacaactgtggtggccttgatcatcatgctaaggaatgtagtctacctcctcagccaaagaagtgccattactgtcagagcatcatgcacatggtggcaaactgcccacataaaaatgttgcacagccacccgcgagttctcagggaagacaggaagcagaatcccagccatgcacttcaactctccctcgagaagtgggaggcgggcatggctgtacatcaccaccgtttcctcaggaggctagggcagagatctcagaacggtcaggcaggtcacctcaagaagcttcctccacgaagtcatctatagcaccagaagagcaaagcaaaaaggggccttcagttcaaaaaaggaaaaagacataacaggtcttcttcatatgttctttcctttacccggttgcaaagtctacctcatgcaagtataggggaacagtatttcacaagcagtagctgacctgggattttaactactattggggaactgtgaattttttaaacagacaaatcactctaagcaaattacatttgagcagggtgtcatgttttatgttaattcagagaataagatactatgtctgtcaatatgtgcatgtgtgagagggagagagcctgagtctgtgtgtgtacatgaggatttttatataggaatgtagacacatatataaagaggctttgtctttatatatttgtgtatagatcaaagcacacaccctctctcatataattggatatttccaagaattgaaaacccatgtgaagcattatagatagttttaaatttaacccactggagttttcttgaaataccacttcttttatattatataaaactaaaaacacgactgttaccttttgtgtgaaccaaaggatacttcagatctcagagctgccaattatggggtactaaaggtttttaagacatccagttctcccgaatttgggattgcctctttttcttgaaatctctggagtagtaatttttttcccccttttttgaaggcagtaccttaacttcatatgcctctgactgccataagcttttttgattctgggataacataactccagaaaagacaatgaatgtgtaatttgggccgatatttcactgttttaaattctgtgtttaattgtaaaattagatgcctattaagagaaatgaaggggaggatcatcttagtggcttgttttcagtagtattttaatatcagcttcttgtaaccttttccatgttgtgagggttgtaagggattgtgtggcaacagcagcttcccttggctaactcaatcttctacccattgcttagagcagggagccctccttatttactactgaagaccttagagaactccaattgtttggcatatatttttggtggtggtttttattcctcctggagagttatctaatttgtttctaaaacaaacaagcagcaaagaaatgaattaaatactggggttgagaattaaaattaagtggatgttcacagttgcccaatatatatgacctgcaaatgatacgaaaaagtgcagcatttagtggcagttaacaagagtgacaagcctggggcagaggtaccaaacctctcccaccagagagctagaagtattttatacagtaactttgatcttatggaagtgaccttcaatgcttattctgaagtaacctatatggtggatacaggatgaacattcagtgccagggagaatcttctcaggttggttctcgttagagtgataaactggctaggggccatagtattggtcctgttaggtttcggtcatggaaaaaaaaattattttggggtcatcctggctctagatgttatgggcaaatttctgaaacatctgcaagaaggtaccagttaattatagtgcttaatattgggaataagattaagcattataattataatgtatgggcctgttggtgtaagctcagataattaaataaaaatagcatgactcaaatgagacatattctgctgaacagtttctacttcctctcccgcctgtcctgtcatgggagacgtgtatagttgctgctgtttcagcaaaccaccataagacgaaaatgcctcaggttgggttgccagtcctttacaactcagcttgaatttcacaacagtgattgtgagaatctgcgtggtatacactgaaatatcggtgtgctgtgatgcaaagcttacctttgacgatattgaatgtgatatagctgtagagaagtacttccttgccttatgtgaggatttcaaacttatttaaattatgtagacaaatcaaagtggcattgcttaatttttagcaggcataataagcaagttaacagtaaaatgcaaaacatgataagcgttgctcaatttttagcaggtataataagcaggttaacagtaaaaatgcaaaacatgatagataagtcactttgaaaattcaaaccaaagttccttcaccttatggaaataggaaattatggacttcaaaattggacacttcctgtttacaaaaagaaattcagagctaaaatcatggtaaaaaaaaatagaaacacttgagaactatggtctttatgggtgcaatttgaaatccttttcatcatcttaccagactaaactaagagcacataccaaacctatcttatggttgaaagttggggtttattttttatatgagaatattatcactattacataacatactcaggacaaagaactttgctcagggaacataccatgtaatatttttgttgtttctttacagactagtctacagtcctgcttactcaaaacaaaccaaataacttatacctttatataagtattatgtactgatgatagtaactacctctgagtttgacacagatcaaaatttttgaatatcagatatcagttatcctatttttatttcatgtgaaaactcctctaaagcagattccctcaactctgtgcatatgtgaatatcactgatgtgaacacattgttcatttacataggtaaaatattactctgtttacagcaaaaggctacctcatagttgatacatagcacacctgtatgtatgctgttccagccttacaggtggctgataattctctggtacagaacctttttatctgtattataaatagcaattcacaactgcatgtttctgacaaacacttgtgaataatgaagcatctcgttttagttagcaaagtctccaaacatttccttaaaataatcatgtatttagtttaaagaattatgggcactgttcaacttaagcaaaacagaacacggaagcagtcttagaagcaccactttgcccagaggtggaggttggaaggggtagcagggagaggggttggtgtatgcaggtattcatgctaggcaaagagtttaaaagacgccaatgtccttcatttactgtctgtgctgccctgaagccaagcgtattgcagcattatagccccaggcacataactaactagcactggcttgccaaggaatgaacatgcaatgccattactagctattgagggaaaagggtctgtgtgaagcatcactttgcagggattactaatggtggggcagcaggtctgtgaattaagttatctcttgacctcaccctcatgtcaacacaaatgtaattcctaaacaagatgcattgccagtctcttagccctgtaagctgatcttttgctacatggcagactataatgaaaacatttttatacttgggtttctagtcttcactagaaggccttggatgtatttttgcagttgaaagatttagaaagatttttacctgcttataacttggaagtttagagtgcaatgtaagaaaaaagatcaagaaatgtcatgttattagcatcagtccacctccaatattgccgatactttttttattctggctcagttttattttgcaccagtgcggccccaagttactgctggttgtatttagtttgtgaataggagcccataagtgttaatagactttgtaacattcactataagatgaattatacaggacatgggaaatctcattaagtcttaaagttaatttaaattaatttatctgttttctctaagaaatgtttatcataaaatatatatgtgtatttcccctttggttataaaatttgggaaagtatgtacaagtgcagctgcactgactttaattttctagatgtcttaatgagatttatttgttttagagaagaacatcttgttaaaagcatcaaactctgtcttacatagctgtcaacagcctctttaagatgtggtggttgtatgatctgtgtcttaattgttcagttagagtgagaagttgacctatgattcatttttaaattttatatttggaacaaagctgcaagttatggtaaagtactgtactgtgagaagtattatgatatttaatgcatctgtggcttaacacttgtgagagttaccagcttgaaaatgatggtgttgactacctcttgaatcacatctatcaaccactggcacctaccaccaagctggcttcaattagtatgtgttgctttttggtattaacaactaaccgtactagagaccaaagtgaaccctgatttttatatgtctttaataatggtgttttatctagtgtttttaaattatcctgtgtagtatttagattacctcattgtccattttgactcatgttgtttacaagtgaaaataaaaacacttgaactgtatgtttttaaaagacaaaaaaggggtagatgtttggaatgcgtttcactcgcatgcagtcatctggagggactgaagcactgtttgcctttctgtacactctgggttttatattctcatttcatgcctaatgtcttattctgtcaattatggatatgttgaggtttaaaaaaattacttgattaaaaataaaacatataacgttggcattta

SEQ ID NO: 16345 - DNA, 6127 bp, Homo sapiens
  source 1..6127: mol_type = unassigned DNA
gaggttactggtggtggcggcggcggcggcggcccgggctccggctgtcggggaagctgctgagctgtgatggtgatgacgaggtgaaaatggcggatctttcgaaatacaatcccggcccctgacataccagaggcggcggcgacggcgacgtcgccaccccggctcccttctcggtccccgggtaccctggagcgctccagtttggacaaactgggaaaggaagctgctggccagagctatcgtgcacgggcaaaacaagccccgccggggctcgggattgcccaggaccttctggagcccctacctcggagcccgagggaggagaaagcggcagccgctggagtgcctgatcaactttctagcgggagaacgatcatggaggtggtgccagctgaggtgaatagtttgcttccagaggaaataatggacactggtataactttagtggatgatgatagtattgaggctgttattgtttcatccccaattcccatggagacagaactggaagaaattgtcaacataaattctactggtgactctacagccacgcccatttccacggaaccaatcacagtgtacagtaaccacactaaccaagttgcagtgaataccacaattactaaagcagattctaataccacagtgaaaccagcttttccaagtggccttcaaaaacttggtgctcagactcctgtgactatatcagccaatcagattattttaaacaaagtatcacagacatctgatcttaaacttggcaatcagacccttaaaccagatggacagaagttaattttaacaactttgggcaagtctggttcaccaattgttttagcactaccccatagccaactaccccaggctcagaaagttacaactcaggcccagtcaggagatgctaagttaccaccgcagcaaattaaagtagttaccattggagggaggccagaggtgaaacctgtcattggtgtctcagcattgaccccaggaagtcaactgattaatactacaactcagccctctgtgttacagacccaacagttaaaaacagtacagattgctaagaagcctcgaacgccaacctctggtccagtaatcacgaagctgatctttgcaaaaccaattaatagtaaagcagttacaggacagacaactcaagtttcaccaccagttattgcaggtagggttctttcacagtctactcccggaactccatcaaagaccataacaatatctgaaagtggtgttattggatcaactttaaattctacaacacagacaccaaataaaatagccatctcacctttgaaatcgccaaataaggcagtgaaatcaactgtgcagaccatcactgttggaggagtgagcacatcacagtttaagacaattattcctctggcaactgctcccaatgtccagcagattcaagtgcctggaagcaagtttcattatgtccgacttgttactgccacatcagccagtagctcaacccagccagttagtcagaatcccagtacaaacactcagcctcttcagcaagcaaagccagtggttgttaatacaaccccagtgcggatgtcagttccaattgtctcagctcaggctgtcaaacaagttgttccaaaaccaatcaatccaacttcacaaatagtaactactagccagccacagcaacggcttatcatgcctgccacaccactgccacagatccagcccaacctcactaacctgccaccaggcactgtcctggcaccagctccgggaacagggaatgtgggttatgcagtgcttccagctcagtatgttactcagctacagcagtcttcatatgtatcaatagcaagcaactctacctttactggaacatctggtatccagacccaggcacggcttccattcaatggcataatcccatcagagtcggccagtcggccccgaaagccctgtaattgtacaaaatcactgtgtttgaaattgtattgtgattgctttgcaaatggtgaattttgcaacaactgcaattgtactaattgttacaacaatttggaacatgaaaatgaaaggcaaaaagcaataaaggcatgccttgacagaaatccagaagcctttaagcctaagatagggaaaggaaaggagggagaatctgatcgacgtcatagcaaagggtgtaattgcaaacgatcaggatgtcttaaaaactactgtgaatgctatgaggcaaaaataatgtgttcctcaatatgcaaatgtattggctgtaagaattttgaagaaagcccggaaaggaagacattgatgcatttggcagatgcagctgaagtaagggtacagcaacaaacagcagccaagacgaagttatcctctcaaatttcagacttgcttactaggccaacaccagctttaaatagtggaggcggaaaattgccatttacatttgtaactaaggaagtagctgaagccacatgtaattgcctccttgcccaggcagagcaggcagacaagaagggaaaatcaaaggcagcagcggaacggatgatacttgaggaattcggacgatgtttgatgagtgtcatcaactctgcaggaaaggcaaaaagtgacccttgtgccatgaattgctaactcttgcacaaaagactgataaatggaactgtacagaaaatttaaggtgcagggacacttgattttctggaagaaaaacaattactgtattttaattcagtccttgttttaaaagacctgaaattataatactgaaggagaagaaattttaaatgaggaaattagtacattttaaatcttagttaaatctgcttatgccccttctaaattgaatttttctttattatatagattttttaatttgcttgggtttcttaagaattagatgttctctttctgatacctttgacaaaaaatgtttataaattcatataatttataatgtatggtgttgtatgactttgttaatagaaaagccaaagcagcagtggttagcacccattctttgggacttgatctagaatatctgcagacagaatgttacataaacaaattcttatgaaacacattcaaatgacattttgtatttagaaaaggactatcttttaaagaaaaagcagccttttagggccgattctggaataatatcctgttgtcactttgggaatgtcagaaggggaaacaatccccaggcacactaaaaattttttaaagttatttaaaaaaacatataaaatattaaaggacagtaaatctcagaggatgggcaatgtgtttctataataaggaaaggctaacagatgctctgggctgtctccattttctttcaaagaggtggtatgtatttgaagtaataaattgtcaaagtgattactgggtactattaaaatgataggtggatataaatggaagtaaacattatgtagtgataatatagaacctcacatagtaatcaagtataaaatttggcatgggtggagaaacaaagaatagggaagctgcaaaagatgaatttagagaagttttcatctatacaatcaattatttttacagacttttttttttttttttttgagacggagtctcgctgtgtagcccaggctggagtgcaatggtgagatctcagctcactgcaacgcctctgcctcccaggttcaagcgattctcctgcctcagcctcccgtgtagctgggactacaggtgcatgccaccatgcccggctcattttttgtatttttagtagagacggggtttcaccgtgttagccaggatggtctcgatctcctgacctcgtgattcgcccgcctcggcctcccaaagtgctgggattacaggcataagccgccgtgccaggccctttttatagacttttgaactaagaggtttcaaaccaaatcgcaactcttacttgatttacagaaatgggcctcctaacaaaattttcaaaattgtggtgggatttctttttataagggaagtttaatatggcattattttcagccagtgatttggaaggtctgttttcctataattactaaaataacctaaatcattttcagtattcaaaaactctatgaatttaagagcctgttgtgacaggactcttgattttatgacaagaaaaaaccatgttggaattcaggcattttgttaggtaccttaatcatcagtaattagtatatgattatttcatttcctacaaggactctatagttgtatgtattaagtgtgtatatatgttcatatgaacatgcaagatataggcaatagaaattaagtaatccaaaagaggattccgttattcactaaagtatcttccttttaaatttggatttataaaatcatagtgcagtaactttaaatgtagatagttcaaacattcttagcacctcaatctagtatgtttaattaaaatttgtataaatgtaaattagtgtaagagggtaaaataataatcaagttatttttcaaaagattgcaataagtttttggtctaaacttaaactttgttcattttgtacatactctgtgttaattctaattgcacctttgtgatgtgtatttatatacagtgtgcagaaaatgttcgtgaaattttgattacaattgtagattatgtatgatggcattgcttacgaatgttttgcttgtaaaaaaatttcaaggtgcaatcaaatgctactagtttttctgattttcaaaaatctatctatctaaaatattaagccttttccttcctgtgtagtacttactaaataactttttgtattcaggcatttgcatcaaattgctgaacaagatgaatagccacattaattcaatgattttaaaagactatttggggagggttgggtatataattttttagctctatttacatcccaaagtagaaagattaaatttatatttactagagctattcaaagaatacacttttctatattgtaaaaacaggacagcaaagtaaatcatacagaaaataaacatttatactattctgtaaaaaaggttttgcattttttctttagtataataacaccactttattaaccatttaatatgcaaaaaaccttttaaattatctgaagtaaatttgacattacttctgaaaacacacaactaaaaaattctatcattttgctcagttattactaacataaattgctttgaaatgagaatatgtcttctctttttttccccactgtttcttttaagagcagaaactcagccgggcatggtggctcacgcctgtaattccagcactttgggaggtcaaggcgggtgaatcacttgagtccaggagttctagaccagcccaggctacatggtgaaaccctgtctctactaaaaatataaaaaaattcactgcgtgtggtggcgcacacctgcagtcctcgctactttgaaggcctgagcctgcagaggttgaggctgtagtgagtcaaaattacaccactgcactccagcctggcaatcagagtgagaccttgtctcaaaaacaaaaatacctagaaaatcaatctactctgtcttttaatgtgaaatgttcttatgatagctatctttcttagtttcctttttttctgaagcactaaacacaacctgtaggtcttatctctggggtctgggaaacagaaccttaatgttacaggtacaaaagcaaacagagtgattagttccccattttctggtagtgaacaactgacattttttcaatcttatgtaaaatgtgaataaaaataattttagaaaagttatctatttttattgttctgtaacacaaatagttaagaaaatgaatacttgttatgtaaatgaagcttcacagcaggacctccggccataactttgatcatgttgtatctcttaagcattttatataggaattctggtgtggctacccaaagcagaagggaaggcaatcaactaaaaatccctttctattggagttattttcatcatgtaaattacttcaggcttttcttgttagggcttcttgaatgcacattttgtcattatctgtataccaaaggtgagcttttttttttaatccatgtgattttatgagttgaaagctataaggttttttttaattaaaaatttccttctaaatggcaaa

SEQ ID NO: 16346 - DNA, 5625 bp, Homo sapiens
  source 1..5625: mol_type = unassigned DNA
atggaggtggtgccagctgaggtgaatagtttgcttccagaggaaataatggacactggtataactttagtggatgatgatagtattgaggctgttattgtttcatccccaattcccatggagacagaactggaagaaattgtcaacataaattctactggtgactctacagccacgcccatttccacggaaccaatcacagtgtacagtaaccacactaaccaagttgcagtgaataccacaattactaaagcagattctaataccacagtgaaaccagcttttccaagtggccttcaaaaacttggtgctcagactcctgtgactatatcagccaatcagattattttaaacaaagtatcacagacatctgatcttaaacttggcaatcagacccttaaaccagatggacagaagttaattttaacaactttgggcaagtctggttcaccaattgttttagcactaccccatagccaactaccccaggctcagaaagttacaactcaggcccagtcaggagatgctaagttaccaccgcagcaaattaaagtagttaccattggagggaggccagaggtgaaacctgtcattggtgtctcagcattgaccccaggaagtcaactgattaatactacaactcagccctctgtgttacagacccaacagttaaaaacagtacaggtagggttctttcacagtctactcccggaactccatcaaagaccataacaatatctgaaagtggtgttattggatcaactttaaattctacaacacagacaccaaataaaatagccatctcacctttgaaatcgccaaataaggcagtgaaatcaactgtgcagaccatcactgttggaggagtgagcacatcacagtttaagacaattattcctctggcaactgctcccaatgtccagcagattcaagtgcctggaagcaagtttcattatgtccgacttgttactgccacatcagccagtagctcaacccagccagttagtcagaatcccagtacaaacactcagcctcttcagcaagcaaagccagtggttgttaatacaaccccagtgcggatgtcagttccaattgtctcagctcaggctgtcaaacaagttgttccaaaaccaatcaatccaacttcacaaatagtaactactagccagccacagcaacggcttatcatgcctgccacaccactgccacagatccagcccaacctcactaacctgccaccaggcactgtcctggcaccagctccgggaacagggaatgtgggttatgcagtgcttccagctcagtatgttactcagctacagcagtcttcatatgtatcaatagcaagcaactctacctttactggaacatctggtatccagacccaggcacggcttccattcaatggcataatcccatcagagtcggccagtcggccccgaaagccctgtaattgtacaaaatcactgtgtttgaaattgtattgtgattgctttgcaaatggtgaattttgcaacaactgcaattgtactaattgttacaacaatttggaacatgaaaatgaaaggcaaaaagcaataaaggcatgccttgacagaaatccagaagcctttaagcctaagatagggaaaggaaaggagggagaatctgatcgacgtcatagcaaagggtgtaattgcaaacgatcaggatgtcttaaaaactactgtgaatgctatgaggcaaaaataatgtgttcctcaatatgcaaatgtattggctgtaagaattttgaagaaagcccggaaaggaagacattgatgcatttggcagatgcagctgaagtaagggtacagcaacaaacagcagccaagacgaagttatcctctcaaatttcagacttgcttactaggccaacaccagctttaaatagtggaggcggaaaattgccatttacatttgtaactaaggaagtagctgaagccacatgtaattgcctccttgcccaggcagagcaggcagacaagaagggaaaatcaaaggcagcagcggaacggatgatacttgaggaattcggacgatgtttgatgagtgtcatcaactctgcaggaaaggcaaaaagtgacccttgtgccatgaattgctaactcttgcacaaaagactgataaatggaactgtacagaaaatttaaggtgcagggacacttgattttctggaagaaaaacaattactgtattttaattcagtccttgttttaaaagacctgaaattataatactgaaggagaagaaattttaaatgaggaaattagtacattttaaatcttagttaaatctgcttatgccccttctaaattgaatttttctttattatatagattttttaatttgcttgggtttcttaagaattagatgttctctttctgatacctttgacaaaaaatgtttataaattcatataatttataatgtatggtgttgtatgactttgttaatagaaaagccaaagcagcagtggttagcacccattctttgggacttgatctagaatatctgcagacagaatgttacataaacaaattcttatgaaacacattcaaatgacattttgtatttagaaaaggactatcttttaaagaaaaagcagccttttagggccgattctggaataatatcctgttgtcactttgggaatgtcagaaggggaaacaatccccaggcacactaaaaattttttaaagttatttaaaaaaacatataaaatattaaaggacagtaaatctcagaggatgggcaatgtgtttctataataaggaaaggctaacagatgctctgggctgtctccattttctttcaaagaggtggtatgtatttgaagtaataaattgtcaaagtgattactgggtactattaaaatgataggtggatataaatggaagtaaacattatgtagtgataatatagaacctcacatagtaatcaagtataaaatttggcatgggtggagaaacaaagaatagggaagctgcaaaagatgaatttagagaagttttcatctatacaatcaattatttttacagacttttttttttttttttttgagacggagtctcgctgtgtagcccaggctggagtgcaatggtgagatctcagctcactgcaacgcctctgcctcccaggttcaagcgattctcctgcctcagcctcccgtgtagctgggactacaggtgcatgccaccatgcccggctcattttttgtatttttagtagagacggggtttcaccgtgttagccaggatggtctcgatctcctgacctcgtgattcgcccgcctcggcctcccaaagtgctgggattacaggcataagccgccgtgccaggccctttttatagacttttgaactaagaggtttcaaaccaaatcgcaactcttacttgatttacagaaatgggcctcctaacaaaattttcaaaattgtggtgggatttctttttataagggaagtttaatatggcattattttcagccagtgatttggaaggtctgttttcctataattactaaaataacctaaatcattttcagtattcaaaaactctatgaatttaagagcctgttgtgacaggactcttgattttatgacaagaaaaaaccatgttggaattcaggcattttgttaggtaccttaatcatcagtaattagtatatgattatttcatttcctacaaggactctatagttgtatgtattaagtgtgtatatatgttcatatgaacatgcaagatataggcaatagaaattaagtaatccaaaagaggattccgttattcactaaagtatcttccttttaaatttggatttataaaatcatagtgcagtaactttaaatgtagatagttcaaacattcttagcacctcaatctagtatgtttaattaaaatttgtataaatgtaaattagtgtaagagggtaaaataataatcaagttatttttcaaaagattgcaataagtttttggtctaaacttaaactttgttcattttgtacatactctgtgttaattctaattgcacctttgtgatgtgtatttatatacagtgtgcagaaaatgttcgtgaaattttgattacaattgtagattatgtatgatggcattgcttacgaatgttttgcttgtaaaaaaatttcaaggtgcaatcaaatgctactagtttttctgattttcaaaaatctatctatctaaaatattaagccttttccttcctgtgtagtacttactaaataactttttgtattcaggcatttgcatcaaattgctgaacaagatgaatagccacattaattcaatgattttaaaagactatttggggagggttgggtatataattttttagctctatttacatcccaaagtagaaagattaaatttatatttactagagctattcaaagaatacacttttctatattgtaaaaacaggacagcaaagtaaatcatacagaaaataaacatttatactattctgtaaaaaaggttttgcattttttctttagtataataacaccactttattaaccatttaatatgcaaaaaaccttttaaattatctgaagtaaatttgacattacttctgaaaacacacaactaaaaaattctatcattttgctcagttattactaacataaattgctttgaaatgagaatatgtcttctctttttttccccactgtttcttttaagagcagaaactcagccgggcatggtggctcacgcctgtaattccagcactttgggaggtcaaggcgggtgaatcacttgagtccaggagttctagaccagcccaggctacatggtgaaaccctgtctctactaaaaatataaaaaaattcactgcgtgtggtggcgcacacctgcagtcctcgctactttgaaggcctgagcctgcagaggttgaggctgtagtgagtcaaaattacaccactgcactccagcctggcaatcagagtgagaccttgtctcaaaaacaaaaatacctagaaaatcaatctactctgtcttttaatgtgaaatgttcttatgatagctatctttcttagtttcctttttttctgaagcactaaacacaacctgtaggtcttatctctggggtctgggaaacagaaccttaatgttacaggtacaaaagcaaacagagtgattagttccccattttctggtagtgaacaactgacattttttcaatcttatgtaaaatgtgaataaaaataattttagaaaagttatctatttttattgttctgtaacacaaatagttaagaaaatgaatacttgttatgtaaatgaagcttcacagcaggacctccggccataactttgatcatgttgtatctcttaagcattttatataggaattctggtgtggctacccaaagcagaagggaaggcaatcaactaaaaatccctttctattggagttattttcatcatgtaaattacttcaggcttttcttgttagggcttcttgaatgcacattttgtcattatctgtataccaaaggtgagcttttttttttaatccatgtgattttatgagttgaaagctataaggttttttttaattaaaaatttccttctaaatggcaaa

SEQ ID NO: 16347 - DNA, 5482 bp, Homo sapiens
  source 1..5482: mol_type = unassigned DNA
atggaggtggtgccagctgaggtgaatagtttgcttccagaggaaataatggacactggtataactttagtggatgatgatagtattgaggctgttattgtttcatccccaattcccatggagacagaactggaagaaattgtcaacataaattctactggtgactctacagccacgcccatttccacggaaccaatcacagtgtacagtaaccacactaaccaagttgcagtgaataccacaattactaaagcagattctaataccacagtgaaaccagcttttccaagtggccttcaaaaacttggtgctcagactcctgtgactatatcagccaatcagattattttaaacaaagtatcacagacatctgatcttaaacttggcaatcagacccttaaaccagatggacagaagttaattttaacaactttgggcaagtctggttcaccaattgttttagcactaccccatagccaactaccccaggctcagaaagttacaactcaggcccagtcaggagatgctaagttaccaccgcagcaaattaaagtagttaccattggagggaggccagaggtgaaacctgtcattggtgtctcagcattgaccccaggaagtcaactgattaatactacaactcagccctctgtgttacagacccaacagttaaaaacagtacaggcagtgaaatcaactgtgcagaccatcactgttggaggagtgagcacatcacagtttaagacaattattcctctggcaactgctcccaatgtccagcagattcaagtgcctggaagcaagtttcattatgtccgacttgttactgccacatcagccagtagctcaacccagccagttagtcagaatcccagtacaaacactcagcctcttcagcaagcaaagccagtggttgttaatacaaccccagtgcggatgtcagttccaattgtctcagctcaggctgtcaaacaagttgttccaaaaccaatcaatccaacttcacaaatagtaactactagccagccacagcaacggcttatcatgcctgccacaccactgccacagatccagcccaacctcactaacctgccaccaggcactgtcctggcaccagctccgggaacagggaatgtgggttatgcagtgcttccagctcagtatgttactcagctacagcagtcttcatatgtatcaatagcaagcaactctacctttactggaacatctggtatccagacccaggcacggcttccattcaatggcataatcccatcagagtcggccagtcggccccgaaagccctgtaattgtacaaaatcactgtgtttgaaattgtattgtgattgctttgcaaatggtgaattttgcaacaactgcaattgtactaattgttacaacaatttggaacatgaaaatgaaaggcaaaaagcaataaaggcatgccttgacagaaatccagaagcctttaagcctaagatagggaaaggaaaggagggagaatctgatcgacgtcatagcaaagggtgtaattgcaaacgatcaggatgtcttaaaaactactgtgaatgctatgaggcaaaaataatgtgttcctcaatatgcaaatgtattggctgtaagaattttgaagaaagcccggaaaggaagacattgatgcatttggcagatgcagctgaagtaagggtacagcaacaaacagcagccaagacgaagttatcctctcaaatttcagacttgcttactaggccaacaccagctttaaatagtggaggcggaaaattgccatttacatttgtaactaaggaagtagctgaagccacatgtaattgcctccttgcccaggcagagcaggcagacaagaagggaaaatcaaaggcagcagcggaacggatgatacttgaggaattcggacgatgtttgatgagtgtcatcaactctgcaggaaaggcaaaaagtgacccttgtgccatgaattgctaactcttgcacaaaagactgataaatggaactgtacagaaaatttaaggtgcagggacacttgattttctggaagaaaaacaattactgtattttaattcagtccttgttttaaaagacctgaaattataatactgaaggagaagaaattttaaatgaggaaattagtacattttaaatcttagttaaatctgcttatgccccttctaaattgaatttttctttattatatagattttttaatttgcttgggtttcttaagaattagatgttctctttctgatacctttgacaaaaaatgtttataaattcatataatttataatgtatggtgttgtatgactttgttaatagaaaagccaaagcagcagtggttagcacccattctttgggacttgatctagaatatctgcagacagaatgttacataaacaaattcttatgaaacacattcaaatgacattttgtatttagaaaaggactatcttttaaagaaaaagcagccttttagggccgattctggaataatatcctgttgtcactttgggaatgtcagaaggggaaacaatccccaggcacactaaaaattttttaaagttatttaaaaaaacatataaaatattaaaggacagtaaatctcagaggatgggcaatgtgtttctataataaggaaaggctaacagatgctctgggctgtctccattttctttcaaagaggtggtatgtatttgaagtaataaattgtcaaagtgattactgggtactattaaaatgataggtggatataaatggaagtaaacattatgtagtgataatatagaacctcacatagtaatcaagtataaaatttggcatgggtggagaaacaaagaatagggaagctgcaaaagatgaatttagagaagttttcatctatacaatcaattatttttacagacttttttttttttttttttgagacggagtctcgctgtgtagcccaggctggagtgcaatggtgagatctcagctcactgcaacgcctctgcctcccaggttcaagcgattctcctgcctcagcctcccgtgtagctgggactacaggtgcatgccaccatgcccggctcattttttgtatttttagtagagacggggtttcaccgtgttagccaggatggtctcgatctcctgacctcgtgattcgcccgcctcggcctcccaaagtgctgggattacaggcataagccgccgtgccaggccctttttatagacttttgaactaagaggtttcaaaccaaatcgcaactcttacttgatttacagaaatgggcctcctaacaaaattttcaaaattgtggtgggatttctttttataagggaagtttaatatggcattattttcagccagtgatttggaaggtctgttttcctataattactaaaataacctaaatcattttcagtattcaaaaactctatgaatttaagagcctgttgtgacaggactcttgattttatgacaagaaaaaaccatgttggaattcaggcattttgttaggtaccttaatcatcagtaattagtatatgattatttcatttcctacaaggactctatagttgtatgtattaagtgtgtatatatgttcatatgaacatgcaagatataggcaatagaaattaagtaatccaaaagaggattccgttattcactaaagtatcttccttttaaatttggatttataaaatcatagtgcagtaactttaaatgtagatagttcaaacattcttagcacctcaatctagtatgtttaattaaaatttgtataaatgtaaattagtgtaagagggtaaaataataatcaagttatttttcaaaagattgcaataagtttttggtctaaacttaaactttgttcattttgtacatactctgtgttaattctaattgcacctttgtgatgtgtatttatatacagtgtgcagaaaatgttcgtgaaattttgattacaattgtagattatgtatgatggcattgcttacgaatgttttgcttgtaaaaaaatttcaaggtgcaatcaaatgctactagtttttctgattttcaaaaatctatctatctaaaatattaagccttttccttcctgtgtagtacttactaaataactttttgtattcaggcatttgcatcaaattgctgaacaagatgaatagccacattaattcaatgattttaaaagactatttggggagggttgggtatataattttttagctctatttacatcccaaagtagaaagattaaatttatatttactagagctattcaaagaatacacttttctatattgtaaaaacaggacagcaaagtaaatcatacagaaaataaacatttatactattctgtaaaaaaggttttgcattttttctttagtataataacaccactttattaaccatttaatatgcaaaaaaccttttaaattatctgaagtaaatttgacattacttctgaaaacacacaactaaaaaattctatcattttgctcagttattactaacataaattgctttgaaatgagaatatgtcttctctttttttccccactgtttcttttaagagcagaaactcagccgggcatggtggctcacgcctgtaattccagcactttgggaggtcaaggcgggtgaatcacttgagtccaggagttctagaccagcccaggctacatggtgaaaccctgtctctactaaaaatataaaaaaattcactgcgtgtggtggcgcacacctgcagtcctcgctactttgaaggcctgagcctgcagaggttgaggctgtagtgagtcaaaattacaccactgcactccagcctggcaatcagagtgagaccttgtctcaaaaacaaaaatacctagaaaatcaatctactctgtcttttaatgtgaaatgttcttatgatagctatctttcttagtttcctttttttctgaagcactaaacacaacctgtaggtcttatctctggggtctgggaaacagaaccttaatgttacaggtacaaaagcaaacagagtgattagttccccattttctggtagtgaacaactgacattttttcaatcttatgtaaaatgtgaataaaaataattttagaaaagttatctatttttattgttctgtaacacaaatagttaagaaaatgaatacttgttatgtaaatgaagcttcacagcaggacctccggccataactttgatcatgttgtatctcttaagcattttatataggaattctggtgtggctacccaaagcagaagggaaggcaatcaactaaaaatccctttctattggagttattttcatcatgtaaattacttcaggcttttcttgttagggcttcttgaatgcacattttgtcattatctgtataccaaaggtgagcttttttttttaatccatgtgattttatgagttgaaagctataaggttttttttaattaaaaatttccttctaaatggcaaa

SEQ ID NO: 16348 - DNA, 4254 bp, Homo sapiens
  source 1..4254: mol_type = unassigned DNA
ctttcgaaatacaatcccggcccctgacataccagaggcggcggcgacggcgacgtcgccaccccggctcccttctcggtccccgggtaccctggagcgctccagtttggacaaactgggaaaggaagctgctggccagagctatcgtgcacgggcaaaacaagccccgccggggctcgggattgcccaggaccttctggagcccctacctcggagcccgagggaggagaaagcggcagccgctggagtgcctgatcaactttctagcgggagaacgatcatggaggtggtgccagctgagattgctaagaagcctcgaacgccaacctctggtccagtaatcacgaagctgatctttgcaaaaccaattaatagtaaagcagttacaggacagacaactcaagtttcaccaccagttattgcaggtagggttctttcacagtctactcccggaactccatcaaagaccataacaatatctgaaagtggtgttattggatcaactttaaattctacaacacagacaccaaataaaatagccatctcacctttgaaatcgccaaataaggcagtgaaatcaactgtgcagaccatcactgttggaggagtgagcacatcacagtttaagacaattattcctctggcaactgctcccaatgtccagcagattcaagtgcctggaagcaagtttcattatgtccgacttgttactgccacatcagccagtagctcaacccagccagttagtcagaatcccagtacaaacactcagcctcttcagcaagcaaagccagtggttgttaatacaaccccagtgcggatgtcagttccaattgtctcagctcaggctgtcaaacaagttgttccaaaaccaatcaatccaacttcacaaatagtaactactagccagccacagcaacggcttatcatgcctgccacaccactgccacagatccagcccaacctcactaacctgccaccaggcactgtcctggcaccagctccgggaacagggaatgtgggttatgcagtgcttccagctcagtatgttactcagctacagcagtcttcatatgtatcaatagcaagcaactctacctttactggaacatctggtatccagacccaggcacggcttccattcaatggcataatcccatcagagtcggccagtcggccccgaaagccctgtaattgtacaaaatcactgtgtttgaaattgtattgtgattgctttgcaaatggtgaattttgcaacaactgcaattgtactaattgttacaacaatttggaacatgaaaatgaaaggcaaaaagcaataaaggcatgccttgacagaaatccagaagcctttaagcctaagatagggaaaggaaaggagggagaatctgatcgacgtcatagcaaagggtgtaattgcaaacgatcaggatgtcttaaaaactactgtgaatgctatgaggcaaaaataatgtgttcctcaatatgcaaatgtattggctgtaagaattttgaagaaagcccggaaaggaagacattgatgcatttggcagatgcagctgaagtaagggtacagcaacaaacagcagccaagacgaagttatcctctcaaatttcagacttgcttactaggccaacaccagctttaaatagtggaggcggaaaattgccatttacatttgtaactaaggaagtagctgaagccacatgtaattgcctccttgcccaggcagagcaggcagacaagaagggaaaatcaaaggcagcagcggaacggatgatacttgaggaattcggacgatgtttgatgagtgtcatcaactctgcaggaaaggcaaaaagtgacccttgtgccatgaattgctaactcttgcacaaaagactgataaatggaactgtacagaaaatttaaggtgcagggacacttgattttctggaagaaaaacaattactgtattttaattcagtccttgttttaaaagacctgaaattataatactgaaggagaagaaattttaaatgaggaaattagtacattttaaatcttagttaaatctgcttatgccccttctaaattgaatttttctttattatatagattttttaatttgcttgggtttcttaagaattagatgttctctttctgatacctttgacaaaaaatgtttataaattcatataatttataatgtatggtgttgtatgactttgttaatagaaaagccaaagcagcagtggttagcacccattctttgggacttgatctagaatatctgcagacagaatgttacataaacaaattcttatgaaacacattcaaatgacattttgtatttagaaaaggactatcttttaaagaaaaagcagccttttagggccgattctggaataatatcctgttgtcactttgggaatgtcagaaggggaaacaatccccaggcacactaaaaattttttaaagttatttaaaaaaacatataaaatattaaaggacagtaaatctcagaggatgggcaatgtgtttctataataaggaaaggctaacagatgctctgggctgtctccattttctttcaaagaggtggtatgtatttgaagtaataaattgtcaaagtgattactgggtactattaaaatgataggtggatataaatggaagtaaacattatgtagtgataatatagaacctcacatagtaatcaagtataaaatttggcatgggtggagaaacaaagaatagggaagctgcaaaagatgaatttagagaagttttcatctatacaatcaattatttttacagacttttttttttttttttttgagacggagtctcgctgtgtagcccaggctggagtgcaatggtgagatctcagctcactgcaacgcctctgcctcccaggttcaagcgattctcctgcctcagcctcccgtgtagctgggactacaggtgcatgccaccatgcccggctcattttttgtatttttagtagagacggggtttcaccgtgttagccaggatggtctcgatctcctgacctcgtgattcgcccgcctcggcctcccaaagtgctgggattacaggcataagccgccgtgccaggccctttttatagacttttgaactaagaggtttcaaaccaaatcgcaactcttacttgatttacagaaatgggcctcctaacaaaattttcaaaattgtggtgggatttctttttataagggaagtttaatatggcattattttcagccagtgatttggaaggtctgttttcctataattactaaaataacctaaatcattttcagtattcaaaaactctatgaatttaagagcctgttgtgacaggactcttgattttatgacaagaaaaaaccatgttggaattcaggcattttgttaggtaccttaatcatcagtaattagtatatgattatttcatttcctacaaggactctatagttgtatgtattaagtgtgtatatatgttcatatgaacatgcaagatataggcaatagaaattaagtaatccaaaagaggattccgttattcactaaagtatcttccttttaaatttggatttataaaatcatagtgcagtaactttaaatgtagatagttcaaacattcttagcacctcaatctagtatgtttaattaaaatttgtataaatgtaaattagtgtaagagggtaaaataataatcaagttatttttcaaaagattgcaataagtttttggtctaaacttaaactttgttcattttgtacatactctgtgttaattctaattgcacctttgtgatgtgtatttatatacagtgtgcagaaaatgttcgtgaaattttgattacaattgtagattatgtatgatggcattgcttacgaatgttttgcttgtaaaaaaatttcaaggtgcaatcaaatgctactagtttttctgattttcaaaaatctatctatctaaaatattaagccttttccttcctgtgtagtacttactaaataactttttgtattcaggcatttgcatcaaattgctgaacaagatgaatagccacattaattcaatgattttaaaagactatttggggagggttgggtatataattttttagctctatttacatcccaaagtagaaagattaaatttatatttactagagctattcaaagaatacacttttctatattgtaaaaacaggacagcaaagtaaatcatacagaaaataaacatttatactattctgtaaaaaa

SEQ ID NO: 16349 - DNA, 4083 bp, Homo sapiens
  source 1..4083: mol_type = unassigned DNA
actggtggtggcggcggcggcggcggcccgggctccggctgtcggggaagctgctgagctgtgatggtgatgacgagtgcctgatcaactttctagcgggagaacgatcatggaggtggtgccagctgagattgctaagaagcctcgaacgccaacctctggtccagtaatcacgaagctgatctttgcaaaaccaattaatagtaaagcagttacaggacagacaactcaagtttcaccaccagttattgcaggtagggttctttcacagtctactcccggaactccatcaaagaccataacaatatctgaaagtggtgttattggatcaactttaaattctacaacacagacaccaaataaaatagccatctcacctttgaaatcgccaaataaggcagtgaaatcaactgtgcagaccatcactgttggaggagtgagcacatcacagtttaagacaattattcctctggcaactgctcccaatgtccagcagattcaagtgcctggaagcaagtttcattatgtccgacttgttactgccacatcagccagtagctcaacccagccagttagtcagaatcccagtacaaacactcagcctcttcagcaagcaaagccagtggttgttaatacaaccccagtgcggatgtcagttccaattgtctcagctcaggctgtcaaacaagttgttccaaaaccaatcaatccaacttcacaaatagtaactactagccagccacagcaacggcttatcatgcctgccacaccactgccacagatccagcccaacctcactaacctgccaccaggcactgtcctggcaccagctccgggaacagggaatgtgggttatgcagtgcttccagctcagtatgttactcagctacagcagtcttcatatgtatcaatagcaagcaactctacctttactggaacatctggtatccagacccaggcacggcttccattcaatggcataatcccatcagagtcggccagtcggccccgaaagccctgtaattgtacaaaatcactgtgtttgaaattgtattgtgattgctttgcaaatggtgaattttgcaacaactgcaattgtactaattgttacaacaatttggaacatgaaaatgaaaggcaaaaagcaataaaggcatgccttgacagaaatccagaagcctttaagcctaagatagggaaaggaaaggagggagaatctgatcgacgtcatagcaaagggtgtaattgcaaacgatcaggatgtcttaaaaactactgtgaatgctatgaggcaaaaataatgtgttcctcaatatgcaaatgtattggctgtaagaattttgaagaaagcccggaaaggaagacattgatgcatttggcagatgcagctgaagtaagggtacagcaacaaacagcagccaagacgaagttatcctctcaaatttcagacttgcttactaggccaacaccagctttaaatagtggaggcggaaaattgccatttacatttgtaactaaggaagtagctgaagccacatgtaattgcctccttgcccaggcagagcaggcagacaagaagggaaaatcaaaggcagcagcggaacggatgatacttgaggaattcggacgatgtttgatgagtgtcatcaactctgcaggaaaggcaaaaagtgacccttgtgccatgaattgctaactcttgcacaaaagactgataaatggaactgtacagaaaatttaaggtgcagggacacttgattttctggaagaaaaacaattactgtattttaattcagtccttgttttaaaagacctgaaattataatactgaaggagaagaaattttaaatgaggaaattagtacattttaaatcttagttaaatctgcttatgccccttctaaattgaatttttctttattatatagattttttaatttgcttgggtttcttaagaattagatgttctctttctgatacctttgacaaaaaatgtttataaattcatataatttataatgtatggtgttgtatgactttgttaatagaaaagccaaagcagcagtggttagcacccattctttgggacttgatctagaatatctgcagacagaatgttacataaacaaattcttatgaaacacattcaaatgacattttgtatttagaaaaggactatcttttaaagaaaaagcagccttttagggccgattctggaataatatcctgttgtcactttgggaatgtcagaaggggaaacaatccccaggcacactaaaaattttttaaagttatttaaaaaaacatataaaatattaaaggacagtaaatctcagaggatgggcaatgtgtttctataataaggaaaggctaacagatgctctgggctgtctccattttctttcaaagaggtggtatgtatttgaagtaataaattgtcaaagtgattactgggtactattaaaatgataggtggatataaatggaagtaaacattatgtagtgataatatagaacctcacatagtaatcaagtataaaatttggcatgggtggagaaacaaagaatagggaagctgcaaaagatgaatttagagaagttttcatctatacaatcaattatttttacagacttttttttttttttttttgagacggagtctcgctgtgtagcccaggctggagtgcaatggtgagatctcagctcactgcaacgcctctgcctcccaggttcaagcgattctcctgcctcagcctcccgtgtagctgggactacaggtgcatgccaccatgcccggctcattttttgtatttttagtagagacggggtttcaccgtgttagccaggatggtctcgatctcctgacctcgtgattcgcccgcctcggcctcccaaagtgctgggattacaggcataagccgccgtgccaggccctttttatagacttttgaactaagaggtttcaaaccaaatcgcaactcttacttgatttacagaaatgggcctcctaacaaaattttcaaaattgtggtgggatttctttttataagggaagtttaatatggcattattttcagccagtgatttggaaggtctgttttcctataattactaaaataacctaaatcattttcagtattcaaaaactctatgaatttaagagcctgttgtgacaggactcttgattttatgacaagaaaaaaccatgttggaattcaggcattttgttaggtaccttaatcatcagtaattagtatatgattatttcatttcctacaaggactctatagttgtatgtattaagtgtgtatatatgttcatatgaacatgcaagatataggcaatagaaattaagtaatccaaaagaggattccgttattcactaaagtatcttccttttaaatttggatttataaaatcatagtgcagtaactttaaatgtagatagttcaaacattcttagcacctcaatctagtatgtttaattaaaatttgtataaatgtaaattagtgtaagagggtaaaataataatcaagttatttttcaaaagattgcaataagtttttggtctaaacttaaactttgttcattttgtacatactctgtgttaattctaattgcacctttgtgatgtgtatttatatacagtgtgcagaaaatgttcgtgaaattttgattacaattgtagattatgtatgatggcattgcttacgaatgttttgcttgtaaaaaaatttcaaggtgcaatcaaatgctactagtttttctgattttcaaaaatctatctatctaaaatattaagccttttccttcctgtgtagtacttactaaataactttttgtattcaggcatttgcatcaaattgctgaacaagatgaatagccacattaattcaatgattttaaaagactatttggggagggttgggtatataattttttagctctatttacatcccaaagtagaaagattaaatttatatttactagagctattcaaagaatacacttttctatattgtaaaaacaggacagcaaagtaaatcatacagaaaataaacatttatactattctgtaaaaaa

SEQ ID NO: 16350 - DNA, 2742 bp, Homo sapiens
  source 1..2742: mol_type = unassigned DNA
gcggcggtggaatggggctgggcgcgtgattttgaacaaaccctggtctgtgtctcggaggcgccgccgccgccgctgctgctgggagcccagggagcgccgcgcgaccaggaggcggcggcgccgccggctttgtgcctgatcaactttctagcgggagaacgatcatggaggtggtgccagctgaggtgaatagtttgcttccagaggaaataatggacactggtataactttagtggatgatgatagtattgaggctgttattgtttcatccccaattcccatggagacagaactggaagaaattgtcaacataaattctactggtgactctacagccacgcccatttccacggaaccaatcacagtgtacagtaaccacactaaccaagttgcagtgaataccacaattactaaagcagattctaataccacagtgaaaccagcttttccaagtggccttcaaaaacttggtgctcagactcctgtgactatatcagccaatcagattattttaaacaaagtatcacagacatctgatcttaaacttggcaatcagacccttaaaccagatggacagaagttaattttaacaactttgggcaagtctggttcaccaattgttttagcactaccccatagccaactaccccaggctcagaaagttacaactcaggcccagtcaggagatgctaagttaccaccgcagcaaattaaagtagttaccattggagggaggccagaggtgaaacctgtcattggtgtctcagcattgaccccaggaagtcaactgattaatactacaactcagccctctgtgttacagacccaacagttaaaaacagtacagattgctaagaagcctcgaacgccaacctctggtccagtaatcacgaagctgatctttgcaaaaccaattaatagtaaagcagttacaggacagacaactcaagtttcaccaccagttattgcaggtagggttctttcacagtctactcccggaactccatcaaagaccataacaatatctgaaagtggtgttattggatcaactttaaattctacaacacagacaccaaataaaatagccatctcacctttgaaatcgccaaataaggcagtgaaatcaactgtgcagaccatcactgttggaggagtgagcacatcacagtttaagacaattattcctctggcaactgctcccaatgtccagcagattcaagtgcctggaagcaagtttcattatgtccgacttgttactgccacatcagccagtagctcaacccagccagttagtcagaatcccagtacaaacactcagcctcttcagcaagcaaagccagtggttgttaatacaaccccagtgcggatgtcagttccaattgtctcagctcaggctgtcaaacaagttgttccaaaaccaatcaatccaacttcacaaatagtaactactagccagccacagcaacggcttatcatgcctgccacaccactgccacagatccagcccaacctcactaacctgccaccaggcactgtcctggcaccagctccgggaacagggaatgtgggttatgcagtgcttccagctcagtatgttactcagctacagcagtcttcatatgtatcaatagcaagcaactctacctttactggaacatctggtatccagacccaggcacggcttccattcaatggcataatcccatcagagtcggccagtcggccccgaaagccctgtaattgtacaaaatcactgtgtttgaaattgtattgtgattgctttgcaaatggtgaattttgcaacaactgcaattgtactaattgttacaacaatttggaacatgaaaatgaaaggcaaaaagcaataaaggcatgccttgacagaaatccagaagcctttaagcctaagatagggaaaggaaaggagggagaatctgatcgacgtcatagcaaagggtgtaattgcaaacgatcaggatgtcttaaaaactactgtgaatgctatgaggcaaaaataatgtgttcctcaatatgcaaatgtattggctgtaagaattttgaagaaagcccggaaaggaagacattgatgcatttggcagatgcagctgaagtaagggtacagcaacaaacagcagccaagacgaagttatcctctcaaatttcagacttgcttactaggccaacaccagctttaaatagtggaggcggaaaattgccatttacatttgtaactaaggaagtagctgaagccacatgtaattgcctccttgcccaggcagagcaggcagacaagaagggaaaatcaaaggcagcagcggaacggatgatacttgaggaattcggacgatgtttgatgagtgtcatcaactctgcaggaaaggcaaaaagtgacccttgtgccatgaattgctaactcttgcacaaaagactgataaatggaactgtacagaaaatttaaggtgcagggacacttgattttctggaagaaaaacaattactgtattttaattcagtccttgttttaaaagacctgaaattataatactgaaggagaagaaattttaaatgaggaaattagtacattttaaatcttagttaaatctgcttatgccccttctaaattgaatttttctttattatatagattttttaatttgcttgggtttcttaagaattagatgttctctttctgatacctttgacaaaaaatgtttataaattcatataatttataatgt

SEQ ID NO: 16351 - DNA, 2257 bp, Homo sapiens
  source 1..2257: mol_type = unassigned DNA
accctggtctgtgtctcggaggcgccgccgccgccgctgctgctgggagcccagggagcgccgcgcgaccaggaggcggcggcgccgccggctttgtgcctgatcaactttctagcgggagaacgatcatggaggtggtgccagctgagattgctaagaagcctcgaacgccaacctctggtccagtaatcacgaagctgatctttgcaaaaccaattaatagtaaagcagttacaggacagacaactcaagtttcaccaccagttattgcaggtagggttctttcacagtctactcccggaactccatcaaagaccataacaatatctgaaagtggtgttattggatcaactttaaattctacaacacagacaccaaataaaatagccatctcacctttgaaatcgccaaataaggcagtgaaatcaactgtgcagaccatcactgttggaggagtgagcacatcacagtttaagacaattattcctctggcaactgctcccaatgtccagcagattcaagtgcctggaagcaagtttcattatgtccgacttgttactgccacatcagccagtagctcaacccagccagttagtcagaatcccagtacaaacactcagcctcttcagcaagcaaagccagtggttgttaatacaaccccagtgcggatgtcagttccaattgtctcagctcaggctgtcaaacaagttgttccaaaaccaatcaatccaacttcacaaatagtaactactagccagccacagcaacggcttatcatgcctgccacaccactgccacagatccagcccaacctcactaacctgccaccaggcactgtcctggcaccagctccgggaacagggaatgtgggttatgcagtgcttccagctcagtatgttactcagctacagcagtcttcatatgtatcaatagcaagcaactctacctttactggaacatctggtatccagacccaggcacggcttccattcaatggcataatcccatcagagtcggccagtcggccccgaaagccctgtaattgtacaaaatcactgtgtttgaaattgtattgtgattgctttgcaaatggtgaattttgcaacaactgcaattgtactaattgttacaacaatttggaacatgaaaatgaaaggcaaaaagcaataaaggcatgccttgacagaaatccagaagcctttaagcctaagatagggaaaggaaaggagggagaatctgatcgacgtcatagcaaagggtgtaattgcaaacgatcaggatgtcttaaaaactactgtgaatgctatgaggcaaaaataatgtgttcctcaatatgcaaatgtattggctgtaagaattttgaagaaagcccggaaaggaagacattgatgcatttggcagatgcagctgaagtaagggtacagcaacaaacagcagccaagacgaagttatcctctcaaatttcagacttgcttactaggccaacaccagctttaaatagtggaggcggaaaattgccatttacatttgtaactaaggaagtagctgaagccacatgtaattgcctccttgcccaggcagagcaggcagacaagaagggaaaatcaaaggcagcagcggaacggatgatacttgaggaattcggacgatgtttgatgagtgtcatcaactctgcaggaaaggcaaaaagtgacccttgtgccatgaattgctaactcttgcacaaaagactgataaatggaactgtacagaaaatttaaggtgcagggacacttgattttctggaagaaaaacaattactgtattttaattcagtccttgttttaaaagacctgaaattataatactgaaggagaagaaattttaaatgaggaaattagtacattttaaatcttagttaaatctgcttatgccccttctaaattgaatttttctttattatatagattttttaatttgcttgggtttcttaagaattagatgttctctttctgatacctttgacaaaaaatgtttataaattcatataatttataatgtatggtgttgtatgactttgttaatagaaaagccaaagcagcagtggttagcacccattctttgggacttgatctagaatatctgcagacagaatgttacataaacaaattcttatgaaacacattcaaatgacattttgtatttagaaaaggactatcttttaaagaaaaagcagccttttagggccgattctggaataatatcctgttgtcacttt

SEQ ID NO: 16352 - DNA, 755 bp, Homo sapiens
  source 1..755: mol_type = unassigned DNA
gccggcgccagggcaggcgggcggctggcagctgtggcgccgacatggctgcgctggtggagccgctggggctggagcgggacgtgtcccgggcggttgagctcctcgagcggctccagcgcagcggggagctgccgccgcagaagctgcaggccctccagcgagttctgcagagccgcttctgctccgctatccgagaggtgtatgagcagctttatgacacgctggacatcaccggcagcgccgagatccgagcccatgccacagccaaggccacagtggctgccttcacagccagcgagggccacgcacatcccagggtagtggagctacccaagacggatgagggcctaggcttcaacatcatgggtggcaaagagcaaaactcgcccatctacatctcccgggtcatcccagggggtgtggctgaccgccatggaggcctcaagcgtggggatcaactgttgtcggtgaacggtgtgagcgttgagggtgagcagcatgagaaggcggtggagctgctgaaggcggcccagggctcggtgaagctggttgtccgttacacaccgcgagtgctggaggagatggaggcccggttcgagaagatgcgctctgcccgccggcgccaacagcatcagagctactcgtccttggagtctcgaggttgaaaccacagatctggacgttcacgtgcactctcttcctgtacagtatttattgttcctggcactttatttaaagatatttgaccctca

SEQ ID NO: 16353 - DNA, 4688 bp, Homo sapiens
  source 1..4688: mol_type = unassigned DNA
gtctgtaggttaagggagaagatggcggcgctaggggaacccgtgcggctggagagagatatttgtagagcaattgaattattggaaaaactacaaaggagtggagaagtaccaccacagaaacttcaggctttgcaaagagtccttcaaagtgaattctgcaatgctgtgagagaggtatatgaacatgtctatgagactgtggacatcagtagcagtcctgaagtgagagcgaacgctactgcaaaggctactgttgctgcatttgctgccagtgaaggacattctcatcctcgagttgttgagctaccaaaaacagaagagggccttggattcaatattatgggaggcaaagaacaaaactctccaatctatatatcccgaataattccaggtggaattgctgatagacatgggggcctcaaacgtggagatcaactcctctctgttaatggagtgagtgttgaaggagaacatcatgaaaaagctgtagaactgctgaaagccgcacaaggaaaggttaaattagtggtacgatacacacccaaagtcttagaagaaatggagtcgcgctttgaaaaaatgagatcagcaaaacgcaggcaacagacctaatacatttcaaaacttgatatttcattttgcgttttagctagagaagttttccttgtgacttactaatggctgcaatgccaatgattgtaagaaaacaaacaaatttatcatgaaattctccttgtcattttataaatgcctattttaacatcatttatggttccagagatgcatacacttttttctgacaagaaaaagtaaaaggtgatgagggcaattctgtcctactgtttttacaggcctttttcaaatgcagattttgtcataaagttgttatagattttttaaaatgcttttttaatattaaaatgtacttttacattcttaatctttttttagaaaggaaaagttttcttcatttagctgctgatttaaaagtaaagttctccaattctttttttttgcttactctattttttttaacctgtgaaatttctttacagttttccaagaaattaagcataacagtctcatctacggcagttcattacactgtcaatgttaacatcattgctgcattttgtactttgaacacacacataatatatataaccagtggtaaatcatgactcagtacagtgcaagttttttcacttttacttaaacataatatataatggatattcatttatactgatttatgaaagtaagtttttaaacactgaaacaatcattgctaaaatacatattcttaatatttgagcattgaggcaagaggatgtaattgatagcattacttattacatccctatttatgttcaaccgtacatcaaattataaatgcaaaacaggttcagatttcatcttttgtgatttcttttaaatactattcatttttatttaaatgcacagtatttcccctatattttagtccttccattcctagagacaaaccagttatttggtggtgggaagtagctgaagcaaagaaggaaaagtaatacctttaacctcactagcttcaagagtagacattcttactagctcaatttaaataattgattttaaataggaagaaaagaggatatatttaagatacatagaaattatgatgtgaagtattcatgagaatctgtagattccatcaaaataagtaggaactcatactaaaattgttggatttaaagaggcaacttttgtttatgattcaaatatgggaatttgagaaatatttcatttgtccactggatgtcactattttactaaaaggcagctattagtgtgggactgtgactgaggtcttaaagactgaaagagttggggttcattttctgttacaacttacaggaacatttgtactttaagaaaaatttaagtgacaaatgttagaagatgatggattgaaaaatataagtaatttggcatattgaccctatataaaaaagtgggcattttgtaacattccttcaggaagaatagaattgtatgcttttttctgcatgtttgtgatcactgtgagtctcagatgattattccagttttcaatgatttttcaaaataaaagtcaatcagcattgttatttatcattaaggtattgaacactggattgcatggttgaatgtgtctttaatccactacaaaatgtgcttgttattgataggatcatgttgttaaattgtaaattttcaaaattaattgatgttttaaaaatgttgagaccaaagtagtatagaagtatggacttaatttaattgtaaaattattagaggtatttgttgtagagctttatatattaaagagaggtattggtgcatataaaaacagtaatattattgttatgcttgtattcttgcatttcagggtaagtaaaccctgaagaaatcttattttagtatagctacagctgcagtagcttttaagtatgtatcaacatttcattataaattatagcttcctggttctgtgtctcagctgtttcagaactttcagccaagttaaatcttttttggtgttgaaacttttagtaagttgagtaagctatttttttccctacggtaatccacaatctgttctttgtgtgggttgacacctatttataattcttaaaataagggtagctcaaaggagccaagtacagtagtttagcttgctactgttgagcatgaatagcagtaggttgttttcattaatgcagttttcataatgtatcccagaattttaaatcttgaccatagaaaaatacagtcattcattggcaaagatgtacagtggtggtttagtgcagtgaggaaatgatgggaatttttatcttagaaatggatgattcgtgaataaaactaggtacatagtaagtgtatgatagatgtttgatttgtaaattacaaatataaattatcacccccatttccatttattttcttgatatatcaaaatgtgttgacttagtgattctcaatcttagctacatattagcctggcagagctttaaaaaattgatacctgggtcctattccataacaactaaatcaaaatcacccttttttttttttttgtaaagctttccaggtggttctaaaggacacctagggtcaataacccattataaaatgatctgattacactggacactcttaggaagtatcaaaatagaacagttcaatttgcagctacttaatgattaattacatttcttaggttttttttttgttttttttttggtttgtttgttttttgttttaaaagagacaggatcttgctttgtctcccaggctggaacacagtggtgtgatcatagctcactgcagcctgaaactccttggcttccacctcagcctcccaaagcattaggattataggcgtgagccactgcacctggccaagtaatttcttttaggaataaaaggtacttggcattccttatttgggaagtaattacagtcttatctttttttttcttttttcttttttttaataaaatctaccagtaatttaaatgtgagctttttatgtctgtcatcattctgccccctttgcctttaaaacttacaaaaatacgtgtttgttatttgagaaagcatgtttaaaaattgcagatgagaaatattgtcgttaataattatgtactgtcttaatgtgggcacttcatttgttagtataatactagataatagcagcctagttctttaggatttgacgattcaaattttttttttgttttttgtttttgtttttttttgagacagagtcttgctctgttgcccaggctggcgtgcagtggtgtgatctcggctcacttcagcctccgccacctcaaggcagttcaagcaattctcctgcctcagcctcccgagtagctaggactacaggcgtgtgccacctctcccggctaatttttttgtatttttagtagagacggggtttcaccgtgttagccaggatgatctcgatctcctgacctcgtgattcgcccgcctcggcctcccaaagtgctggaattactggcgtgagccaccatgcccagcctcaaatatgtttttaaaaaatatcattgtcctcctcctcttaagatttttttaagttattttgctcaagtacttaagtagtctggctcaagtactttgtttacaattaaaatggatattatagcatttaatagaagaaatggttatggcttatccaaaaagaatgtcagcatgacctggtgtagacttaaaaaactacatgtttgtgaatattttataatgtggaatgatcattgaaatatcaaggattctagtaattgtatttcctgaataaatgtatgtttatgaattttctaacttacattttgttgtgtcctctgccaacaatctggttttataattgttgtctaaagtttgctagtagtgtttcttcaaaggttattccaggtatggttaagtagtgagaaaaatcacttattaattttcaagaactttgagactaatttgtattgactcggttttttaaaataactggcaaatgctatgcttctacttttaaaatttgtggtaatacccagaatggatgtaaaataacatttttcaatagattacttcatttatcaatttaattctgattttaaggcttatttaaaataaatttgtatgagtta

SEQ ID NO: 16354 - DNA, 759 bp, Homo sapiens
  source 1..759: mol_type = unassigned DNA
atggaggaggccatcctggtcccctgcgtgctggggctcctgctgctgcccatcctggccatgttgatggcactgtgtgtgcactgccacagactgccaggctcctacgacagcacatcctcagatagtttgtatccaaggggcatccagttcaaacggcctcacacggttgccccctggccacctgcctacccacctgtcacctcctacccacccctgagccagccagacctgctccccatcccaagatccccgcagccccggcgggattctgatggtgccaacagtgtggcgagctacgagaacgagggtgcgtctgggatccgaggtgcccaggctgggtggggagtctggggtccgtcctggactaggctgacccctgtgtcgttacccccagaaccagcctgtgaggatgcggatgaggatgaggacgactatcacaacccaggctacctggtggtgcttcctgacagcaccccggccactagcactgctgccccatcagctcctgcactcagcacccctggcatccgagacagtgccttctccatggagtccattgatgattacgtgaacgttccggagagcggggagagcgcagaagcgtctctggatggcagccgggagtatgtgaatgtgtcccaggaactgcatcctggagcggctaagactgagcctgccgccctgagttcccaggaggcagaggaagtggaggaagagggggctccagattacgagaatctgcaggagctgaactga

SEQ ID NO: 16355 - DNA, 1715 bp, Homo sapiens
  source 1..1715: mol_type = unassigned DNA
ggcgggcgccgaggaggggcaggtagggctgggacgcaggggtaactggatcccccgacttcagcccaggccctggtctgaccaccctgggagcagggactttccacagtcagctggacgcacactcagcccagtaaaagaggggacccatcccgggagccccggggagggcacagctgcctcctcccgggctcccctgccacctggtgcctacctgccccctgctccctgccgggtccggtcctcaccccatcttcatctggccttgactctgcccttgaggggcctaggggtgcagccagcctgctccgagctcccctgcagatggaggaggccatcctggtcccctgcgtgctggggctcctgctgctgcccatcctggccatgttgatggcactgtgtgtgcactgccacagactgccaggctcctacgacagcacatcctcagatagtttgtatccaaggggcatccagttcaaacggcctcacacggttgccccctggccacctgcctacccacctgtcacctcctacccacccctgagccagccagacctgctccccatcccaagatccccgcagccccttgggggctcccaccggacgccatcttcccggcgggattctgatggtgccaacagtgtggcgagctacgagaacgagggtgcgtctgggatccgaggtgcccaggctgggtggggagtctggggtccgtcctggactaggctgacccctgtgtcgttacccccagaaccagcctgtgaggatgcggatgaggatgaggacgactatcacaacccaggctacctggtggtgcttcctgacagcaccccggccactagcactgctgccccatcagctcctgcactcagcacccctggcatccgagacagtgccttctccatggagtccattgatgattacgtgaacgttccggagagcggggagagcgcagaagcgtctctggatggcagccgggagtatgtgaatgtgtcccaggaactgcatcctggagcggctaagactgagcctgccgccctgagttcccaggaggcagaggaagtggaggaagagggggctccagattacgagaatctgcaggagctgaactgagggcctgtggaggccgagtctgtcctggaaccaggcttgcctgggacggctgagctgggcagctggaagtggctctggggtcctcacatggcgtcctgcccttgctccagcctgacaacagcctgagaaatccccccgtaacttattatcactttggggttcggcctgtgtcccccgaacgctctgcaccttctgacgcagcctgagaatgacctgccctggccccagccctactctgtgtaatagaataaaggcctgcgtgtgtctgtgttgagcgtgcgtctgtgtgtgcctgtgtgcgagtctgagtcagagatttggagatgtctctgtgtgtttgtgtgtatctgtgggtctccatcctccatgggggctcagccaggtgctgtgacaccccccttctgaatgaagccttctgacctgggctggcactgctgggggtgaggacacattgccccatgagacagtcccagaacacggcagctgctggctgtgacaatggtttcaccatccttagaccaagggatgggacctgatgacctgggaggactctcttagttcttaccttttgtggttctcaataaaacagaacttaaaaaatt

SEQ ID NO: 16356 - DNA, 1648 bp, Homo sapiens
  source 1..1648: mol_type = unassigned DNA
caggcgggcgggagggcgggcacggagaggcgggcgccgaggaggggcaggtagggctgggacgcaggggtaactggatcccccgacttcagcccaggccctggtctgaccaccctgggagcagggactttccacagtcagctggacgcacactcagcccagtaaaagaggggacccatcccgggagccccggggagggcacagctgcctcctcccgggctcccctgccacctggtgcctacctgccccctgctccctgccgggtccggtcctcaccccatcttcatctggccttgactctgcccttgaggggcctaggggtgcagccagcctgctccgagctcccctgcagatggaggaggccatcctggtcccctgcgtgctggggctcctgctgctgcccatcctggccatgttgatggcactgtgtgtgcactgccacagactgccaggctcctacgacagcacatcctcagatagtttgtatccaaggggcatccagttcaaacggcctcacacggttgccccctggccacctgcctacccacctgtcacctcctacccacccctgagccagccagacctgctccccatcccaagatccccgcagccccttgggggctcccaccggacgccatcttcccggcgggattctgatggtgccaacagtgtggcgagctacgagaacgaggaaccagcctgtgaggatgcggatgaggatgaggacgactatcacaacccaggctacctggtggtgcttcctgacagcaccccggccactagcactgctgccccatcagctcctgcactcagcacccctggcatccgagacagtgccttctccatggagtccattgatgattacgtgaacgttccggagagcggggagagcgcagaagcgtctctggatggcagccgggagtatgtgaatgtgtcccaggaactgcatcctggagcggctaagactgagcctgccgccctgagttcccaggaggcagaggaagtggaggaagagggggctccagattacgagaatctgcaggagctgaactgagggcctgtggaggccgagtctgtcctggaaccaggcttgcctgggacggctgagctgggcagctggaagtggctctggggtcctcacatggcgtcctgcccttgctccagcctgacaacagcctgagaaatccccccgtaacttattatcactttggggttcggcctgtgtcccccgaacgctctgcaccttctgacgcagcctgagaatgacctgccctggccccagccctactctgtgtaatagaataaaggcctgcgtgtgtctgtgttgagcgtgcgtctgtgtgtgcctgtgtgcgagtctgagtcagagatttggagatgtctctgtgtgtttgtgtgtatctgtgggtctccatcctccatgggggctcagccaggtgctgtgacaccccccttctgaatgaagccttctgacctgggctggcactgctgggggtgaggacacattgccccatgagacagtcccagaacacggcagctgctggctgtgacaatggtttcaccatccttagaccaagggatgggacctgatgacctgggaggactctcttagttcttaccttttgtggttctcaataaaacagaactt

SEQ ID NO: 16357 - DNA, 1448 bp, Homo sapiens
  source 1..1448: mol_type = unassigned DNA
gggcctccctgctcgctgcctccccgggtcctggatatggaggccacggctgccagctggcaggtggctgtccccgtcttggggggggccagcagacccttggggcctaggggtgcagccagcctgctccgagctcccctgcagatggaggaggccatcctggtcccctgcgtgctggggctcctgctgctgcccatcctggccatgttgatggcactgtgtgtgcactgccacagactgccaggctcctacgacagcacatcctcagatagtttgtatccaaggggcatccagttcaaacggcctcacacggttgccccctggccacctgcctacccacctgtcacctcctacccacccctgagccagccagacctgctccccatcccaagatccccgcagccccttgggggctcccaccggacgccatcttcccggcgggattctgatggtgccaacagtgtggcgagctacgagaacgaggaaccagcctgtgaggatgcggatgaggatgaggacgactatcacaacccaggctacctggtggtgcttcctgacagcaccccggccactagcactgctgccccatcagctcctgcactcagcacccctggcatccgagacagtgccttctccatggagtccattgatgattacgtgaacgttccggagagcggggagagcgcagaagcgtctctggatggcagccgggagtatgtgaatgtgtcccaggaactgcatcctggagcggctaagactgagcctgccgccctgagttcccaggaggcagaggaagtggaggaagagggggctccagattacgagaatctgcaggagctgaactgagggcctgtggaggccgagtctgtcctggaaccaggcttgcctgggacggctgagctgggcagctggaagtggctctggggtcctcacatggcgtcctgcccttgctccagcctgacaacagcctgagaaatccccccgtaacttattatcactttggggttcggcctgtgtcccccgaacgctctgcaccttctgacgcagcctgagaatgacctgccctggccccagccctactctgtgtaatagaataaaggcctgcgtgtgtctgtgttgagcgtgcgtctgtgtgtgcctgtgtgcgagtctgagtcagagatttggagatgtctctgtgtgtttgtgtgtatctgtgggtctccatcctccatgggggctcagccaggtgctgtgacaccccccttctgaatgaagccttctgacctgggctggcactgctgggggtgaggacacattgccccatgagacagtcccagaacacggcagctgctggctgtgacaatggtttcaccatccttagaccaagggatgggacctgatgacctgggaggactctcttagttcttaccttttgtggttctcaataaaacagaacttaaaaaatt

SEQ ID NO: 16358 - DNA, 1645 bp, Homo sapiens
  source 1..1645: mol_type = unassigned DNA
caggcgggcgggagggcgggcacggagaggcgggcgccgaggaggggcaggtagggctgggacgcaggggtaactggatcccccgacttcagcccaggccctggtctgaccaccctgggagcagggactttccacagtcagctggacgcacactcagcccagtaaaagaggggacccatcccgggagccccggggagggcacagctgcctcctcccgggctcccctgccacctggtgcctacctgccccctgctccctgccgggtccggtcctcaccccatcttcatctggccttgactctgcccttgaggggcctaggggtgcagccagcctgctccgagctcccctgcagatggaggaggccatcctggtcccctgcgtgctggggctcctgctgctgcccatcctggccatgttgatggcactgtgtgtgcactgccacagactgccaggctcctacgacagcacatcctcagatagtttgtatccaaggggcatccagttcaaacggcctcacacggttgccccctggccacctgcctacccacctgtcacctcctacccacccctgagccagccagacctgctccccatcccatccccgcagccccttgggggctcccaccggacgccatcttcccggcgggattctgatggtgccaacagtgtggcgagctacgagaacgaggaaccagcctgtgaggatgcggatgaggatgaggacgactatcacaacccaggctacctggtggtgcttcctgacagcaccccggccactagcactgctgccccatcagctcctgcactcagcacccctggcatccgagacagtgccttctccatggagtccattgatgattacgtgaacgttccggagagcggggagagcgcagaagcgtctctggatggcagccgggagtatgtgaatgtgtcccaggaactgcatcctggagcggctaagactgagcctgccgccctgagttcccaggaggcagaggaagtggaggaagagggggctccagattacgagaatctgcaggagctgaactgagggcctgtggaggccgagtctgtcctggaaccaggcttgcctgggacggctgagctgggcagctggaagtggctctggggtcctcacatggcgtcctgcccttgctccagcctgacaacagcctgagaaatccccccgtaacttattatcactttggggttcggcctgtgtcccccgaacgctctgcaccttctgacgcagcctgagaatgacctgccctggccccagccctactctgtgtaatagaataaaggcctgcgtgtgtctgtgttgagcgtgcgtctgtgtgtgcctgtgtgcgagtctgagtcagagatttggagatgtctctgtgtgtttgtgtgtatctgtgggtctccatcctccatgggggctcagccaggtgctgtgacaccccccttctgaatgaagccttctgacctgggctggcactgctgggggtgaggacacattgccccatgagacagtcccagaacacggcagctgctggctgtgacaatggtttcaccatccttagaccaagggatgggacctgatgacctgggaggactctcttagttcttaccttttgtggttctcaataaaacagaactt

SEQ ID NO: 16359 - DNA, 1869 bp, Homo sapiens
  source 1..1869: mol_type = unassigned DNA
agtgtcagtggtgttggcatcagcttgggcaggtgtgcgggctcaggatggggcggccgtggtgaggaaccctggactctcagagatggaatttcaccgtgttgcctaggctggtctggagctcttgatctcaagcgatcctccctgcctcggcctcccaacgtgctgggattataggcgtgagccaccgctcctggccaggcatcacaagaggcaacaccaggagccaacatgagctcggggactgaactgctgtggcccggagcagcgctgctggtgctgttgggggtggcagccagtctgtgtgtgcgctgctcacgcccaggtgcaaagaggtcagagaaaatctaccagcagagaagtctgcgtgaggaccaacagagctttacggggtcccggacctactccttggtcgggcaggcatggccaggacccctggcggacatggcacccacaaggaaggacaagctgttgcaattctaccccagcctggaggatccagcatcttccaggtaccagaacttcagcaaaggaagcagacacgggtcggaggaagcctacatagaccccattgccatggagtattacaactgggggcggttctcgaagcccccagaagatgatgatgccaattcctacgagaatgtgctcatttgcaagcagaaaaccacagagacaggtgcccagcaggagggcataggtggcctctgcagaggggacctcagcctgtcactggccctgaagactggccccacttctggtctctgtccctctgcctccccggaagaagatgaggaatctgaggattatcagaactcagcatccatccatcagtggcgcgagtccaggaaggtcatggggcaactccagagagaagcatcccctggcccggtgggaagcccagacgaggaggacggggaaccggattacgtgaatggggaggtggcagccacagaagcctagggcagaccaagaagaaaggagccaaggcaaagagggaccactgtgctcatggacccatcgctgccttccaaggaccatttcccagagctactcaacttttaagcccctgccatggttgctcctggaaggagaaccagccaccctgaggaccacctggccatgcgtgcacagcctgggaaaagacagttactcacgggagctgcaggcccgtcaccaagccctctcccgacccaggctttgtggggcaggcacctggtaccaagggtaacccggctcctggtatggacggatgcgcaggatttaggataagctgtcacccagtccccataacaaaaccactgtccaacactggtatctgtgttcttttgtgctatgaatttggattcctaattgctattgttggttgctggggttttaaatgattgataagcttgtacagttaacttatagagggggagccatatttaacattctggatttcagagtagagatttctgtgttgtctcctagaaagcattacatgtagtttatttcagcatccttgttgggtggggccctggctctcttcccctttggtgggacctcccctttctttgggcttcagttcactcaggaagaaatgaggctgtcgccatctttatgtgcttccagtggaaatgtcacttgctacagacaatagtgcatgagagtctagagaagtagtgaccagaacagggcagagtaggtcccctccatggccctgaatcctcctctgctccagggctggcctctgcagagctgattaaacagtgttgtgactgtctcatgggaagagctggggcccagagggaccttgagtcagaaatgttgccagaaaaagtatctcctccaaccaaaacatctcaataaaaccattttagttgaaaa

SEQ ID NO: 16360 - DNA, 2360 bp, Homo sapiens
  source 1..2360: mol_type = unassigned DNA
attatcttgctccctgtctattggagtgtatctctcttcctctctgtgtgactttttgtgtttatgtgtgtgtttagtgtgtgtccatattttcctgttctcttgtgtctctctgctgtgtctctctctttttctttctgttttttgagacggagtctccctctgtcacccaggctggagtgcagtggtgcgatctcggctcactgcaacctctgcttctgaggttcaaacgattctcctgcctcagcctcccgagtagctggaattacagacacatgccaccatgcccagctaattttgtatttttaatagagacggggtttcaccatgttggccaggctggtcttaaactcttgaccttacgtgatccacccgcctcggcctcccaaagtttttggattacaggtgtgagccacctcgcccggtcctatctctctttcttctctttctccctctcactttgtttctcttctctctctctctcccgcctccttcccccgtctcccctcccttccccccaccgccctcttcatagctgagcctgtccggcagtgcggcggatgtacggatgattcagtggctggcaggaagcccgccctgcccgcccgccagtgtcagtggtgttggcatcagcttgggcaggtgtgcgggctcaggatggggcggccgtggtgaggaaccctggactctcagcatcacaagaggcaacaccaggagccaacatgagctcggggactgaactgctgtggcccggagcagcgctgctggtgctgttgggggtggcagccagtctgtgtgtgcgctgctcacgcccaggtgcaaagaggtcagagaaaatctaccagcagagaagtctgcgtgaggaccaacagagctttacggggtcccggacctactccttggtcgggcaggcatggccaggacccctggcggacatggcacccacaaggaaggacaagctgttgcaattctaccccagcctggaggatccagcatcttccaggtaccagaacttcagcaaaggaagcagacacgggtcggaggaagcctacatagaccccattgccatggagtattacaactgggggcggttctcgaagcccccagaagatgatgatgccaattcctacgagaatgtgctcatttgcaagcagaaaaccacagagacaggtgcccagcaggagggcataggtggcctctgcagaggggacctcagcctgtcactggccctgaagactggccccacttctggtctctgtccctctgcctccccggaagaagatgaggaatctgaggattatcagaactcagcatccatccatcagtggcgcgagtccaggaaggtcatggggcaactccagagagaagcatcccctggcccggtgggaagcccagacgaggaggacggggaaccggattacgtgaatggggaggtggcagccacagaagcctagggcagaccaagaagaaaggagccaaggcaaagagggaccactgtgctcatggacccatcgctgccttccaaggaccatttcccagagctactcaacttttaagcccctgccatggttgctcctggaaggagaaccagccaccctgaggaccacctggccatgcgtgcacagcctgggaaaagacagttactcacgggagctgcaggcccgtcaccaagccctctcccgacccaggctttgtggggcaggcacctggtaccaagggtaacccggctcctggtatggacggatgcgcaggatttaggataagctgtcacccagtccccataacaaaaccactgtccaacactggtatctgtgttcttttgtgctatgaatttggattcctaattgctattgttggttgctggggttttaaatgattgataagcttgtacagttaacttatagagggggagccatatttaacattctggatttcagagtagagatttctgtgttgtctcctagaaagcattacatgtagtttatttcagcatccttgttgggtggggccctggctctcttcccctttggtgggacctcccctttctttgggcttcagttcactcaggaagaaatgaggctgtcgccatctttatgtgcttccagtggaaatgtcacttgctacagacaatagtgcatgagagtctagagaagtagtgaccagaacagggcagagtaggtcccctccatggccctgaatcctcctctgctccagggctggcctctgcagagctgattaaacagtgttgtgactgtctcatgggaagagctggggcccagagggaccttgagtcagaaatgttgccagaaaaagtatctcctccaaccaaaacatctcaataaaaccattttagttgaaaa

SEQ ID NO: 16361 - DNA, 581 bp, Homo sapiens
  source 1..581: mol_type = unassigned DNA
agtgtcagtggtgttggcatcagcttgggcaggtgtgcgggctcaggatggggcggccgtggtgaggaaccctggactctcagagatggaatttcaccgtgttgcctaggctggtctggagctcttgatctcaagcgatcctccctgcctcggcctcccaacgtgctgggattataggcgtgagccaccgctcctggccagggtctgttcctagttgcaacagttcttggaaacccactcgagagggccacgcctccattcaccaggccacggtgggtggtgtgcgtatgttttgctgaggcctggtcatcacgctgtggctccaaggctgggaccagccacagaccgagaagccggtcagcatcacaagaggcaacaccaggagccaacatgagctcggggactgaactgctgtggcccggagcagcgctgctggtgctgttgggggtggcagccagtctgtgtgtgcgctgctcacgcccaggtgcaaagaggtcagagaaaatctaccagcagagaagtctgcgtgaggaccaacagagctttacggggtcccggacctactccttggtcgggcaggc

SEQ ID NO: 16362 - DNA, 2453 bp, Homo sapiens
  source 1..2453: mol_type = unassigned DNA
aggaagcccgccctgcccgcccgccagtgtcagtggtgttggcatcagcttgggcaggtgtgcgggctcaggatggggcggccgtggtgaggaaccctggactctcagcatcacaagaggcaacaccaggagccaacatgagctcggggactgaactgctgtggcccggagcagcgctgctggtgctgttgggggtggcagccagtctgtgtgtgcgctgctcacgcccaggtgcaaagaggtcagagaaaatctaccagcagagaagtctgcgtgaggaccaacagagctttacggggtcccggacctactccttggtcgggcaggcatggccaggacccctggcggacatggcacccacaaggaaggacaagctgttgcaattctaccccagcctggaggatccagcatcttccaggtaccagaacttcagcaaaggaagcagacacgggtcggaggaagcctacatagaccccattgccatggagtattacaactgggggcggttctcgaagcccccagaagatgatgatgccaattcctacgagaatgtgctcatttgcaagcagaaaaccacagagacaggtgcccagcaggagggcataggtggcctctgcagaggggacctcagcctgtcactggccctgaagactggccccacttctggtctctgtccctctgcctccccggaagaagatgaggaatctgaggattatcagaactcagcatccatccatcagtggcgcgagtccaggaaggtcatggggcaactccagagagaagcatcccctggcccggtgggaagcccagacgaggaggacggggaaccggattacgtgaatggggaggtggcagccacagaagcctagggcagaccaagaagaaaggggcgtcaggcagggaattctggtgacttcaggggcaaagaagtgggcaccgggtgggtctcccaactccactgcatcctcctggctgcgaccttggaccaagtgacaacctcccagaacttagttcctcacttggtgcccacctctcagagaagacatcgcacacacggccgggcacggtggctcacgcctgtaatcccggcactttgggaggccgaggcaggcagatcacctgaggtcacgagttcgagaccagcctggccaacatggtgaaacttcatctctactaaaaacacaaaaaattagccaggcatggtggtgggtgcctgtagtcccagttagttgggaggctgaggcaggagaatcatttgaaccctgaaggcggaggttgcggtgagttaagatcacatgcactcaaccctgggtgacagagcgagactccgtctcaataaataaataaaaaaacagacattgcacacaaagcctcagcccagcaggcactcggtcaatgctggaaacagacaggaggcagggacgttgggaaatgtaacagtggctgagacgcgctgaggagccaccgcaggccagtgagatggtgcggcgctaagcgctcacacgtgcaccatctcttagcacccaaagccacagagcagttaagccacctgcccaaggccacatcttgaagtaaggggaggaggagatggaatccccagtggtcagacatcagacatcaaagcctaggctgggtctactgcttgggaagcacgatggacccccagagggccttgaaggctgcccaaagtccccatctgggagacccaggccgtcatctcagcgagcaggctggagggtggaaaccacagtgaacctgggtggtcaagagtcagccccagaggcaggtgcaggagtttgagccaaatgtgcagagccccacgtcattcattcaaccagtatccactgggcccctgctacgggcaagtcctgctctaggtgctgggaacaccaacataaagaacagcaaacccctgaccccttagaacttgcattctggtaggagagagaaaacagatagggctggacacagcggtcatgcctataaatcccagcacttcgggaggctgaggcgggaggatcctttgagcctctgagtttgaggccagcctgggcaacatagcaagacctctctctctacaaaaactttttttttttttttttgagacagagtatcactgtcactcaggctggagtgcagtggcgccatctcggctcactgcaacctccacctcctgggttcaagcgattctcgtgcctcagccttccaagtagctgggattacaggcacacgccaccatgtccagcctctataaaaacatttaaaattagccaggcatggtggtggatgccctagagtcccactgacttgggaggctgaggtgggaagatcacttgagcctgggaggtcaaggttgcaatgagccatggttgctgcagtgagctgtggtcgtgccactgcactcaagcctgggcaacagagcaagaccccatctcaaaaaaaaaatttaaaaa

SEQ ID NO: 16363 - DNA, 2527 bp, Homo sapiens
  source 1..2527: mol_type = unassigned DNA
ggagtgtatctctcttcctctctgtgtgactttttgtgtttatgtgtgtgtttagtgtgtgtccatattttcctgttctcttgtgtctctctgctgtgtctctctctttttctttctgttttttgagacggagtctccctctgtcacccaggctggagtgcagtggtgcgatctcggctcactgcaacctctgcttctgaggttcaaacgattctcctgcctcagcctcccgagtagctggaattacagacacatgccaccatgcccagctaattttgtatttttaatagagacggggtttcaccatgttggccaggctggtcttaaactcttgaccttacgtgatccacccgcctcggcctcccaaagtttttggattacaggtgtgagccacctcgcccggtcctatctctctttcttctctttctccctctcactttgtttctcttctctctctctctcccgcctccttcccccgtctcccctcccttccccccaccgccctcttcatagctgagcctgtccggcagtgcggcggatgtacggatgattcagtggctggcaggaagcccgccctgcccgcccgccagtgtcagtggtgttggcatcagcttgggcaggtgtgcgggctcaggatggggcggccgtggtgaggaaccctggactctcagagatggaatttcaccgtgttgcctaggctggtctggagctcttgatctcaagcgatcctccctgcctcggcctcccaacgtgctgggattataggcgtgagccaccgctcctggccagggtctgttcctagttgcaacagttcttggaaacccactcgagagggccacgcctccattcaccaggccacgcatcacaagaggcaacaccaggagccaacatgagctcggggactgaactgctgtggcccggagcagcgctgctggtgctgttgggggtggcagccagtctgtgtgtgcgctgctcacgcccaggtgcaaagaggtcagagaaaatctaccagcagagaagtctgcgtgaggaccaacagagctttacggggtcccggacctactccttggtcgggcaggcatggccaggacccctggcggacatggcacccacaaggaaggacaagctgttgcaattctaccccagcctggaggatccagcatcttccaggtaccagaacttcagcaaaggaagcagacacgggtcggaggaagcctacatagaccccattgccatggagtattacaactgggggcggttctcgaagcccccagaagatgatgatgccaattcctacgagaatgtgctcatttgcaagcagaaaaccacagagacaggtgcccagcaggagggcataggtggcctctgcagaggggacctcagcctgtcactggccctgaagactggccccacttctggtctctgtccctctgcctccccggaagaagatgaggaatctgaggattatcagaactcagcatccatccatcagtggcgcgagtccaggaaggtcatggggcaactccagagagaagcatcccctggcccggtgggaagcccagacgaggaggacggggaaccggattacgtgaatggggaggtggcagccacagaagcctagggcagaccaagaagaaaggagccaaggcaaagagggaccactgtgctcatggacccatcgctgccttccaaggaccatttcccagagctactcaacttttaagcccctgccatggttgctcctggaaggagaaccagccaccctgaggaccacctggccatgcgtgcacagcctgggaaaagacagttactcacgggagctgcaggcccgtcaccaagccctctcccgacccaggctttgtggggcaggcacctggtaccaagggtaacccggctcctggtatggacggatgcgcaggatttaggataagctgtcacccagtccccataacaaaaccactgtccaacactggtatctgtgttcttttgtgctatgaatttggattcctaattgctattgttggttgctggggttttaaatgattgataagcttgtacagttaacttatagagggggagccatatttaacattctggatttcagagtagagatttctgtgttgtctcctagaaagcattacatgtagtttatttcagcatccttgttgggtggggccctggctctcttcccctttggtgggacctcccctttctttgggcttcagttcactcaggaagaaatgaggctgtcgccatctttatgtgcttccagtggaaatgtcacttgctacagacaatagtgcatgagagtctagagaagtagtgaccagaacagggcagagtaggtcccctccatggccctgaatcctcctctgctccagggctggcctctgcagagctgattaaacagtgttgtgactgtctcatgggaagagctggggcccagagggaccttgagtcagaaatgttgccagaaaaagtatctcctccaaccaaaacatctcaataaaaccattttagttgaaaa

SEQ ID NO: 16364 - DNA, 585 bp, Homo sapiens
  source 1..585: mol_type = unassigned DNA
atatcctgttctttccttcaccgtgggagacgagctgagcctgtccggcagtgcggcggatgtacggatgattcagtggctggcaggaagcccgccctgcccgcccgccagtgtcagtggtgttggcatcagcttgggcaggtgtgcgggctcaggatggggcggccgtggtgaggaaccctggactctcagagatggaatttcaccgtgttgcctaggctggtctggagctcttgatctcaagcgatcctccctgcctcggcctcccaacgtgctgggattataggcgtgagccaccgctcctggccagggtctgttcctagttgcaacagttcttggaaacccactcgagagggccacgcctccattcaccaggccacgcatcacaagaggcaacaccaggagccaacatgagctcggggactgaactgctgtggcccggagcagcgctgctggtgctgttgggggtggcagccagtctgtgtgtgcgctgctcacgcccaggtgcaaagaggtcagagaaaatctaccagcagagaagtctgcgtgaggaccaacagagctttacggggtcccggacctact

SEQ ID NO: 16365 - DNA, 561 bp, Homo sapiens
  source 1..561: mol_type = unassigned DNA
ggatgtacggatgattcagtggctggcaggaagcccgccctgcccgcccgccagtgtcagtggtgttggcatcagcttgggcaggtgtgcgggctcaggatggggcggccgtggtgaggaaccctggactctcagagatggaatttcaccgtgttgcctaggctggtctggagctcttgatctcaagcgatcctccctgcctcggcctcccaacgtgctgggattataggccatcacaagaggcaacaccaggagccaacatgagctcggggactgaactgctgtggcccggagcagcgctgctggtgctgttgggggtggcagccagtctgtgtgtgcgctgctcacgcccaggtgcaaagaggtcagagaaaatctaccagcagagaagtctgcgtgaggaccaacagagctttacggggtcccggacctactccttggtcgggcaggcatggccaggacccctggcggacatggcacccacaaggaaggacaagctgttgcaattctaccccagcctggaggatccagcatcttccaggtaccagaacttcagcaaag

SEQ ID NO: 16366 - DNA, 2600 bp, Homo sapiens
  source 1..2600: mol_type = unassigned DNA
acatgcgccctgacagcccaacaatggcggcgcccgcggagtcgctgaggaggcggaagactgggtactcggatccggagcctgagtcgccgcccgcgccggggcgtggccccgcaggctctccggcccatctccacacgggcaccttctggctgacccggatcgtgctcctgaaggccctagccttcgtgtacttcgtggcattcctggtggctttccatcagaacaagcagctcatcggtgacagggggctgcttccctgcagagtgttcctgaagaacttccagcagtacttccaggacaggacgagctgggaagtcttcagctacatgcccaccatcctctggctgatggactggtcagacatgaactccaacctggacttgctggctcttctcggactgggcatctcgtctttcgtactgatcacgggctgcgccaacatgcttctcatggctgccctgtggggcctctacatgtccctggttaatgtgggccatgtctggtactctttcggatgggagtcccagcttctggagacggggttcctggggatcttcctgtgccctctgtggacgctgtcaaggctgccccagcatacccccacatcccggattgtcctgtggggcttccggtggctgatcttcaggatcatgcttggagcaggcctgatcaagatccggggggaccggtgctggcgagacctcacctgcatggacttccactatgagacccagccgatgcccaatcctgtggcgtactacctgcaccactcaccctggtggttccatcgcttcgagacgctcagcaaccacttcatcgagctcctggtgcccttcttcctcttcctcggccggcgggcgtgcatcatccacggggtgctgcagatcctgttccaggccgtcctcatcgtcagcgggaacctcagcttcctgaactggctgactatggtgcccagcctggcctgctttgatgacgccaccctgggattcttgttcccctctgggccaggcagcctgaaggaccgagttctgcagatgcagagggacatccgaggggcccggcccgagcccagattcggctccgtggtgcggcgtgcagccaacgtctcgctgggcgtcctgctggcctggctcagcgtgcccgtggtcctcaacttgctgagctccaggcaggtcatgaacacccacttcaactctcttcacatcgtcaacacttacggggccttcggaagcatcaccaaggagcgggcggaggtgatcctgcagggcacagccagctccaacgccagcgcccccgatgccatgtgggaggactacgagttcaagtgcaagccaggtgaccccagcagacggccctgcctcatctccccgtaccactaccgcctggactggctgatgtggttcgcggccttccagacctacgagcacaacgactggatcatccacctggctggcaagctcctggccagcgacgccgaggccttgtccctgctggcacacaaccccttcgcgggcaggcccccgcccaggtgggtccgaggagagcactacaggtacaagttcagccgtcctgggggcaggcacgccgccgagggcaagtggtgggtgcggaagaggatcggagcctacttccctccgctcagcctggaggagctgaggccctacttcagggaccgtgggtggcctctgcccgggcccctctagacgtgcaccagaaataaaggcgaagacccagcccctcggcggctcagcaacgtttgcccttccctgcgcccagcccaagctgggcatcgccaagagagacgtggagaggagagcggtgggacccagcccccagcacgggggtccagggtggggtctgttgtcacatactgtggcggctcccaggccctgcccacctggggccccacatccaggccaacccttgtcccaggcgccaggggctctgatctcccatccatcccaccctcctcccagaggcccagcctggggctgtgccgcccacaggagttgagacaatggccatcctgacaccttcctccactacagccctgaccatagacccagccaggtagctcttggggtctctagcgtcccagggcctggtttctgttccctcttcaatggtgtgttcccagccaggtcctgaccctcagagccaagtccctgtcacgtctggggcagccaaaccctcgccccacagggacctggacacgcccggccaggatgtggggttggatgggccattttctgtcctatccctcatctccacccccgccacagcctacacgcatcccacacatgcaggcacacacagcctgtgcacacatgtgttcttggcccggtttcatccccccatgactggtgtctgtgaggtgcagatggacacagcgcacacccagaccctccaccaggctgtgacctcgctgcctctgaggccttgacaaggcccctcaatcggaggacagccggccgtgcacactttcatcatcgtcggacaaacagcgtctactgcacatttttcttattcctattcttgagccatagctatggcatattcttctactattcctattataccacttaccagcttactcg

SEQ ID NO: 16367 - DNA, 2600 bp, Homo sapiens
  source 1..2600: mol_type = unassigned DNA
acatgcgccctgacagcccaacaatggcggcgcccgcggagtcgctgaggaggcggaagactgggtactcggatccggagcctgagtcgccgcccgcgccggggcgtggccccgcaggctctccggcccatctccacacgggcaccttctggctgacccggatcgtgctcctgaaggccctagccttcgtgtacttcgtggcattcctggtggctttccatcagaacaagcagctcatcggtgacagggggctgcttccctgcagagtgttcctgaagaacttccagcagtacttccaggacaggacgagctgggaagtcttcagctacatgcccaccatcctctggctgatggactggtcagacatgaactccaacctggacttgctggctcttctcggactgggcatctcgtctttcgtactgatcacgggctgcgccaacatgcttctcatggctgccctgtggggcctctacatgtccctggttaatgtgggccatgtctggtattccttcagatgggagtcccagcttctggagacggggttcctggggatcttcctgtgccctctgtggacgctgtcaaggctgccccagcatacccccacatcccggattgtcctgtggggcttccggtggctgatcttcaggatcatgcttggagcaggcctgatcaagatccggggggaccggtgctggcgagacctcacctgcatggacttccactatgagacccagccgatgcccaatcctgtggcgtactacctgcaccactcaccctggtggttccatcgcttcgagacgctcagcaaccacttcatcgagctcctggtgcccttcttcctcttcctcggccggcgggcgtgcatcatccacggggtgctgcagatcctgttccaggccgtcctcatcgtcagcgggaacctcagcttcctgaactggctgactatggtgcccagcctggcctgctttgatgacgccaccctgggattcttgttcccctctgggccaggcagcctgaaggaccgagttctgcagatgcagagggacatccgaggggcccggcccgagcccagattcggctccgtggtgcggcgtgcagccaacgtctcgctgggcgtcctgctggcctggctcagcgtgcccgtggtcctcaacttgctgagctccaggcaggtcatgaacacccacttcaactctcttcacatcgtcaacacttacggggccttcggaagcatcaccaaggagcgggcggaggtgatcctgcagggcacagccagctccaacgccagcgcccccgatgccatgtgggaggactacgagttcaagtgcaagccaggtgaccccagcagacggccctgcctcatctccccgtaccactaccgcctggactggctgatgtggttcgcggccttccagacctacgagcacaacgactggatcatccacctggctggcaagctcctggccagcgacgccgaggccttgtccctgctggcacacaaccccttcgcgggcaggcccccgcccaggtgggtccgaggagagcactacaggtacaagttcagccgtcctgggggcaggcacgccgccgagggcaagtggtgggtgcggaagaggatcggagcctacttccctccgctcagcctggaggagctgaggccctacttcagggaccgtgggtggcctctgcccgggcccctctagacgtgcaccagaaataaaggcgaagacccagcccctcggcggctcagcaacgtttgcccttccctgcgcccagcccaagctgggcatcgccaagagagacgtggagaggagagcggtgggacccagcccccagcacgggggtccagggtggggtctgttgtcacatactgtggcggctcccaggccctgcccacctggggccccacatccaggccaacccttgtcccaggcgccaggggctctgatctcccatccatcccaccctcctcccagaggcccagcctggggctgtgccgcccacaggagttgagacaatggccatcctgacaccttcctccactacagccctgaccatagacccagccaggtagctcttggggtctctagcgtcccagggcctggtttctgttccctcttcaatggtgtgttcccagccaggtcctgaccctcagagccaagtccctgtcacgtctggggcagccaaaccctcgccccacagggacctggacacgcccggccaggatgtggggttggatgggccattttctgtcctatccctcatctccacccccgccacagcctacacgcatcccacacatgcaggcacacacagcctgtgcacacatgtgttcttggcccggtttcatccccccatgactggtgtctgtgaggtgcagatggacacagcgcacacccagaccctccaccaggctgtgacctcgctgcctctgaggccttgacaaggcccctcaatcggaggacagccggccgtgcacactttcatcatcgtcggacaaacagcgtctactgcacatttttcttattcctattcttgagccatagctatggcatattcttctactattcctattataccacttaccagcttactcg

SEQ ID NO: 16368 - DNA, 1091 bp, Homo sapiens
  source 1..1091: mol_type = unassigned DNA
acatgcgccctgacagcccaacaatggcggcgcccgcggagtcgctgaggaggcggaagactgggtactcggatccggagcctgagtcgccgcccgcgccggggcgtggccccgcaggctctccggcccatctccacacgggcaccttctggctgacccggatcgtgctcctgaaggccctagccttcgtgtacttcgtggcattcctggtggctttccatcagaacaagcagctcatcggtgacagggggctgcttccctgcagagtgttcctgaagaacttccagcagtacttccaggacaggacgagctgggaagtcttcagctacatgcccaccatcctctggctgatggactggtcagacatgaactccaacctggacttgctggctcttctcggactgggcatctcgtctttcgtactgatcacgggctgcgccaacatgcttctcatggctgccctgtggggcctctacatgtccctggttaatgtgggccatgtctggtgcccttccttagcctctgccatcagccttcccagtatgcacggagggcagtgatgggcgcttgtgatctgatccgtgcctcctccctggatgtgggagctcctgggcttccaggccccgggcacctagagacggatggtcgcacgcatgattgtcggcatctcacagcggctcagcacgtcactttggactgtcgcgcagaaattcagaagactcgtagtagcttcggcagtgctctccctgccttccgagcagccatgcgtctttgaactgtcttcccttccctgatcttggagaacatagagctgccagttactgaggatgggagtcccagcttctggagacggggttcctggggatcttcctgtgccctctgtggacgctgtcaaggctgccccagcatacccccacatcccggattgtcctgtggggcttccggtggctgatcttcaggatcatgcttggagcaggcctgatcaagatccggggggaccggtgctggcgagacctcacctgcatggacttccactatgagacccagccgatgcccaatcctgtggcgtactacctgcaccactcaccctg

SEQ ID NO: 16369 - DNA, 853 bp, Homo sapiens
  source 1..853: mol_type = unassigned DNA
aacaatggcggcgcccgcggagtcgctgaggaggcggaagactgggtactcggatccggagcctgagtcgccgcccgcgccggggcgtggccccgcaggctctccggcccatctccacacgggcaccttctggctgacccggatcgtgctcctgaaggccctagccttcgtgtacttcgtggcattcctggtggctttccatcagaacaagcagctcatcggtgacagggggctgcttccctgcagagtgttcctgaagaacttccagcagtacttccaggacaggacgagctgggaagtcttcagctacatgcccaccatcctctggctgatggactggtcagacatgaactccaacctggacttgctggctcttctcggactgggcatctcgtctttcgtactgatcacgggctgcgccaacatgcttctcatggctgccctgtggggcctctacatgtccctggttaatgtgggccatgtctggtactctttcggtaagtgagatgcatttagagaaagctctgcgagagttgagcgttgtgtgtttggatgggagtcccagcttctggagacggggttcctggggatcttcctgtgccctctgtggacgctgtcaaggctgccccagcatacccccacatcccggattgtcctgtggggcttccggtggctgatcttcaggatcatgcttggagcaggcctgatcaagatccggggggaccggtgctggcgagacctcacctgcatggacttccactatgaggagaagtttgcaggctgtttcctgaggtctgggccagcagcaccgccatgccctgacccaccattcccctggccgcgggctgagtgt

SEQ ID NO: 16370 - DNA, 1947 bp, Homo sapiens
  source 1..1947: mol_type = unassigned DNA
atgcgtggagctggcctgatcaagatccggggggaccggtgctggcgagacctcacctgcatggacttccactatgagacccagccgatgcccaatcctgtggcgtactacctgcaccactcaccctggtggttccatcgcttcgagacgctcagcaaccacttcatcgagctcctggtgcccttcttcctcttcctcggccggcgggcgtgcatcatccacggggtgctgcagatcctgttccaggccgtcctcatcgtcagcgggaacctcagcttcctgaactggctgactatggtgcccagcctggcctgctttgatgacgccaccctgggattcttgttcccctctgggccaggcagcctgaaggaccgagttctgcagatgcagagggacatccgaggggcccggcccgagcccagattcggctccgtggtgcggcgtgcagccaacgtctcgctgggcgtcctgctggcctggctcagcgtgcccgtggtcctcaacttgctgagctccaggcaggtcatgaacacccacttcaactctcttcacatcgtcaacacttacggggccttcggaagcatcaccaaggagcgggcggaggtgatcctgcagggcacagccagctccaacgccagcgcccccgatgccatgtgggaggactacgagttcaagtgcaagccaggtgaccccagcagacggccctgcctcatctccccgtaccactaccgcctggactggctgatgtggttcgcggccttccagacctacgagcacaacgactggatcatccacctggctggcaagctcctggccagcgacgccgaggccttgtccctgctggcacacaaccccttcgcgggcaggcccccgcccaggtgggtccgaggagagcactacaggtacaagttcagccgtcctgggggcaggcacgccgccgagggcaagtggtgggtgcggaagaggatcggagcctacttccctccgctcagcctggaggagctgaggccctacttcagggaccgtgggtggcctctgcccgggcccctctagacgtgcaccagaaataaaggcgaagacccagcccctcggcggctcagcaacgtttgcccttccctgcgcccagcccaagctgggcatcgccaagagagacgtggagaggagagcggtgggacccagcccccagcacgggggtccagggtggggtctgttgtcacatactgtggcggctcccaggccctgcccacctggggccccacatccaggccaacccttgtcccaggcgccaggggctctgatctcccatccatcccaccctcctcccagaggcccagcctggggctgtgccgcccacaggagttgagacaatggccatcctgacaccttcctccactacagccctgaccatagacccagccaggtagctcttggggtctctagcgtcccagggcctggtttctgttccctcttcaatggtgtgttcccagccaggtcctgaccctcagagccaagtccctgtcacgtctggggcagccaaaccctcgccccacagggacctggacacgcccggccaggatgtggggttggatgggccattttctgtcctatccctcatctccacccccgccacagcctacacgcatcccacacatgcaggcacacacagcctgtgcacacatgtgttcttggcccggtttcatccccccatgactggtgtctgtgaggtgcagatggacacagcgcacacccagaccctccaccaggctgtgacctcgctgcctctgaggccttgacaaggcccctcaatcggaggacagccggccgtgcacactttcatcatcgtcggacaaacagcgtctactgcacatttttcttattcctattcttgagccatagctatggcatattcttctactattcctattataccacttaccagcttactcg

SEQ ID NO: 16371 - DNA, 2103 bp, Homo sapiens
  source 1..2103: mol_type = unassigned DNA
aatggcggcgcccgcggagtcgctgaggaggcggaagactgggtactcggatccggagcctgagtcgccgcccgcgccggggcgtggccccgcaggctctccggcccatctccacacgggcaccttctggctgacccggatcgtgctcctgaaggccctagccttcgtgtactggcctgatcaagatccggggggaccggtgctggcgagacctcacctgcatggacttccactatgagacccagccgatgcccaatcctgtggcgtactacctgcaccactcaccctggtggttccatcgcttcgagacgctcagcaaccacttcatcgagctcctggtgcccttcttcctcttcctcggccggcgggcgtgcatcatccacggggtgctgcagatcctgttccaggccgtcctcatcgtcagcgggaacctcagcttcctgaactggctgactatggtgcccagcctggcctgctttgatgacgccaccctgggattcttgttcccctctgggccaggcagcctgaaggaccgagttctgcagatgcagagggacatccgaggggcccggcccgagcccagattcggctccgtggtgcggcgtgcagccaacgtctcgctgggcgtcctgctggcctggctcagcgtgcccgtggtcctcaacttgctgagctccaggcaggtcatgaacacccacttcaactctcttcacatcgtcaacacttacggggccttcggaagcatcaccaaggagcgggcggaggtgatcctgcagggcacagccagctccaacgccagcgcccccgatgccatgtgggaggactacgagttcaagtgcaagccaggtgaccccagcagacggccctgcctcatctccccgtaccactaccgcctggactggctgatgtggttcgcggccttccagacctacgagcacaacgactggatcatccacctggctggcaagctcctggccagcgacgccgaggccttgtccctgctggcacacaaccccttcgcgggcaggcccccgcccaggtgggtccgaggagagcactacaggtacaagttcagccgtcctgggggcaggcacgccgccgagggcaagtggtgggtgcggaagaggatcggagcctacttccctccgctcagcctggaggagctgaggccctacttcagggaccgtgggtggcctctgcccgggcccctctagacgtgcaccagaaataaaggcgaagacccagcccctcggcggctcagcaacgtttgcccttccctgcgcccagcccaagctgggcatcgccaagagagacgtggagaggagagcggtgggacccagcccccagcacgggggtccagggtggggtctgttgtcacatactgtggcggctcccaggccctgcccacctggggccccacatccaggccaacccttgtcccaggcgccaggggctctgatctcccatccatcccaccctcctcccagaggcccagcctggggctgtgccgcccacaggagttgagacaatggccatcctgacaccttcctccactacagccctgaccatagacccagccaggtagctcttggggtctctagcgtcccagggcctggtttctgttccctcttcaatggtgtgttcccagccaggtcctgaccctcagagccaagtccctgtcacgtctggggcagccaaaccctcgccccacagggacctggacacgcccggccaggatgtggggttggatgggccattttctgtcctatccctcatctccacccccgccacagcctacacgcatcccacacatgcaggcacacacagcctgtgcacacatgtgttcttggcccggtttcatccccccatgactggtgtctgtgaggtgcagatggacacagcgcacacccagaccctccaccaggctgtgacctcgctgcctctgaggccttgacaaggcccctcaatcggaggacagccggccgtgcacactttcatcatcgtcggacaaacagcgtctactgcacatttttcttattcctattcttgagccatagctatggcatattcttctactattcctattataccacttaccagctt

SEQ ID NO: 16372 - DNA, 2599 bp, Homo sapiens
  source 1..2599: mol_type = unassigned DNA
acatgcgccctgacagcccaacaatggcggcgcccgcggagtcgctgaggaggcggaagactgggtactcggatccggagcctgagtcgccgcccgcgccggggcgtggccccgcaggctctccggcccatctccacacgggcaccttctggctgacccggatcgtgctcctgaaggccctagccttcgtgtacttcgtggcattcctggtggctttccatcagaacaagcagctcatcggtgacagggggctgcttccctgcagagtgttcctgaagaacttccagcagtacttccaggacaggacgagctgggaagtcttcagctacatgcccaccatcctctggctgatggactggtcagacatgaactccaacctggacttgctggctcttctcggactgggcatctcgtctttcgtactgatcacgggctgcgccaacatgcttctcatggctgccctgtggggcctctacatgtccctggttaatgtgggccatgtctggttgttttaggatgggagtcccagcttctggagacggggttcctggggatcttcctgtgccctctgtggacgctgtcaaggctgccccagcatacccccacatcccggattgtcctgtggggcttccggtggctgatcttcaggatcatgcttggagcaggcctgatcaagatccggggggaccggtgctggcgagacctcacctgcatggacttccactatgagacccagccgatgcccaatcctgtggcgtactacctgcaccactcaccctggtggttccatcgcttcgagacgctcagcaaccacttcatcgagctcctggtgcccttcttcctcttcctcggccggcgggcgtgcatcatccacggggtgctgcagatcctgttccaggccgtcctcatcgtcagcgggaacctcagcttcctgaactggctgactatggtgcccagcctggcctgctttgatgacgccaccctgggattcttgttcccctctgggccaggcagcctgaaggaccgagttctgcagatgcagagggacatccgaggggcccggcccgagcccagattcggctccgtggtgcggcgtgcagccaacgtctcgctgggcgtcctgctggcctggctcagcgtgcccgtggtcctcaacttgctgagctccaggcaggtcatgaacacccacttcaactctcttcacatcgtcaacacttacggggccttcggaagcatcaccaaggagcgggcggaggtgatcctgcagggcacagccagctccaacgccagcgcccccgatgccatgtgggaggactacgagttcaagtgcaagccaggtgaccccagcagacggccctgcctcatctccccgtaccactaccgcctggactggctgatgtggttcgcggccttccagacctacgagcacaacgactggatcatccacctggctggcaagctcctggccagcgacgccgaggccttgtccctgctggcacacaaccccttcgcgggcaggcccccgcccaggtgggtccgaggagagcactacaggtacaagttcagccgtcctgggggcaggcacgccgccgagggcaagtggtgggtgcggaagaggatcggagcctacttccctccgctcagcctggaggagctgaggccctacttcagggaccgtgggtggcctctgcccgggcccctctagacgtgcaccagaaataaaggcgaagacccagcccctcggcggctcagcaacgtttgcccttccctgcgcccagcccaagctgggcatcgccaagagagacgtggagaggagagcggtgggacccagcccccagcacgggggtccagggtggggtctgttgtcacatactgtggcggctcccaggccctgcccacctggggccccacatccaggccaacccttgtcccaggcgccaggggctctgatctcccatccatcccaccctcctcccagaggcccagcctggggctgtgccgcccacaggagttgagacaatggccatcctgacaccttcctccactacagccctgaccatagacccagccaggtagctcttggggtctctagcgtcccagggcctggtttctgttccctcttcaatggtgtgttcccagccaggtcctgaccctcagagccaagtccctgtcacgtctggggcagccaaaccctcgccccacagggacctggacacgcccggccaggatgtggggttggatgggccattttctgtcctatccctcatctccacccccgccacagcctacacgcatcccacacatgcaggcacacacagcctgtgcacacatgtgttcttggcccggtttcatccccccatgactggtgtctgtgaggtgcagatggacacagcgcacacccagaccctccaccaggctgtgacctcgctgcctctgaggccttgacaaggcccctcaatcggaggacagccggccgtgcacactttcatcatcgtcggacaaacagcgtctactgcacatttttcttattcctattcttgagccatagctatggcatattcttctactattcctattataccacttaccagcttactcg

SEQ ID NO: 16373 - DNA, 4141 bp, Homo sapiens
  source 1..4141: mol_type = unassigned DNA
agcagcgagtccttgcctcccggcggctcaggacgagggcagatctcgttctggggcaagccgttgacactcgctccctgccaccgcccgggctccgtgccgccaagttttcattttccaccttctctgcctccagtcccccagcccctggccgagagaagggtcttaccggccgggattgctggaaacaccaagaggtggtttttgttttttaaaacttctgtttcttgggagggggtgtggcggggcaggatgagcaactccgttcctctgctctgtttctggagcctctgctattgctttgctgcggggagccccgtaccttttggtccagagggacggctggaagataagctccacaaacccaaagctacacagactgaggtcaaaccatctgtgaggtttaacctccgcacctccaaggacccagagcatgaaggatgctacctctccgtcggccacagccagcccttagaagactgcagtttcaacatgacagctaaaacctttttcatcattcacggatggacgatgagcggtatctttgaaaactggctgcacaaactcgtgtcagccctgcacacaagagagaaagacgccaatgtagttgtggttgactggctccccctggcccaccagctttacacggatgcggtcaataataccagggtggtgggacacagcattgccaggatgctcgactggctgcaggagaaggacgatttttctctcgggaatgtccacttgatcggctacagcctcggagcgcacgtggccgggtatgcaggcaacttcgtgaaaggaacggtgggccgaatcacaggtttggatcctgccgggcccatgtttgaaggggccgacatccacaagaggctctctccggacgatgcagattttgtggatgtcctccacacctacacgcgttccttcggcttgagcattggtattcagatgcctgtgggccacattgacatctaccccaatgggggtgacttccagccaggctgtggactcaacgatgtcttgggatcaattgcatatggaacaatcacagaggtggtaaaatgtgagcatgagcgagccgtccacctctttgttgactctctggtgaatcaggacaagccgagttttgccttccagtgcactgactccaatcgcttcaaaaaggggatctgtctgagctgccgcaagaaccgttgtaatagcattggctacaatgccaagaaaatgaggaacaagaggaacagcaaaatgtacctaaaaacccgggcaggcatgcctttcagagtttaccattatcagatgaaaatccatgtcttcagttacaagaacatgggagaaattgagcccaccttttacgtcaccctttatggcactaatgcagattcccagactctgccactggaaatagtggagcggatcgagcagaatgccaccaacaccttcctggtctacaccgaggaggacttgggagacctcttgaagatccagctcacctgggagggggcctctcagtcttggtacaacctgtggaaggagtttcgcagctacctgtctcaaccccgcaaccccggacgggagctgaatatcaggcgcatccgggtgaagtctggggaaacccagcggaaactgacattttgtacagaagaccctgagaacaccagcatatccccaggccgggagctctggtttcgcaagtgtcgggatggctggaggatgaaaaacgaaaccagtcccactgtggagcttccctgagggtgcccgggcaagtcttgccagcaaggcagcaagacttcctgctatccaagcccatggaggaaagttactgctgaggacccacccaatggaaggattcttctcagccttgaccctggagcactgggaacaactggtctcctgtgatggctgggactcctcgcgggaggggactgcgctgctatagctcttgctgcctctcttgaatagctctaactccaaacctctgtccacacctccagagcaccaagtccagatttgtgtgtaagcagctgggtgcctggggcctctcgtgcacactggattggtttctcagttgctgggcgagcctgtactctgcctgacgaggaacgctggctccgaagaggccctgtgtagaaggctgtcagctgctcagcctgctttgagcctcagtgagaagtccttccgacaggagctgactcatgtcaggatggcaggcctggtatcttgctcgggccctagctgttggggttctcatgggttgcactgaccatactgcttacgtcttagccattccgtcctgctccccagctcactctctgaagcacacatcattggctttcctatttttctgttcattttttaattgagcaaatgtctattgaacacttaaaattaattagaatgtggtaatggacatattactgagcctctccatttggaacccagtggagttgggatttctagaccctctttctgtttggatggtgtatgtgtatatgcatggggaaaggcacctggggcctgggggaggctataggatataagcattagggaccctgaggctttaagtggtttctatttcttcttagttattatgtgccaccttcttagttattatgtgccacctcccctatgagtgacgtgtttgatcactagcagaatagcaagcagagtatcattcatgctggggccagaatgatggccggttgccagatataactgctttggagcaaatctcttctgtttagagagatagaagttatgacatatgtaatacacatctgtgtacacagaaaccggcacctgccagacagagctggttctaagatttaatacagtgctttttttcctctttgaaatattttactttaataccagtgccttttcttgttgaacttcttggaaaagccaccaattctagatcttgatttgaattaatacacacaatatctgagacacttacacttttcaaaagatttgtgtatgcattgcctaattagagtagggggagaagggcaactattattatccctattttacaaaactgaggcttagtgaggttcagccacatgcctagacttatatactagttagtggtgcagccagggagaggactcagatttcctggaggcaaagtctatctctgaaactccatgaagacttttgcagccagttcccaccaatatgccccagacgtgagacaaacaaggacttttttttttatatagagccatccataaaatcctaagcccttttattaatgtataaccaggagaacatctgtgccaacggttggactttttatggctgagattcgggaggaagtgtgacaccaagcaggagaggaagaatgattttctttgtacttaggttttctaaggacattgttttaatctgtatcgtgccaaagttgtatcactgttaaacttctgaagacataaccagttgagtcttatttcaagatatgttctcaagccaattgtgtgcttctcttgtttctgtgattgctttctagccaaagcgaagcttgtacaggttgagtatcccttatccaaaatgcttggaaccagaagtgtttcaaattttagattattttcagattttggaatgtttgcatatacataatgagatattttgggaataggacccgagcctaaacacaaaattcattgatgtgtcagttacaccttatccacatagcctgagggtaattttatacgatattttaaatagttgtgtacatgaagcatggtttgtggtaacttatgtgaggggttttcccattttttgtcttgttggtgctcaaaaagttttggattttggagcatttcggattttggatttttggattagggttgctcaacccatattattggctgtacatcctggtcacttctgacttctgtttttactaatggaagctttgcaaattgaattctcagtgagttgtatatttatacacctggcttgaagccttaattgtatataatgatgctttttaaaaaatgctatttggaagactatttatttctcgtgtatataatgtatataaaaaaatatggttagtgtttacctaaggttaaccaatttcaagattaaaatttttaaatagtaaaataataaaaaattataaagttcttaa

SEQ ID NO: 16374 - DNA, 1760 bp, Homo sapiens
  source 1..1760: mol_type = unassigned DNA
agcgagtccttgcctcccggcggctcaggacgagggcagatctcgttctggggcaagccgttgacactcgctccctgccaccgcccgggctccgtgccgccaagttttcattttccaccttctctgcctccagtcccccagcccctggccgagagaagggtcttaccggccgggattgctggaaacaccaagaggtggtttttgttttttaaaacttctgtttcttgggagggggtgtggcggggcaggatgagcaactccgttcctctgctctgtttctggagcctctgctattgctttgctgcggggagccccgtaccttttggtccagagggacggctggaagataagctccacaaacccaaagctacacagactgaggtcaaaccatctgtgaggtttaacctccgcacctccaaggacccagagcatgaaggatgctacctctccgtcggccacagccagcccttagaagactgcagtttcaacatgacagctaaaacctttttcatcattcacggatggacgatgagcggtatctttgaaaactggctgcacaaactcgtgtcagccctgcacacaagagagaaagacgccaatgtagttgtggttgactggctccccctggcccaccagctttacacggatgcggtcaataataccagggtggtgggacacagcattgccaggatgctcgactggctgcaggagaaggacgatttttctctcgggaatgtccacttgatcggctacagcctcggagcgcacgtggccgggtatgcaggcaacttcgtgaaaggaacggtgggccgaatcacagcaatcacagaggtggtaaaatgtgagcatgagcgagccgtccacctctttgttgactctctggtgaatcaggacaagccgagttttgccttccagtgcactgactccaatcgcttcaaaaaggggatctgtctgagctgccgcaagaaccgttgtaatagcattggctacaatgccaagaaaatgaggaacaagaggaacagcaaaatgtacctaaaaacccgggcaggcatgcctttcagagtttaccattatcagatgaaaatccatgtcttcagttacaagaacatgggagaaattgagcccaccttttacgtcaccctttatggcactaatgcagattcccagactctgccactggaaatagtggagcggatcgagcagaatgccaccaacaccttcctggtctacaccgaggaggacttgggagacctcttgaagatccagctcacctgggagggggcctctcagtcttggtacaacctgtggaaggagtttcgcagctacctgtctcaaccccgcaaccccggacgggagctgaatatcaggcgcatccgggtgaagtctggggaaacccagcggaaactgacattttgtacagaagaccctgagaacaccagcatatccccaggccgggagctctggtttcgcaagtgtcgggatggctggaggatgaaaaacgaaaccagtcccactgtggagcttccctgagggtgcccgggcaagtcttgccagcaaggcagcaagacttcctgctatccaagcccatggaggaaagttactgctgaggacccacccaatggaaggattcttctcagccttgaccctggagcactgggaacaactggtctcctgtgatggctgggactcctcgcgggaggggactgcgctgctatagctcttgctgcctctcttgaatagctctaactccaaacctctgt

SEQ ID NO: 16375 - DNA, 1484 bp, Homo sapiens
  source 1..1484: mol_type = unassigned DNA
agagactatgagggttcactatctgtttgctggaagatatacaagacttttgaggataatacttaaatgaagatagaccggatgtataatatgctttttcttagctttcctatgactctacttagcaacttttgctaaaagaaacacaatatatgactgactactttgaagacacatatattggacacttaaaatcaacaaaagcagagaggtcccaaacgtggtatcttttcacaatgatgtattttatccgaattcttggaattactcatggtgtctttcaaaattaaagatctgtgaaacctgaagcagatatgaatattagccagattatttcctactggggctaccctgatgaagaatatgatattgtaaccgaagatggttatatccttggcctttatagaattccttattggaggacagacaataataaaaatctagctcagagggttgttgtatacttgcaacatggtttgcttacatctgccagcagctggatttccaatcttcccaacaatagtctgggcttcattctggcagatgctggttatgatgtgtggatgggaaatagcagaggaaatacctggtccaggaaacacttgtacctagaaacgagttccaaagaattctgggctttcagttttgatgagatggcaaaatatgaccttccagcctctattgatttcactgtgaagcaaaccagacaagaggaaatattttatgtaggccattcacagggtactactattggtttcataacattttctactatatcaaagatagctgaaagaatcaaaatattttttgctttagcaccagttttttccacaaagtacttaaaaagtcctttaattagaatgacatacaaatggaagtcaatagtcatggctttttcaggcaacaaagacttcttgcctaaaacctcatttaaaaaattcattggttcaaagctgtgtccactacagatttttgataagatttgcctcaatatcttgtttatgatgtttggatatgacccaaaaaacttaaatatgagtcgtttggatgtgtatttttcacacaacccagcaggaacatctgttcaaaatatgcttcattggagtcagcttttaaattctactcatttgaaagcttatgactggggcagtcctgatctgaacttggttcattataatcagacaacgtctccattatacaacatgacaaacatgaatgtggcaactgcaatttggaatggtaaaagtgacttgttggctgaccctgaagacgttaacattttacattctgaaatcacaaaccacatttattataaaactatttcttactacaatcatatagactctttgtttggattagatgtctatgatcaagtttaccatgaaatcattgatattatccaagacaatctataaagaaccatggcgctgtgtgtttaaagatctacatcattcctaatgaaatccaattcttattttttttta

SEQ ID NO: 16376 - DNA, 1230 bp, Homo sapiens
  source 1..1230: mol_type = unassigned DNA
atgtggcagcttttagcagcagcatgctggatgcttcttcttggatctatgtatggttatgacaagaaaggaaacaatgcaaaccctgaagctaatatgaatattagccagattatttcttactggggttatccttatgaagagtatgatgttacaacaaaagatggttatatccttggaatttataggattccacatggaagaggatgcccagggaggacagctccaaagcctgctgtgtatttgcagcatggcttaattgcatctgccagtaactggatttgcaacctgcccaacaacagtttggctttccttctggcagatagtggttatgacgtgtggttggggaacagccgaggaaacacttggtccagaaaacaccttaaattgtcaccgaaatcaccggaatactgggccttcagtttggatgagatggctaaatatgaccttccagccacaatcaattttatcatagagaaaactggacagaagcgactctactacgtgggccactcacaaggcaccaccatagcttttatagcattttctacaaacccagaactggctaaaaagattaagatattttttgcactggctccagttgtcacagttaaatacacccaaagtcctatgaaaaaactaacaaccctttccaggcgagtagttaaggtgttgtttggtgacaaaatgttccaccctcatacattgtttgaccaattcattgccaccaaagtgtgcaatcgaaagctattccgtcgtatttgcagcaacttcctatttactctgagtggatttgatccgcaaaacttaaatatgagtcgcttggatgtttatttgtcacacaatcctgcgggaacatctgttcagaatatgctgcactgggctcaggctgttaattctggtcagctccaagcttttgattggggaaactctgatcagaacatgatgcacttccatcagcttacacctcctttatacaacattactaagatggaagttccaacagcaatatggaatggtggacaggacattgtggctgatcccaaggatgttgaaaatttacttcctcaaattgctaaccttatttattacaagctgattccacactacaatcatgtggatttttaccttggagaggatgcacctcaggaaatttaccaagacctaattatattgatggaagaatatttacaaaattaaatgcactttactttctctaagcaagtggat

SEQ ID NO: 16377 - DNA, 1272 bp, Homo sapiens
  source 1..1272: mol_type = unassigned DNA
atgttggaaaccttgtcaagacagtggattgtctcacacagaatggaaatgtggcttctgattctggtggcgtatatgttccagagaaatgtgaattcagtacatatgccaactaaagctgtggacccagaagcattcatgaatattagtgaaatcatccaacatcaaggctatccctgtgaggaatatgaagtcgcaactgaagatgggtatatcctttctgttaacaggattcctcgaggcctagtgcaacctaagaagacaggttccaggcctgtggtgttactgcagcatggcctagttggaggtgctagcaactggatttccaacctgcccaacaatagcctgggcttcattctggcagatgctggttttgacgtgtggatggggaacagcaggggaaacgcctggtctcgaaaacacaagacactctccatagaccaagatgagttctgggctttcagttatgatgagatggctaggtttgaccttcctgcagtgataaactttattttgcagaaaacgggccaggaaaagatctattatgtcggctattcacagggcaccaccatgggctttattgcattttccaccatgccagagctggctcagaaaatcaaaatgtattttgctttagcacccatagccactgttaagcatgcaaaaagccccgggaccaaatttttgttgctgccagatatgatgatcaagggattgtttggcaaaaaagaatttctgtatcagaccagatttctcagacaacttgttatttacctttgtggccaggtgattcttgatcagatttgtagtaatatcatgttacttctgggtggattcaacaccaacaatatgaacatgagccgagcaagtgtatatgctgcccacactcttgctggaacatctgtgcaaaatattctacactggagccaggcagtgaattctggtgaactccgggcatttgactgggggagtgagaccaaaaatctggaaaaatgcaatcagccaactcctgtaaggtacagagtcagagatatgacggtccctacagcaatgtggacaggaggtcaggactggctttcaaatccagaagacgtgaaaatgctgctctctgaggtgaccaacctcatctaccataagaatattcctgaatgggctcacgtggatttcatctggggtttggatgctcctcaccgtatgtacaatgaaatcatccatctgatgcagcaggaggagaccaacctttcccagggacggtgtgaggccgtattgtga

SEQ ID NO: 16378 - DNA, 1452 bp, Homo sapiens
  source 1..1452: mol_type = unassigned DNA
tggcttctgattctggtggcgtatatgttccagagaaatgtgaattcagtacatatgccaactaaagctgtggacccagaagcattcatgaatattgagaatcatcatcatcgcctgtggaaaggaagtagagaatcaggagtaaggaaagagataaatcaaactgtgatacagacttcaaaacagccagactcaactccatgaggagctatggagctaaaactgctcttcagagatgtcctacgttgggctgagatgaccaggcctttagaccgcaaacagagtgaaatcatccaacatcaaggctatccctgtgaggaatatgaagtcgcaactgaagatgggtatatcctttctgttaacaggattcctcgaggcctagtgcaacctaagaagacaggttccaggcctgtggtgttactgcagcatggcctagttggaggtgctagcaactggatttccaacctgcccaacaatagcctgggcttcattctggcagatgctggttttgacgtgtggatggggaacagcaggggaaacgcctggtctcgaaaacacaagacactctccatagaccaagatgagttctgggctttcagttatgatgagatggctaggtttgaccttcctgcagtgataaactttattttgcagaaaacgggccaggaaaagatctattatgtcggctattcacagggcaccaccatgggctttattgcattttccaccatgccagagctggctcagaaaatcaaaatgtattttgctttagcacccatagccactgttaagcatgcaaaaagccccgggaccaaatttttgttgctgccagatatgatgatcaagggattgtttggcaaaaaagaatttctgtatcagaccagatttctcagacaacttgttatttacctttgtggccaggtgattcttgatcagatttgtagtaatatcatgttacttctgggtggattcaacaccaacaatatgaacatgagccgagcaagtgtatatgctgcccacactcttgctggaacatctgtgcaaaatattctacactggagccaggcagtgaattctggtgaactccgggcatttgactgggggagtgagaccaaaaatctggaaaaatgcaatcagccaactcctgtaaggtacagagtcagagatatgacggtccctacagcaatgtggacaggaggtcaggactggctttcaaatccagaagacgtgaaaatgctgctctctgaggtgaccaacctcatctaccataagaatattcctgaatgggctcacgtggatttcatctggggtttggatgctcctcaccgtatgtacaatgaaatcatccatctgatgcagcaggaggagaccaacctttcccagggacggtgtgaggccgtattgtgaagcatctgacactgacgatcttaggacaacctcctgagggatggg

SEQ ID NO: 16379 - DNA, 1197 bp, Homo sapiens
  source 1..1197: mol_type = unassigned DNA
atgatgtggctgcttttaacaacaacttgtttgatctgtggaactttaaatgctggtggattccttgatttggaaaatgaagtgaatcctgaggtgtggatgaatactagtgaaatcatcatctacaatggctaccccagtgaagagtatgaagtcaccactgaagatgggtatatactccttgtcaacagaattccttatgggcgaacacatgctaggagcacaggtccccggccagttgtgtatatgcagcatgccctgtttgcagacaatgcctactggcttgagaattatgctaatggaagccttggattccttctagcagatgcaggttatgatgtatggatgggaaacagtcggggaaacacttggtcaagaagacacaaaacactctcagagacagatgagaaattctgggcctttagttttgatgaaatggccaaatatgatctcccaggagtaatagacttcattgtaaataaaactggtcaggagaaattgtatttcattggacattcacttggcactacaatagggtttgtagccttttccaccatgcctgaactggcacaaagaatcaaaatgaattttgccttgggtcctacgatctcattcaaatatcccacgggcatttttaccaggttttttctacttccaaattccataatcaaggctgtttttggtaccaaaggtttctttttagaagataagaaaacgaagatagcttctaccaaaatctgcaacaataagatactctggttgatatgtagcgaatttatgtccttatgggctggatccaacaagaaaaatatgaatcagagtcgaatggatgtgtatatgtcacatgctcccactggttcatcagtacacaacattctgcatataaaacagctttaccactctgatgaattcagagcttatgactggggaaatgacgctgataatatgaaacattacaatcagagtcatccccctatatatgacctgactgccatgaaagtgcctactgctatttgggctggtggacatgatgtcctcgtaacaccccaggatgtggccaggatactccctcaaatcaagagtcttcattactttaagctattgccagattggaaccactttgattttgtctggggcctcgatgcccctcaacggatgtacagtgaaatcatagctttaatgaaggcatattcctaa

SEQ ID NO: 16380 - DNA, 1782 bp, Homo sapiens
  source 1..1782: mol_type = unassigned DNA
ttttattctcaaaatgtgtcaggataagaagcacttctgtaaatcgacctttttaaaatagatataattagatttgcagttgggggcagtaaagaaagggtctgaacagtggataacatgttgagaggttaattattaatgggcagtcttccctaacaaagtatctaataggcattgtggtctctttggcttcagaaattaccaagaaagcctggaccccgggtgaaacggagaaatggacacaagtcccctgtgtttctccattctgttggttttatgcatctttatccaatcaagtgcccttggacaaagcctgaaaccagagccatttggaagaagagctcaagctgttgaaacaaacaaaacgctgcatgagatgaagaccagattcctgctctttggagaaaccaatcagggctgtcagattcgaatcaatcatccggacacgttacaggagtgcggcttcaactcctccctgcctctggtgatgataatccacgggtggtcggtggacggcgtgctagaaaactggatctggcagatggtggccgcgctgaagtctcagccggcccagccagtgaacgtggggctggtggactggatcaccctggcccacgaccactacaccatcgccgtccgcaacacccgccttgtgggcaaggaggtcgcggctcttctccggtggctggaggaatctgtgcaactctctcgaagccatgttcacctaattgggtacagcctgggtgcacacgtgtcaggatttgccggcagttccatcggtggaacgcacaagattgggagaatcacagggctggatgccgcgggacctttgtttgagggaagtgcccccagcaatcgtctttctccagatgatgccaattttgtggatgccattcatacctttacccgggagcacatgggcctgagcgtgggcatcaaacagcccataggacactatgacttctatcccaacgggggctccttccagcctggctgccacttcctagagctctacagacatattgcccagcacggcttcaatgccatcacccagaccataaaatgctcccacgagcgatcggtgcaccttttcatcgactccttgctgcacgccggcacgcagagcatggcctacccgtgtggtgacatgaacagcttcagccagggcctgtgcctgagctgcaagaagggccgctgcaacacgctgggctaccacgtccgccaggagccgcggagcaagagcaagaggctcttcctcgtaacgcgagcccagtcccccttcaaagtttatcattaccagttcaagatccagttcatcaaccaaactgagacaccaatacaaacaacttttaccatgtcactactcggaacaaaagagaaaatgcagaaaattcccatcactctgggcaaaggaattgctagtaataaaacgtattcctttcttatcacgctggatgtggatatcggcgagctgatcatgatcaagttcaagtgggaaaacagtgcagtgtgggccaatgtctgggacacggtccagaccatcatcccatggagcacagggccgcgccactcaggcctcgttctgaagacgatcagagtcaaagcaggagaaacccagcaaagaatgacattttgttcagaaaacacagatgacctactacttcgcccaacccaggaaaaaatcttcgtgaaatgtgaaataaagtctaaaacatcaaagcgaaagatcagatgagatttaatgaagacccagtgtaaagaataaatgaatcttactcctta

SEQ ID NO: 16381 - DNA, 2161 bp, Homo sapiens
  source 1..2161: mol_type = unassigned DNA
gatgagaattgccaaggcacagcaaagcctgcagcttccatacccgtcatgagagcaaataacttatttgtaaacctaagcacttaattaactaaatggaaagcaaggcagtgagtgattcctgacatggccgaatttaagtcaagctgtgaagctccaggtgcagccagaaatggagatggacaacttgaactgaaccctgagagcttctaaaaaggctttggaccactgcttctcagcagtttttcttacggagtctctctgtgtcgcccaggctggagtacaatggcgcgatctcagttcactgcaacctccgcctcccaggttcaagcgattctcctgcctcagcttcctgagtagctgggattacaggcactcacctccacgcccagctaacttttgtatttttagtacagatggggtttcaccatgttggtcaggctggtctcgaactcctgacctcgtgatccgccctcctcgcctcccaaagtgctgtgattacaggagtgagccaccgctcctggccagaaatctcttctttattatgtctactgtccgttatccaactccagaagaaattaccaagaaagcctggaccccgggtgaaacggagaaatggacacaagtcccctgtgtttctccattctgttggttttatgcatctttatccaatcaagtgcccttggacaaagcctgaaaccagagccatttggaagaagagctcaagctgttgaaacaaacaaaacgctgcatgagatgaagaccagattcctgctctttggagaaaccaatcagggctgtcagattcgaatcaatcatccggacacgttacaggagtgcggcttcaactcctccctgcctctggtgatgataatccacgggtggtcggtggacggcgtgctagaaaactggatctggcagatggtggccgcgctgaagtctcagccggcccagccagtgaacgtggggctggtggactggatcaccctggcccacgaccactacaccatcgccgtccgcaacacccgccttgtgggcaaggaggtcgcggctcttctccggtggctggaggaatctgtgcaactctctcgaagccatgttcacctaattgggtacagcctgggtgcacacgtgtcaggatttgccggcagttccatcggtggaacgcacaagattgggagaatcacagggctggatgccgcgggacctttgtttgagggaagtgcccccagcaatcgtctttctccagatgatgccaattttgtggatgccattcatacctttacccgggagcacatgggcctgagcgtgggcatcaaacagcccataggacactatgacttctatcccaacgggggctccttccagcctggctgccacttcctagagctctacagacatattgcccagcacggcttcaatgccatcacccagaccataaaatgctcccacgagcgatcggtgcaccttttcatcgactccttgctgcacgccggcacgcagagcatggcctacccgtgtggtgacatgaacagcttcagccagggcctgtgcctgagctgcaagaagggccgctgcaacacgctgggctaccacgtccgccaggagccgcggagcaagagcaagaggctcttcctcgtaacgcgagcccagtcccccttcaaagtttatcattaccagttcaagatccagttcatcaaccaaactgagacaccaatacaaacaacttttaccatgtcactactcggaacaaaagagaaaatgcagaaaattcccatcactctgggcaaaggaattgctagtaataaaacgtattcctttcttatcacgctggatgtggatatcggcgagctgatcatgatcaagttcaagtgggaaaacagtgcagtgtgggccaatgtctgggacacggtccagaccatcatcccatggagcacagggccgcgccactcaggcctcgttctgaagacgatcagagtcaaagcaggagaaacccagcaaagaatgacattttgttcagaaaacacagatgacctactacttcgcccaacccaggaaaaaatcttcgtgaaatgtgaaataaagtctaaaacatcaaagcgaaagatcagatgagatttaatgaagacccagtgtaaagaataaatgaatcttactcctt

SEQ ID NO: 16382 - DNA, 3806 bp, Homo sapiens
  source 1..3806: mol_type = unassigned DNA
cttcttgtaagagagtgctaggcacatagcctcctcctattcctaatcctcccaccaaagaaagaggcacagagttcattacttagtgggggccagctgtgatcggccaactgccagctgccttaaaaaggaagaccagtgatgctaggatggagtgaaacccaagaggaagtgccatcatgaggaatcaatgagagatctgtgaagagagagggctgggtgggagcccagaaggatagaacctggaagatcaatatctcccgtgagggaaataacaatggagccaggttctaagtcagtgtctaggtcagactggcaacctgaaccacaccagaggcctataaccccgctagagcctgggccagaaaagacacccatagcccagccagaatcgaagactctgcagggatccaatacccaacagaagcctgcttcaaaccaaagacccctcacccagcaggagacccctgcacaacatgatgctgaatcccagaaggaacctagagcccaacaaaaatctgcttcacaagaggaatttcttgccccacagaagcccgcaccacagcaatcaccttacatccaaagggtgctgctcactcaacaggaagctgcctcccagcagggacctgggctaggaaaagaatctataactcaacaggagccagcattgagacaaagacatgtagcccagccagggcctgggccaggagagccacctccagctcaacaagaagctgaatcaacacctgcggcccaggctaaacctggagccaaaagggagccatctgccccgactgaatctacgtcccaagagacacctgaacagtcagacaagcaaacaacgccagtccagggagccaaatccaagcagggatctttgacagagctgggatttctaacaaaacttcaggaactatccatacagcgatcagccctagagtggaaggcactttctgagtgggtcacagattctgagtcagaatcagatgtgggatcatcttcagacacagattctccagccacgatgggtggaatggtggcccagggagtgaagctaggcttcaaaggaaaatctggttataaagtgatgtcaggatacagtgggacgtcgccacatgagaaaaccagtgctcggaatcacagacactaccaggatacagcctcaaggctcatccacaacatggacctgcgcacaatgacacagtcgctggtgactctggcggaggacaacatagccttcttctcgagccagggtcctggggaaacggcccagcggctgtcaggcgtttttgccggtgtacgggagcaggcgctggggctggagccggccctgggccgcctgctgggtgtggcgcacctctttgacctggacccagagacaccggccaacgggtaccgcagcctagtgcacacagcccgctgctgcctggcgcacctcctgcacaaatcccgctatgtggcctccaaccgccgcagcatcttcttccgcaccagccacaacctggccgagctggaggcctacctggctgccctcacccagctccgcgctctggtctactacgcccagcgcctgctggttaccaatcggccgggggtactcttctttgagggcgacgaggggctcaccgccgacttcctccgggagtatgtcacgctgcataagggatgcttctatggccgctgcctgggcttccagttcacgcctgccatccggccattcctgcagaccatctccattgggctggtgtccttcggggagcactacaaacgcaacgagacaggcctcagtgtggccgccagctctctcttcaccagcggccgctttgccatcgaccccgagctgcgtggggctgagtttgagcggatcacacagaacctggacgtgcacttctggaaagccttctggaacatcaccgagatggaagtgctatcgtctctggccaacatggcatcggccaccgtgagggtaagccgcctgctcagcctgccacccgaagcctttgagatgccactgactgccgaccccacgctcacggtcaccatctcacccccactggcccacacaggccctgggcccgtcctcgtcaggctcatctcctatgacctgcgtgaaggacaggacagtgaggagctcagcagcctgataaagtccaacggccaacggagcctggagctgtggccgcgcccccagcaggcaccccgctcgcggtccctgatagtgcacttccacggcggtggctttgtggcccagacctccagatcccacgagccctacctcaagagctgggcccaggagctgggcgcccccatcatctccatcgactactccctggcccctgaggcccccttcccccgtgcgctggaggagtgcttcttcgcctactgctgggccatcaagcactgcgccctccttggctcaacaggggaacgaatctgccttgcgggggacagtgcaggcgggaacctctgcttcaccgtggctcttcgggcagcagcctacggggtgcgggtgccagatggcatcatggcagcctacccggccacaatgctgcagcctgccgcctctccctcccgcctgctgagcctcatggaccccttgctgcccctcagtgtgctctccaagtgtgtcagcgcctatgctggtgcaaagacggaggaccactccaactcagaccagaaagccctcggcatgatggggctggtgcggcgggacacagccctgctcctccgagacttccgcctgggtgcctcctcatggctcaactccttcctggagttaagtgggcgcaagtcccagaagatgtcggagcccatagcagagccgatgcgccgcagtgtgtctgaagcagcactggcccagccccagggcccactgggcacggattccctcaagaacctgaccctgagggacttgagcctgaggggaaactccgagacgtcgtcggacacccccgagatgtcgctgtcagctgagacacttagcccctccacaccctccgatgtcaacttcttattaccacctgaggatgcaggggaagaggctgaggccaaaaatgagctgagccccatggacagaggcctgggcgtccgtgccgccttccccgagggtttccacccccgacgctccagccagggtgccacacagatgcccctctactcctcacccatagtcaagaaccccttcatgtcgccgctgctggcacccgacagcatgctcaagagcctgccacctgtgcacatcgtggcgtgcgcgctggaccccatgctggacgactcggtcatgctcgcgcggcgactgcgcaacctgggccagccggtgacgctgcgcgtggtggaggacctgccgcacggcttcctgaccctagcggcgctgtgccgcgagacgcgccaggccgcagagctgtgcgtggagcgcatccgcctcgtcctcactcctcccgccggagccgggccgagcggggagacgggggctgcgggggtagacgggggctgcggggggcgacactaaaagcctgttgttcccatctgcgccggcctccgtcatgaatgccttccgggccgggcggaaggggacgcgggctgtgccttacttaagtcgggggtggcaagggggcggggcgggggcccgaaagctgagaccctcgccacggggagggggacgcgcacacacaccggtcaccgagacggctggacctgcacgccaccgctgccttttgctgctgctgctgcggcgaccgccgcagggacggggactggccctcccttgcaggtcggtttggtttgttgtaaataaaagtatttaatta

SEQ ID NO: 16383 - DNA, 4026 bp, Homo sapiens
  source 1..4026: mol_type = unassigned DNA
agtccctagggaacttcctgttgtcaccacacctctgagtcgtctgagctcactgtgagcaaaatcccacagtggaaactcttaagcctctgcgaagtaaatcattcttgtgaatgtgacacacgatctctccagtttccatatgttgagattctacttattcatcagtttgttgtgcttgtcaagatcagacgcagaagaaacatgtccttcattcaccaggctgagctttcacagtgcagtggttggtacgggactaaatgtgaggctgatgctctacacaaggaaaaacctgacctgcgcacaaaccatcaactcctcagcttttgggaacttgaatgtgaccaagaaaaccaccttcattgtccatggattcaggccaacaggctcccctcctgtttggatggatgacttagtaaagggtttgctctctgttgaagacatgaacgtagttgttgttgattggaatcgaggagctacaactttaatatatacccatgcctctagtaagaccagaaaagtagccatggtcttgaaggaatttattgaccagatgttggcagaaggagcttctcttgatgacatttacatgatcggagtaagtctaggagcccacatatctgggtttgttggagagatgtacgatggatggctggggagaattacaggcctcgaccctgcaggccctttattcaacgggaaacctcaccaagacagattagatcccagtgatgcgcagtttgttgatgtcatccattccgacactgatgcactgggctacaaggagccattaggaaacatagacttctacccaaatggaggattggatcaacctggctgccccaaaacaatattgggaggatttcagtattttaaatgtgaccaccagaggtctgtatacctgtacctgtcttccctgagagagagctgcaccatcactgcgtatccctgtgactcctaccaggattataggaatggcaagtgtgtcagctgcggcacgtcacaaaaagagtcctgtccccttctgggctattatgctgataattggaaagaccatctaagggggaaagatcctccaatgacgaaggcattctttgacacagctgaggagagcccattctgcatgtatcattactttgtggatattataacatggaacaagaatgtaagaagaggggacattaccatcaaattgagagacaaagctggaaacaccacagaatccaaaatcaatcatgaacccaccacatttcagaaatatcaccaagtgagtctacttgcaagatttaatcaagatctggataaagtggctgcaatttccttgatgttctctacaggatctctaataggcccaaggtacaagctcaggattctccgaatgaagttaaggtcccttgcccatccggagaggcctcagctgtgtcggtatgatcttgtcctgatggaaaacgttgaaacagtcttccaacctattctttgcccagagttgcagttgtaactgttgccaggacacatggccataaataatagaaagaaagctacaaccacaggctgtttgaaagcttcacctcacctttctgcaaggcagaaaaagtatgaaaaaaaccaaggcttttttcagtagcgtcctatggatgtcacattgtacatcaaacaaccttgtgattataaaacgatcctgggaaggagcccctaactagggcaagtcagaaatagccaggctcgcagcagcgcagcgctgtgtctgctgtgtcctggggcctcccttgttccgacctgtcaattctgctgcctgtcacgcgggtggttctgcccatcgcggctgcgggtcaagcatcttcaagggaaggacggactggaggcctcaccgtggactcaactctgcattctccgtgccacattcctccagttcccacacgtagaagggaacgaaactgacgtctacctcatggggctgctgtgtgggtttgggaggcaaaaatctatgaagggttttttgaaatcccataggtgccacatctatgagatgtttgataaatgtgaatatgcttttacatttgggcttatctaatttgcaataagagagcctctctctatcaacaccagcttctctctcgggctgtttgctcagggaaggcaagaaagccacgtgctggccctctgccttctctaaagtgctgttggagcatggaggagctggaggagatggggatggactgacagctaagagggcggctgctgggactagatagtggatgaagaaagaaggacgaggaagccgtggggcagcctcttcacatggggacaggggatggagcatgaggcaagggaaggaaaagcagagcttatttttcacctaaggtggagaaggatcactttacaggcaacgctcattttaagcaacccttaagaaatgtttatgtttctttattaccaatgtaatctatgattattgaaggaaatttagaaaatgcgtagatacaaaattaaaaaaaaatactgtccacgatcctattagaggtaattaatgttagccttttggaacaaggctgtcacctattttgccaacacgtgaattcaaaacatgaaccggtttgcttttggagaatctgaagactccagtttgaggaatcctttgcttccctggaggtagatgctgtctgcaaatctagaatgacagcaggagtccagtcaagaggtcctgtcaggccaaggccagaaagaagggaggacaatccctggggccagatgcccagtgtgaggggaggcatgatctgtcccatggctgtggccactgcaggaaggtctgtgaaaaggaggtgacaggcccagtcacctcctcttcacccaagtgattgctccttcaactgctatctgtgaaaatagcctttgttatgaagaaattgactctctctctctttttttttttttggagttgcctaggctggagtgcaatggtacgatctcagctcactgcaacctccacctcccaggttcaattgattctcctgcctcagcctcctgagtagctgggattacaggcatgtgccaccacacccggctaatttttgtatttttattagagacagggtttcaccacgttagccaggctcgtctcgaactcctgtcctcaggtgactacccgtctcggcctcccaaagtgctgggattacaggcatgagccaccacacccggccaaaaatggattctctatgtcataaattaaagaaatctataaatgtattcctgtgtggcacatcttcttacagatttacatttgcagcaaatacagagtctgttttatttaagtgagggatgactgaactctgagtggaacaagctcttggacatgttaccatccttcctcctccttctcacatttcctcagcaattgtggatagagagatcagtgtgctgtaggccctggttttttttttttttttttttttttttttttagatggagtctccttctgttacccaggctggagtgcagtggcacgatcttggctcactgcaacctctgcctcccgggttcaagcaattctctgcctcagcctcccaagtagctgggattacaggcgcccccaccatgcctggctaatttttgtatttttagtagagacctggtttcaccatcttggccttgaactcctgaccttgtgatccactggccttggcctctcaaagttctgggattacaggtgtgagccatcgtacccggcagccctggtttcttcttagttttattggtctgtgttttgatcagcacagtcacttttttgttctctttcctggtaagcagggagtcaaaacaatagcaagaaaatgccagaaatagaatttctactactttgtaaactctaggctcgtgggtctcctagctctcagtacctggctcactgtaggatgggtagatgggtgaatgaatggataaagaaaggaagtttgttcaccggagaggagatgaatttcagtaagtttcatgtaacagtgatcaggagaaataaaggcagttataactgtg

SEQ ID NO: 16384 - DNA, 1652 bp, Homo sapiens
  source 1..1652: mol_type = unassigned DNA
agtgaacttctgatagggtcttatttatgttgctcaaatgtttacataataacttgtgccaaaaatatagtgctcatgcttttcagttctcacccagaaatgtcctgtggcttctagttgtgtgcctgagatcagataataaaagaccatgccttgaattctctcagctaagtgtaaaggattccttcagagatttatttattccgagaatagagaccattctgatgatgtatacaaggaacaacctaaactgtgctgagccactgtttgaacaaaataactcacttaatgttaatttcaacacacaaaagaaaacagtctggcttattcacggatacagaccagtaggctccatcccattatggcttcagaacttcgtaaggattttgctgaatgaagaagatatgaatgtaattgtagtagactggagccggggtgctacaacttttatttataatagagcagttaaaaacaccagaaaagttgctgtgagtttgagtgtgcacattaaaaatcttttgaagcatggtgcatctcttgacaattttcatttcataggtgtgagcttaggggctcatatcagtggatttgttggaaagatatttcatggtcaacttggaagaataacaggtcttgaccctgctgggccaaggttctccagaaaaccaccatatagcagattagattacacggatgcaaagtttgtggatgtcatccattctgactccaatggtttaggcattcaagagcccttgggacatatagatttttatccaaatggaggaaataaacaacctggctgtcctaaatcaattttctcaggaattcaattcattaaatgcaaccaccagagagcagttcacttgttcatggcatctttagaaacaaactgcaattttatttcatttccttgtcgttcatacaaagattacaagactagcttatgtgtggactgtgactgttttaaggaaaaatcatgtcctcggctgggttatcaagccaagctatttaaaggtgttttaaaagaaaggatggaaggaagacctcttaggaccactgtgtttttggatacaagtggtacatatccattctgtacctattattttgttctcagtataattgttccagataaaactatgatggatggctcgttttcatttaaattattaaatcagcttggaatgattgaagagccaaggctttatgaaaagaacaaaccattttataaacttcaagaagtcaagattcttgctcaattttataatgactttgtaaatatttcaagcattggtttgacatatttccagagctcaaatctgcagtgttccacatgcacatacaagatccagagactcatgttaaaatcacttacatacccagaaagaccaccactttgcaggtataatattgtacttaaagacagagaggaagtgtttcttaatccaaacacatgtacaccaaagaacacataagatgccttcttccatcaaatgcacttgcttgtgaattaatggacttgtaaatgaaacaatgcaatcagtcttttataatgcactgttcaatttgagattcaagtatttctatttcttggaaaaaattttaagaatcaaaaataaagaaaataaaaaatgcatacagttaaacattccaaa

SEQ ID NO: 16385 - DNA, 1546 bp, Homo sapiens
  source 1..1546: mol_type = unassigned DNA
ggtcttatttatgttgctcaaatgtttacataataacttgtgccaaaaatatagtgctcatgcttttcagttctcacccagaaatgtcctgtggcttctagttgtgtgcctgagatcagataataaaagaccatgccttgaattctctcagctaagtgtaaaggattccttcagagatttatttattccgagaatagagaccattctgatgatgtatacaaggaacaacctaaactgtgctgagccactgtttgaacaaaataactcacttaatgttaatttcaacacacaaaagaaaacagtctggcttattcacggatacagaccagtaggctccatcccattatggcttcagaacttcgtaaggattttgctgaatgaagaagatatgaatgtaattgtagtagactggagccggggtgctacaacttttatttataatagagcagttaaaaacaccagaaaagttgctgtgagtttgagtgtgcacattaaaaatcttttgaagcatggtgcatctcttgacaattttcatttcataggtgtgagcttaggggctcatatcagtggatttgttggaaagatatttcatggtcaacttggaagaataacaggtcttgaccctgctgggccaaggttctccagaaaaccaccatatagcagattagattacacggatgcaaagtttgtggatgtcatccattctgactccaatggaattcaattcattaaatgcaaccaccagagagcagttcacttgttcatggcatctttagaaacaaactgcaattttatttcatttccttgtcgttcatacaaagattacaagactagcttatgtgtggactgtgactgttttaaggaaaaatcatgtcctcggctgggttatcaagccaagctatttaaaggtgttttaaaagaaaggatggaaggaagacctcttaggaccactgtgtttttggatacaagtggtacatatccattctgtacctattattttgttctcagtataattgttccagataaaactatgatggatggctcgttttcatttaaattattaaatcagcttggaatgattgaagagccaaggctttatgaaaagaacaaaccattttataaacttcaagaagtcaagattcttgctcaattttataatgactttgtaaatatttcaagcattggtttgacatatttccagagctcaaatctgcagtgttccacatgcacatacaagatccagagactcatgttaaaatcacttacatacccagaaagaccaccactttgcaggtataatattgtacttaaagacagagaggaagtgtttcttaatccaaacacatgtacaccaaagaacacataagatgccttcttccatcaaatgcacttgcttgtgaattaatggacttgtaaatgaaacaatgcaatcagtcttttataatgcactgttcaatttgagattcaagtatttctatttcttggaaaaaattttaagaatcaaaaataaagaaaataaaaaatgcatacagttaaacattccaaa

SEQ ID NO: 16386 - DNA, 421 bp, Homo sapiens
  source 1..421: mol_type = unassigned DNA
ttataatagagcagttaaaaacaccagaaaagttgctgtgagtttgagtgtgcacattaaaaatcttttgaagcatggtgcatctcttgacaattttcatttcataggtgtgagcttaggggctcatatcagtggatttgttggaaagatatttcatggtcaacttggaagaataacaggtcttgaccctgctgggccaaggttctccagaaaaccaccatatagcagattagattacacggatgcaaagtttgtggatgtcatccattctgactccaatggaattcaattcattaaatgcaaccaccagagagcagttcacttgttcatggcatctttagaaacaaactgcaattttatttcatttccttgtcgttcatacaaagattacaagactagcttatgtgtggactgtgactgt

SEQ ID NO: 16387 - DNA, 1563 bp, Homo sapiens
  source 1..1563: mol_type = unassigned DNA
atgagagtatacatttttctttgtttgatgtgctgggtgagatctgataataaaagaccatgccttgaattctctcagctaagtgtaaaggattccttcagagatttatttattccgagaatagagaccattctgatgatgtatacaaggaacaacctaaactgtgctgagccactgtttgaacaaaataactcacttaatgttaatttcaacacacaaaagaaaacagtctggcttattcacggatacagaccagtaggctccatcccattatggcttcagaacttcgtaaggattttgctgaatgaagaagatatgaatgtaattgtagtagactggagccggggtgctacaacttttatttataatagagcagttaaaaacaccagaaaagttgctgtgagtttgagtgtgcacattaaaaatcttttgaagcatggtgcatctcttgacaattttcatttcataggtgtgagcttaggggctcatatcagtggatttgttggaaagatatttcatggtcaacttggaagaataacaggtcttgaccctgctgggccaaggttctccagaaaaccaccatatagcagattagattacacggatgcaaagtttgtggatgtcatccattctgactccaatggtttaggcattcaagagcccttgggacatatagatttttatccaaatggaggaaataaacaacctggctgtcctaaatcaattttctcaggaattcaattcattaaatgcaaccaccagagagcagttcacttgttcatggcatctttagaaacaaactgcaattttatttcatttccttgtcgttcatacaaagattacaagactagcttatgtgtggactgtgactgttttaaggaaaaatcatgtcctcggctgggttatcaagccaagctatttaaaggtgttttaaaagaaaggatggaaggaagacctcttaggaccactgtgtttttggatacaagtggtacatatccattctgtacctattattttgttctcagtataattgttccagataaaactatgatggatggctcgttttcatttaaattattaaatcagcttggaatgattgaagagccaaggctttatgaaaagaacaaaccattttataaacttcaagaagtcaagattcttgctcaattttataatgactttgtaaatatttcaagcattggtttgacatatttccagagctcaaatctgcagtgttccacatgcacatacaagatccagagactcatgttaaaatcacttacatacccagaaagaccaccactttgcaggtataatattgtacttaaagacagagaggaagtgtttcttaatccaaacacatgtacaccaaagaacacataagatgccttcttccatcaaatgcacttgcttgtgaattaatggacttgtaaatgaaacaatgcaatcagtcttttataatgcactgttcaatttgagattcaagtatttctatttcttggaaaaaattttaagaatcaaaaataaagaaaataaaaaatgcatacagttaaacattccaaa

SEQ ID NO: 16388 - DNA, 5384 bp, Homo sapiens
  source 1..5384: mol_type = unassigned DNA
ccgcccccgaaggcgagctgcgctgacagccggcggcgggctgggtgtttgcaatacaaaggcggccacgcgcggcgccgctcggtgcagaccatgaattacgtggggcagttagccggccaggtgtttgtcaccgtgaaggagctctacaaggggctgaatcccgccacactctcagggtgcattgacatcattgtcatccgccagcccaatggaaacctccaatgctcccctttccacgtccgctttgggaagatgggggtcctgcgctcccgagagaaagtggttgacatagaaatcaatggggaatctgtggatttgcatatgaaattgggagataatggagaagcattttttgttcaagaaacagataatgatcaggaagttatccctatgcacctggccacctcccccatcctgtcagaaggagcttcgagaatggaatgccagctgaaaaggggctctgtggacaggatgagaggcctggaccccagcacgccagcccaagtgatcgctcccagcgagacgccgtcaagcagctctgtagtaaagaagagaagaaaaaggaggagaaagtcacagctggacagcctgaagagagatgacaacatgaacacatctgaggatgaggacatgttccccatcgagatgagctcggatgaggccatggagctgctggagagcagcagaactcttcctaatgatatacctccattccaagatgatattcctgaggaaaacctctccctggctgtgatttaccctcagtcagcctcataccctaattcggatagagagtggtcacccactcccagtccttccggttcccgaccttcaacacctaaaagtgattcagaattggtcagcaagtccacggaaaggacagggcagaagaacccagaaatgctttggctgtggggagagctgccgcaggctgctaagtcttcttctccacacaagatgaaagagtccagcccattgagcagtagaaaaatttgtgataaaagtcactttcaggccattcacagcgaatcttcagacacttttagtgaccaatcgccaactctggtcggtggggcacttttggaccagaacaagcctcagacagaaatgcagtttgtgaatgaagaagacctggagaccttaggagcagcagcgccactcttgcccatgatcgaggagctcaaacccccctctgccagtgtagtccagacagcaaacaagacggattctccttccaggaaaagagataaacgaagccgacatcttggtgctgacggcgtctacttggatgacctcacagacatggatcctgaagtggcggccctgtattttcccaaaaacggagatccttccggactcgcaaaacatgcaagcgacaacggagcccggtcagccaaccagtccccgcagtcggtgggcagctcgggcgtggacagtggcgtggagagcacctcggacgggctgagggacctcccttccatcgccatctccctctgcgggggcctcagcgaccaccgggagatcacgaaagatgcattcctggagcaagctgtgtcatatcaacagtttgtggacaaccccgctattatcgatgaccccaatctcgtggtaaagattgggagtaaatattataactggacaacagcagcacccctcctcctggcaatgcaggccttccagaaacctttgccaaaggccactgtggaatctatcatgagggataaaatgcccaaaaagggaggaagatggtggttttcatggaggggaagaaacaccacaatcaaggaggaaagtaagccagagcagtgcttggctggcaaggcccatagcaccggagagcaaccgccgcagctcagcttggccaccagggtaaagcatgaatcatcctccagtgatgaggagcgcgcagctgccaagccatcaaacgcaggccacctccctcttctgcctaatgtcagctacaagaagactctccggctgacttccgagcagcttaaaagcttgaagttgaagaatggccccaacgacgtggttttcagtgtcaccacgcagtaccaaggcacgtgccgctgtgagggcaccatctatctgtggaactgggatgataaagtcatcatttctgatattgatgggacaattaccagatcagatactcttggccacattttgcccacccttgggaaggattggacccatcagggcatcgctaagctgtaccataaagtgagccagaatggatataaatttctctactgttctgcccgtgccatcgggatggcggacatgacgcggggctacctgcactgggtcaacgagaggggcacggtgctgccccaggggcccctgctgctgagtcccagcagcctcttctctgccctgcacagagaagtgattgaaaagaagccagaaaagtttaaagtccagtgtttgacagacatcaaaaacctgtttttccccaacacagaacccttttatgctgcttttggaaaccgaccagctgatgtgtattcatacaagcaagtaggagtgtctttgaatagaatatttaccgtcaaccctaaaggagagctggtacaggaacatgcaaagaccaacatctcttcgtatgtgagactctgtgaagtagtcgaccacgttttcccgttgctgaaaagaagccattcttcagactttccctgttcggataccttcagtaacttcaccttttggagagagccactgccaccttttgaaaaccaggacattcattctgcctcagcgtaaaatgtcccaagcagcctcttgccagcagtgcagagcctggttgtcacccattaaaggataggtctccccggagtgcacagctccacctgggagcctggcgcgtcatcattggcctgacagcagagagaattgagaagcatttctcccctgccccaccccggggctgacatttctaagcaagataggaagggagcactttctaggctaggagttgggtgcatttgtaccgtgaaaagcattcctcagttgtggcttaatgccagttacgacgctgcctttccggcctgctccagcaagtagctactggttcacgtgcagtttggggctgtgaaacctaggcagaaggcggctgtctgagggctgtccccgcctaggacagggtcaatcgaggaatgccagatgtgcacggtttttggcaaagtagggggcacatttccattatagcaatgttagtgccaccaccttctgaacacagtggggagggctgtgaaggctcatgtgacctggatctgaggtctctgatagaaatctggacgccaccgggtccaggcctggcctcagacttggccttgtggatgggccccttacagtatttgctgactagtctcatttttaggtgataaatttttctttaattcctttggttaaagatagtctatttcattggcatatctccccccagtttttgtggctcaaggctggaatatttatgccttaatatatctatggcagacatttaagaatgcgctttatctagctcatggtaactttgcaacgccttagattaaaatgacagtaaatattactaaggcagtattttgaatgagtttgacactgccggcttccttccatccagcgaggtggtgctgacagtgtggacttgagcacacttatgccaaatgataatgatactgacttctgttgggagctctccaaagaaactggttggttttaagaaaatagtttcaagaagttcaactatattcttttagatattatgtattgttttactctgattaggttactgtgataggcatttattcatattctttctataccactgtcattaatatattaaaaagatgtatgtgttagactatcgaaagggccttattctctctttctcatagactgaccttcttttggaatttctgagtcatttattttccttagctttttccactcaaattaagggcaagcgaaaaagtaataatttggcattctttaagcctacagaatgtgattctttcacttgtttattacactggctcgtggacagaacaatttgaaaagtgaaagaattattttggtaaaagattttgctttacttttcgaagcattatttttttaaagagtgttttactccaacgattgaaacattttcctatttaaatttcattgttagaatcacaggaggcaaaaaatggaacggttgaatgaaattttactctttctgtgaaagaaaatccacagagttgttgcctccgttgtagttggtgggccccgttagcattggatgcctttgccaaatggttcatgtggacacacaaaggcaaacagatctgccatcgatcgcagatttctgtagaaacacggatgtgcatgtgcagattcccttttgcaggtattaaaaataattaaaaatagtcctgcctgaggttgcagtgagccgagcttgcactactgcactccagcctgggtgacagagtaagactccatgtcaaaaaaaaaaaaaaaaaaaaaaaagtcctgccttaactaactcctctgcgcttgttcactagtaacctaaagaggctatattcattctttatgcaatgagggtatttttgagtgaattttaactgctctgaactaagtataagctcatgggcctgcaaaggttcagacggtttctcctttgcacccaggaggaactttggctgcgagaatggggggatgtatccctcatgcagttggcatccaggcagccctctgcagcagcacaccctgcaggcggagttttcagaggatgcaattttggatcccgaattttgatgtaccttaaacttccacatcactgcaccctgaaacagagcatgctttccagaaagtcacactctcagatctgtgtcaagttcaatgtgagccctggcaaggctggcatattaacacctgccttctggcttctgaaagtgagatttgtatatgggctgcactcacgcatatacgagttggtttatctttgtgtacatgactataacccagtgatgctgaggtcatgtgctggaatgctgtatttggaccacacatttcaaagttgccctatggaaatgaatcctacttagtgacaagtcatcaaatgtttgtcacatgtgatgaagacaaatatgtatacctggcatagagaaaaatatatacctggtacattggagaaaaataattacactttcaaagagaattccctttgcaattttatgtttggatcaccactgtaagcacactttatttgcatttgatctgtatttgtatatgctgatgcaatgataaaaatcactgtaatacttcattgtgttgtactggatgcaaagctagaaaatattgcaataaatgagaccgatgaaagacttctctgaaaa

SEQ ID NO: 16389 - DNA, 4005 bp, Homo sapiens
  source 1..4005: mol_type = unassigned DNA
ctttttggtctgtctgaattccctcagtgacggtcggcagaaagcgcatctgtgtttgtgcacgagacctttggagaagggttgctgtggcctgaacgggcagcatttatggtggtggcctgtttgctgttggggagggacttgcagcagactttctcgtagggctgggctccttatgcgtgagttgcacgcctgagtgcctctatgggttttgtggctcgtggcttttatgaagggaccagaatgttaggaactctggagttgggaattgctgcaggagaaccgtgttccgcatttcgttcttctagagcagagtccttccggttcccgaccttcaacacctaaaagtgattcagaattggtcagcaagtccacggaaaggacagggcagaagaacccagaaatgctttggctgtggggagagctgccgcaggctgctaagtcttcttctccacacaagatgaaagagtccagcccattgagcagtagaaaaatttgtgataaaagtcactttcaggccattcacagcgaatcttcagacacttttagtgaccaatcgccaactctggtcggtggggcacttttggaccagaacaagcctcagacagaaatgcagtttgtgaatgaagaagacctggagaccttaggagcagcagcgccactcttgcccatgatcgaggagctcaaacccccctctgccagtgtagtccagacagcaaacaagacggattctccttccaggaaaagagataaacgaagccgacatcttggtgctgacggcgtctacttggatgacctcacagacatggatcctgaagtggcggccctgtattttcccaaaaacggagatccttccggactcgcaaaacatgcaagcgacaacggagcccggtcagccaaccagtccccgcagtcggtgggcagctcgggcgtggacagtggcgtggagagcacctcggacgggctgagggacctcccttccatcgccatctccctctgcgggggcctcagcgaccaccgggagatcacgaaagatgcattcctggagcaagctgtgtcatatcaacagtttgtggacaaccccgctattatcgatgaccccaatctcgtggtaaagattgggagtaaatattataactggacaacagcagcacccctcctcctggcaatgcaggccttccagaaacctttgccaaaggccactgtggaatctatcatgagggataaaatgcccaaaaagggaggaagatggtggttttcatggaggggaagaaacaccacaatcaaggaggaaagtaagccagagcagtgcttggctggcaaggcccatagcaccggagagcaaccgccgcagctcagcttggccaccagggtaaagcatgaatcatcctccagtgatgaggagcgcgcagctgccaagccatcaaacgcaggccacctccctcttctgcctaatgtcagctacaagaagactctccggctgacttccgagcagcttaaaagcttgaagttgaagaatggccccaacgacgtggttttcagtgtcaccacgcagtaccaaggcacgtgccgctgtgagggcaccatctatctgtggaactgggatgataaagtcatcatttctgatattgatgggacaattaccagatcagatactcttggccacattttgcccacccttgggaaggattggacccatcagggcatcgctaagctgtaccataaagtgagccagaatggatataaatttctctactgttctgcccgtgccatcgggatggcggacatgacgcggggctacctgcactgggtcaacgagaggggcacggtgctgccccaggggcccctgctgctgagtcccagcagcctcttctctgccctgcacagagaagtgattgaaaagaagccagaaaagtttaaagtccagtgtttgacagacatcaaaaacctgtttttccccaacacagaacccttttatgctgcttttggaaaccgaccagctgatgtgtattcatacaagcaagtaggagtgtctttgaatagaatatttaccgtcaaccctaaaggagagctggtacaggaacatgcaaagaccaacatctcttcgtatgtgagactctgtgaagtagtcgaccacgttttcccgttgctgaaaagaagccattcttcagactttccctgttcggataccttcagtaacttcaccttttggagagagccactgccaccttttgaaaaccaggacattcattctgcctcagcgtaaaatgtcccaagcagcctcttgccagcagtgcagagcctggttgtcacccattaaaggataggtctccccggagtgcacagctccacctgggagcctggcgcgtcatcattggcctgacagcagagagaattgagaagcatttctcccctgccccaccccggggctgacatttctaagcaagataggaagggagcactttctaggctaggagttgggtgcatttgtaccgtgaaaagcattcctcagttgtggcttaatgccagttacgacgctgcctttccggcctgctccagcaagtagctactggttcacgtgcagtttggggctgtgaaacctaggcagaaggcggctgtctgagggctgtccccgcctaggacagggtcaatcgaggaatgccagatgtgcacggtttttggcaaagtagggggcacatttccattatagcaatgttagtgccaccaccttctgaacacagtggggagggctgtgaaggctcatgtgacctggatctgaggtctctgatagaaatctggacgccaccgggtccaggcctggcctcagacttggccttgtggatgggccccttacagtatttgctgactagtctcatttttaggtgataaatttttctttaattcctttggttaaagatagtctatttcattggcatatctccccccagtttttgtggctcaaggctggaatatttatgccttaatatatctatggcagacatttaagaatgcgctttatctagctcatggtaactttgcaacgccttagattaaaatgacagtaaatattactaaggcagtattttgaatgagtttgacactgccggcttccttccatccagcgaggtggtgctgacagtgtggacttgagcacacttatgccaaatgataatgatactgacttctgttgggagctctccaaagaaactggttggttttaagaaaatagtttcaagaagttcaactatattcttttagatattatgtattgttttactctgattaggttactgtgataggcatttattcatattctttctataccactgtcattaatatattaaaaagatgtatgtgttagactatcgaaagggccttattctctctttctcatagactgaccttcttttggaatttctgagtcatttattttccttagctttttccactcaaattaagggcaagcgaaaaagtaataatttggcattctttaagcctacagaatgtgattctttcacttgtttattacactggctcgtggacagaacaatttgaaaagtgaaagaattattttggtaaaagattttgctttacttttcgaagcattatttttttaaagagtgttttactccaacgattgaaacattttcctatttaaatttcattgttagaatcacaggaggcaaaaaatggaacggttgaatgaaattttactctttctgtgaaagaaaatccacagagttgttgcctccgttgtagttggtgggccccgttagcattggatgcctttgccaaatggttcatgtggacacacaaaggcaaacagatctgccatcgatcgcagatttctgtagaaacacggatgtgcatgtgcagattcccttttgcaggtattaaaaataattaaaaatagtcctgcctgaggttgcagtgagccgagcttgcactactgcactccagcctgggtgacagagtaagactccatgtcaaaaaaaaaaaaaaaaa

SEQ ID NO: 16390 - DNA, 3233 bp, Homo sapiens
  source 1..3233: mol_type = unassigned DNA
agcaagctggagagggagagaggatgggaggcgaggaggcagcctgagggaaggaacaggagggaagagagatgaagggcaagaccggggccagccatgcctgtcctaacagcagccacccagcagtggcccagcctgctgagaactagaaaatcagaagaaaaaggagaatccaccaggagacccaggttcgcatgagcaggggcctttatctgaagttaatggaagctgagccaggtcctgacaatgtgccttctgatggggagatgagactttcctctgaaagctaaggtaactctgaagcgtgagctgccagaattcaaggccacctgcttaacagaagacaactagaaacctcatccatgagcagagtgcagaccatgaattacgtggggcagttagccggccaggtgtttgtcaccgtgaaggagctctacaaggggctgaatcccgccacactctcagggtgcattgacatcattgtcatccgccagcccaatggaaacctccaatgctcccctttccacgtccgctttgggaagatgggggtcctgcgctcccgagagaaagtggttgacatagaaatcaatggggaatctgtggatttgcatatgaaattgggagataatggagaagcattttttgttcaagaaacagataatgatcaggaagttatccctatgcacctggccacctcccccatcctgtcagaaggagcttcgagaatggaatgccagctgaaaaggggctctgtggacaggatgagaggcctggaccccagcacgccagcccaagtgatcgctcccagcgagacgccgtcaagcagctctgtagtaaagaagagaagaaaaaggaggagaaagtcacagctggacagcctgaagagagatgacaacatgaacacatctgaggatgaggacatgttccccatcgagatgagctcggatgaggccatggagctgctggagagcagcagaactcttcctaatgatatacctccattccaagatgatattcctgaggaaaacctctccctggctgtgatttaccctcagtcagcctcataccctaattcggatagagagtggtcacccactcccagtagcctggtagattgcaaaaggactgcccctcatcttgcagttgcggccgagggaggtctgtctagttcttgccctccacagtcttccctgttccatccttcggaaagtccttccggttcccgaccttcaacacctaaaagtgattcagaattggtcagcaagtccacggaaaggacagggcagaagaacccagaaatgctttggctgtggggagagctgccgcaggctgctaagtcttcttctccacacaagatgaaagagtccagcccattgagcagtagaaaaatttgtgataaaagtcactttcaggccattcacagcgaatcttcagacacttttagtgaccaatcgccaactctggtcggtggggcacttttggaccagaacaagcctcagacagaaatgcagtttgtgaatgaagaagacctggagaccttaggagcagcagcgccactcttgcccatgatcgaggagctcaaacccccctctgccagtgtagtccagacagcaaacaagacggattctccttccaggaaaagagataaacgaagccgacatcttggtgctgacggcgtctacttggatgacctcacagacatggatcctgaagtggcggccctgtattttcccaaaaacggagatccttccggactcgcaaaacatgcaagcgacaacggagcccggtcagccaaccagtccccgcagtcggtgggcagctcgggcgtggacagtggcgtggagagcacctcggacgggctgagggacctcccttccatcgccatctccctctgcgggggcctcagcgaccaccgggagatcacgaaagatgcattcctggagcaagctgtgtcatatcaacagtttgtggacaaccccgctattatcgatgaccccaatctcgtggtaaagattgggagtaaatattataactggacaacagcagcacccctcctcctggcaatgcaggccttccagaaacctttgccaaaggccactgtggaatctatcatgagggataaaatgcccaaaaagggaggaagatggtggttttcatggaggggaagaaacaccacaatcaaggaggaaagtaagccagagcagtgcttggctggcaaggcccatagcaccggagagcaaccgccgcagctcagcttggccaccagggtaaagcatgaatcatcctccagtgatgaggagcgcgcagctgccaagccatcaaacgcaggccacctccctcttctgcctaatgtcagctacaagaagactctccggctgacttccgagcagcttaaaagcttgaagttgaagaatggccccaacgacgtggttttcagtgtcaccacgcagtaccaaggcacgtgccgctgtgagggcaccatctatctgtggaactgggatgataaagtcatcatttctgatattgatgggacaattaccagatcagatactcttggccacattttgcccacccttgggaaggattggacccatcagggcatcgctaagctgtaccataaagtgagccagaatggatataaatttctctactgttctgcccgtgccatcgggatggcggacatgacgcggggctacctgcactgggtcaacgagaggggcacggtgctgccccaggggcccctgctgctgagtcccagcagcctcttctctgccctgcacagagaagtgattgaaaagaagccagaaaagtttaaagtccagtgtttgacagacatcaaaaacctgtttttccccaacacagaacccttttatgctgcttttggaaaccgaccagctgatgtgtattcatacaagcaagtaggagtgtctttgaatagaatatttaccgtcaaccctaaaggagagctggtacaggaacatgcaaagaccaacatctcttcgtatgtgagactctgtgaagtagtcgaccacgttttcccgttgctgaaaagaagccattcttcagactttccctgttcggataccttcagtaacttcaccttttggagagagccactgccaccttttgaaaaccaggacattcattctgcctcagcgtaaaatgtcccaagcagcctcttgccagcagtgcagagcctggttgtcacccattaaaggataggtctccccgga

SEQ ID NO: 16391 - DNA, 1439 bp, Homo sapiens
  source 1..1439: mol_type = unassigned DNA
gatgcattcctggagcaagctgtgtcatatcaacagtttgtggacaaccccgctattatcgatgaccccaatctcgtggtaaagattgggagtaaatattataactggacaacagcagcacccctcctcctggcaatgcaggccttccagaaacctttgccaaagtcttcatgcttaagttaccttcatgtaattttggacgccattaggttttgcttctctaaaatttttaacgcacaaatagccactgtggaatctatcatgagggataaaatgcccaaaaagggaggaagatggtggttttcatggaggggaagaaacaccacaatcaaggaggaaagtaagccagagcagtgcttggctggcaaggcccatagcaccggagagcaaccgccgcagctcagcttggccaccagggtaaagcatgaatcatcctccagtgatgaggagcgcgcagctgccaagccatcaaacgcaggccacctccctcttctgcctaatgtcagctacaagaagactctccggctgacttccgagcagcttaaaagcttgaagttgaagaatggccccaacgacgtggttttcagtgtcaccacgcagtaccaaggcacgtgccgctgtgagggcaccatctatctgtggaactgggatgataaagtcatcatttctgatattgatgggacaattaccagatcagatactcttggccacattttgcccacccttgggaaggattggacccatcagggcatcgctaagctgtaccataaagtgagccagaatggatataaatttctctactgttctgcccgtgccatcgggatggcggacatgacgcggggctacctgcactgggtcaacgagaggggcacggtgctgccccaggggcccctgctgctgagtcccagcagcctcttctctgccctgcacagagaagtgattgaaaagaagccagaaaagtttaaagtccagtgtttgacagacatcaaaaacctgtttttccccaacacagaacccttttatgctgcttttggaaaccgaccagctgatgtgtattcatacaagcaagtaggagtgtctttgaatagaatatttaccgtcaaccctaaaggagagctggtacaggaacatgcaaagaccaacatctcttcgtatgtgagactctgtgaagtagtcgaccacgttttcccgttgctgaaaagaagccattcttcagactttccctgttcggataccttcagtaacttcaccttttggagagagccactgccaccttttgaaaaccaggacattcattctgcctcagcgtaaaatgtcccaagcagcctcttgccagcagtgcagagcctggttgtcacccattaaaggataggtctccccggagtgcacagctccacctgggagcctggcgcgtcatcattggcctgacagcagagaga

SEQ ID NO: 16392 - DNA, 477 bp, Homo sapiens
  source 1..477: mol_type = unassigned DNA
gcaatacaaaggcggccacgcgcggcgccgctcgtatttgcaaccacgtggcttcacgagtccgccaaaccatcaggtgaataaacgggagaggagaagagagtctaggactcagccctggagtataagtcagagctggaaaagaagaggctccagagactggacggccactgagaggtgccacgtccctgaagggcctgaggagggttgatggcatgaccccatgaagcccagcaaggagtggagagaggagggctggaggactcccgcctgccatgacccagtccagggataagattggcacgatctcagctcactgcagcctccacctcctgggttcaagtgatcttcccacctcagcctcccaagtagctgggactacaggtgcagaccatgaattacgtggggcagttagccggccaggtgtttgtcaccgtgaaggagctctacaaggggctgaatcccgccacactctca

SEQ ID NO: 16393 - DNA, 3051 bp, Homo sapiens
  source 1..3051: mol_type = unassigned DNA
aagctggagagggagagaggatgggaggcgaggaggcagcctgagggaaggaacaggagggaagagagatgaagggcaagaccggggccagccatgcctgtcctaacagcagccacccagcagtggcccagcctgctgagaactagaaaatcagaagaaaaaggagaatccaccaggagacccaggtaactctgaagcgtgagctgccagaattcaaggccacctgcttaacagaagacaactagaaacctcatccatgagcagagtgcagaccatgaattacgtggggcagttagccggccaggtgtttgtcaccgtgaaggagctctacaaggggctgaatcccgccacactctcagggtgcattgacatcattgtcatccgccagcccaatggaaacctccaatgctcccctttccacgtccgctttgggaagatgggggtcctgcgctcccgagagaaagtggttgacatagaaatcaatggggaatctgtggatttgcatatgaaattgggagataatggagaagcattttttgttcaagaaacagataatgatcaggaagttatccctatgcacctggccacctcccccatcctgtcagaaggagcttcgagaatggaatgccagctgaaaaggggctctgtggacaggatgagaggcctggaccccagcacgccagcccaagtgatcgctcccagcgagacgccgtcaagcagctctgtagtaaagaagagaagaaaaaggaggagaaagtcacagctggacagcctgaagagagatgacaacatgaacacatctgaggatgaggacatgttccccatcgagatgagctcggatgaggccatggagctgctggagagcagcagaactcttcctaatgatatacctccattccaagatgatattcctgaggaaaacctctccctggctgtgatttaccctcagtcagcctcataccctaattcggatagagagtggtcacccactcccagtccttccggttcccgaccttcaacacctaaaagtgattcagaattggtcagcaagtccacggaaaggacagggcagaagaacccagaaatgctttggctgtggggagagctgccgcaggctgctaagtcttcttctccacacaagatgaaagagtccagcccattgagcagtagaaaaatttgtgataaaagtcactttcaggccattcacagcgaatcttcagacacttttagtgaccaatcgccaactctggtcggtggggcacttttggaccagaacaagcctcagacagaaatgcagtttgtgaatgaagaagacctggagaccttaggagcagcagcgccactcttgcccatgatcgaggagctcaaacccccctctgccagtgtagtccagacagcaaacaagacggattctccttccaggaaaagagataaacgaagccgacatcttggtgctgacggcgtctacttggatgacctcacagacatggatcctgaagtggcggccctgtattttcccaaaaacggagatccttccggactcgcaaaacatgcaagcgacaacggagcccggtcagccaaccagtccccgcagtcggtgggcagctcgggcgtggacagtggcgtggagagcacctcggacgggctgagggacctcccttccatcgccatctccctctgcgggggcctcagcgaccaccgggagatcacgaaagatgcattcctggagcaagctgtgtcatatcaacagtttgtggacaaccccgctattatcgatgaccccaatctcgtggtaaagattgggagtaaatattataactggacaacagcagcacccctcctcctggcaatgcaggccttccagaaacctttgccaaaggccactgtggaatctatcatgagggataaaatgcccaaaaagggaggaagatggtggttttcatggaggggaagaaacaccacaatcaaggaggaaagtaagccagagcagtgcttggctggcaaggcccatagcaccggagagcaaccgccgcagctcagcttggccaccagggtaaagcatgaatcatcctccagtgatgaggagcgcgcagctgccaagccatcaaacgcaggccacctccctcttctgcctaatgtcagctacaagaagactctccggctgacttccgagcagcttaaaagcttgaagttgaagaatggccccaacgacgtggttttcagtgtcaccacgcagtaccaaggcacgtgccgctgtgagggcaccatctatctgtggaactgggatgataaagtcatcatttctgatattgatgggacaattaccagatcagatactcttggccacattttgcccacccttgggaaggattggacccatcagggcatcgctaagctgtaccataaagtgagccagaatggatataaatttctctactgttctgcccgtgccatcgggatggcggacatgacgcggggctacctgcactgggtcaacgagaggggcacggtgctgccccaggggcccctgctgctgagtcccagcagcctcttctctgccctgcacagagaagtgattgaaaagaagccagaaaagtttaaagtccagtgtttgacagacatcaaaaacctgtttttccccaacacagaacccttttatgctgcttttggaaaccgaccagctgatgtgtattcatacaagcaagtaggagtgtctttgaatagaatatttaccgtcaaccctaaaggagagctggtacaggaacatgcaaagaccaacatctcttcgtatgtgagactctgtgaagtagtcgaccacgttttcccgttgctgaaaagaagccattcttcagactttccctgttcggataccttcagtaacttcaccttttggagagagccactgccaccttttgaaaaccaggacattcattctgcctcagcgtaaaatgtcccaagcagcctcttgccagcagtgcagagcctggttgtcacccattaaaggataggtctccccggagtgcacagctccacctgggagcctggcgcgtc

SEQ ID NO: 16394 - DNA, 599 bp, Homo sapiens
  source 1..599: mol_type = unassigned DNA
gtttgcaatacaaaggcggccacgcgcggcgccgctcgtatttgcaaccacgtggcttcacgagtccgccaaaccatcaggtgaataaacgggagaggagaagagagtctaggactcagccctggagtataagtcagagctggaaaagaagaggctccagagactggacggccactgagaggtgccacgtccctgaagggcctgaggagggttgatggcatgaccccatgaagcccagcaaggagtggagagaggagggctggaggactcccgcctgccatgacccagtccagggataagatgtgcagaccatgaattacgtggggcagttagccggccaggtgtttgtcaccgtgaaggagctctacaaggggctgaatcccgccacactctcagggtgcattgacatcattgtcatccgccagcccaatggaaacctccaatgctcccctttccacgtccgctttgggaagatgggggtcctgcgctcccgagagaaagtggttgacatagaaatcaatggggaatctgtggatttgcatatgaaattgggagataatggagaagcattttttgttcaagaaacagataatgatcag

SEQ ID NO: 16395 - DNA, 3077 bp, Homo sapiens
  source 1..3077: mol_type = unassigned DNA
atttctctcctgatgctgggtgaggaggcagacagcaccatacagggcgggccatgggggaacaggacggcattcgcagctccagctgggagacctcgcagggcaagagctccccagactcggcttggtcatggattccaataatgagagaccctgggtggattcgaaatgtatggtcttcaaacattaacgtgcagaccatgaattacgtggggcagttagccggccaggtgtttgtcaccgtgaaggagctctacaaggggctgaatcccgccacactctcagggtgcattgacatcattgtcatccgccagcccaatggaaacctccaatgctcccctttccacgtccgctttgggaagatgggggtcctgcgctcccgagagaaagtggttgacatagaaatcaatggggaatctgtggatttgcatatgaaattgggagataatggagaagcattttttgttcaagaaacagataatgatcaggaagttatccctatgcacctggccacctcccccatcctgtcagaaggagcttcgagaatggaatgccagctgaaaaggggctctgtggacaggatgagaggcctggaccccagcacgccagcccaagtgatcgctcccagcgagacgccgtcaagcagctctgtagtaaagaagagaagaaaaaggaggagaaagtcacagctggacagcctgaagagagatgacaacatgaacacatctgaggatgaggacatgttccccatcgagatgagctcggatgaggccatggagctgctggagagcagcagaactcttcctaatgatatacctccattccaagatgatattcctgaggaaaacctctccctggctgtgatttaccctcagtcagcctcataccctaattcggatagagagtggtcacccactcccagtagcctggtagattgcaaaaggactgcccctcatcttgcagttgcggccgagggaggtctgtctagttcttgccctccacagtcttccctgttccatccttcggaaagtccttccggttcccgaccttcaacacctaaaagtgattcagaattggtcagcaagtccacggaaaggacagggcagaagaacccagaaatgctttggctgtggggagagctgccgcaggctgctaagtcttcttctccacacaagatgaaagagtccagcccattgagcagtagaaaaatttgtgataaaagtcactttcaggccattcacagcgaatcttcagacacttttagtgaccaatcgccaactctggtcggtggggcacttttggaccagaacaagcctcagacagaaatgcagtttgtgaatgaagaagacctggagaccttaggagcagcagcgccactcttgcccatgatcgaggagctcaaacccccctctgccagtgtagtccagacagcaaacaagacggattctccttccaggaaaagagataaacgaagccgacatcttggtgctgacggcgtctacttggatgacctcacagacatggatcctgaagtggcggccctgtattttcccaaaaacggagatccttccggactcgcaaaacatgcaagcgacaacggagcccggtcagccaaccagtccccgcagtcggtgggcagctcgggcgtggacagtggcgtggagagcacctcggacgggctgagggacctcccttccatcgccatctccctctgcgggggcctcagcgaccaccgggagatcacgaaagatgcattcctggagcaagctgtgtcatatcaacagtttgtggacaaccccgctattatcgatgaccccaatctcgtggtaaagattgggagtaaatattataactggacaacagcagcacccctcctcctggcaatgcaggccttccagaaacctttgccaaaggccactgtggaatctatcatgagggataaaatgcccaaaaagggaggaagatggtggttttcatggaggggaagaaacaccacaatcaaggaggaaagtaagccagagcagtgcttggctggcaaggcccatagcaccggagagcaaccgccgcagctcagcttggccaccagggtaaagcatgaatcatcctccagtgatgaggagcgcgcagctgccaagccatcaaacgcaggccacctccctcttctgcctaatgtcagctacaagaagactctccggctgacttccgagcagcttaaaagcttgaagttgaagaatggccccaacgacgtggttttcagtgtcaccacgcagtaccaaggcacgtgccgctgtgagggcaccatctatctgtggaactgggatgataaagtcatcatttctgatattgatgggacaattaccagatcagatactcttggccacattttgcccacccttgggaaggattggacccatcagggcatcgctaagctgtaccataaagtgagccagaatggatataaatttctctactgttctgcccgtgccatcgggatggcggacatgacgcggggctacctgcactgggtcaacgagaggggcacggtgctgccccaggggcccctgctgctgagtcccagcagcctcttctctgccctgcacagagaagtgattgaaaagaagccagaaaagtttaaagtccagtgtttgacagacatcaaaaacctgtttttccccaacacagaacccttttatgctgcttttggaaaccgaccagctgatgtgtattcatacaagcaagtaggagtgtctttgaatagaatatttaccgtcaaccctaaaggagagctggtacaggaacatgcaaagaccaacatctcttcgtatgtgagactctgtgaagtagtcgaccacgttttcccgttgctgaaaagaagccattcttcagactttccctgttcggataccttcagtaacttcaccttttggagagagccactgccaccttttgaaaaccaggacattcattctgcctcagcgtaaaatgtcccaagcagcctcttgccagcagtgcagagcctggttgtcacccattaaaggataggtctccccggagtgcacagctccacctgggagcct

SEQ ID NO: 16396 - DNA, 1761 bp, Homo sapiens
  source 1..1761: mol_type = unassigned DNA
agcaagctggagagggagagaggatgggaggcgaggaggcagcctgagggaaggaacaggagggaagagagatgaagggcaagaccggggccagccatgcctgtcctaacagcagccacccagcagtggcccagcctgctgagaactagaaaatcagaagaaaaaggagaatccaccaggagacccaggttcgcatgagcaggggcctttatctgaagttaatggaagctgagccaggtcctgacaatgtgccttctgatggggagatgagactttcctctgaaagctaaggtaactctgaagcgtgagctgccagaattcaaggccacctgcttaacagaagacaactagaaacctcatccatgagcagagtgcagaccatgaattacgtggggcagttagccggccaggtgtttgtcaccgtgaaggagctctacaaggggctgaatcccgccacactctcagggtgcattgacatcattgtcatccgccagcccaatggaaacctccaatgctcccctttccacgtccgctttgggaagatgggggtcctgcgctcccgagagaaagtggttgacatagaaatcaatggggaatctgtggatttgcatatgaaattgggagataatggagaagcattttttgttcaagaaacagataatgatcaggaagttatccctatgcacctggccacctcccccatcctgtcagaaggagcttcgagaatggaatgccagctgaaaaggggctctgtggacaggatgagaggcctggaccccagcacgccagcccaagtgatcgctcccagcgagacgccgtcaagcagctctgtagtaaagaagagaagaaaaaggaggagaaagtcacagctggacagcctgaagagagatgacaacatgaacacatctgaggatgaggacatgttccccatcgagatgagctcggatgaggccatggagctgctggagagcagcagaactcttcctaatgatatacctccattccaagatgatattcctgaggaaaacctctccctggctgtgatttaccctcagtcagcctcataccctaattcggatagagagtggtcacccactcccagtagcctggtagattgcaaaaggactgcccctcatcttgcagttgcggccgagggaggtctgtctagttcttgccctccacagtcttccctgttccatccttcggaaagtccttccggttcccgaccttcaacacctaaaagtgattcagaattggtcagcaagtccacggaaaggacagggcagaagaacccagaaatgctttggctgtggggagagctgccgcaggctgctaagtcttcttctccacacaagatgaaagagtccagcccattgagcagtagaaaaatttgtgataaaagtcactttcaggccattcacagcgaatcttcagacacttttagtgaccaatcgccaactctggtcggtggggcacttttggaccagaacaagcctcagacagaaatgcagtttgtgaatgaagaagacctggagaccttaggagcagcagcgccactcttgcccatgatcgaggagctcaaacccccctctgccagtgtagtccagacagcaaacaagacggattctccttccaggaaaagagataaacgaagccgacatcttggtgctgacggcgtctacttggatgacctcacagacatggatcctgaagtggcggccctgtattttcccaaaaagtaaaattcctgttaattcctca

SEQ ID NO: 16397 - DNA, 6229 bp, Homo sapiens
  source 1..6229: mol_type = unassigned DNA
gagaagaagtggcaggtgatgctgaagcgggggagaagcggcagagccggccacacagtgcaggggatggagacaggtgctgggctggtcctcctgcagcatcctcagttgttggagggcagtcatcctcaggccgtacccagccagagaagaaaaagaacagtgtgaagccacgtgtgatagccgtccaacatcggctcttccctccaattacattgtagttgattgtgtctcaaaccatgaattatgtgggacagctggctgggcaggtgattgtcactgtgaaggaactctacaagggcattaaccaggccaccctctctgggtgcattgatgtcatcgtggtacagcagcaggatggcagctatcagtgttcaccttttcacgttcggtttggaaagctgggagtcctgagatccaaagagaaagtgattgatatagaaatcaacggcagtgcagtggatcttcacatgaagttgggtgataacggagaagctttctttgttgaggagactgaagaagaatatgaaaagcttcctgcttaccttgccacctcaccaattcctactgaagatcagttctttaaagatattgacacccctttggtgaaatcgggtggagatgaaacaccatctcagagttcagacatctcacacgtcttggaaacagagacaatttttactccaagttctgtgaaaaagaaaaaacgaaggagaaagaaatacaaacaggacagtaagaaggaagagcaggccgcatctgctgctgcagaagacacatgtgatgtaggcgtgagctccgatgatgacaagggggcccaggcagcacgaggatcttcaaatgcttccttgaaagaagaagaatgtaaagagcctttgctcttccattctggggatcattaccccttatctgatggagattggtcccctttagagaccacctatccccagacagcgtgtcctaagagtgattcagagctggaggtgaaacctgcggagagcctgctcagatcagagtctcacatggagtggacgtggggcggattcccagagtccaccaaggtcagcaaaagagaacgatctgaccatcatcctaggacagctacaattacaccatcagaaaatactcattttcgggtaattcccagtgaggacaacctcatcagtgaagttgagaaggatgcttccatggaagacactgtctgtaccatagtgaagcccaaacccagagccctgggtacacagatgagcgacccaacatctgtggcagagcttctcgaacctcctcttgagagtactcagatttcatctatgttagatgctgaccaccttcccaacgcagccttagcggaggcgccctcagaatccaaaccggcagctaaagtagactcgccgtcaaagaagaaaggtgttcacaaaagaagccaacaccagggacctgatgatatttaccttgatgacttaaagggtctagaacctgaagttgcagctctttatttccctaaaagtgaatcggagcccggttccaggcagtggcccgagtctgacacactctctggctcccagtccccacagtccgtgggaagcgcagctgcagatagcggcaccgagtgcctctcagattctgccatggacttgcctgacgttaccctctccctttgcgggggcctcagtgaaaatggagaaatttcaaaagaaaaattcatggagcatatcattacttatcacgaatttgcagaaaaccctggacttatagacaatcctaaccttgtaataaggatatataatcgttactataactgggctttggcagctcccatgatccttagcttgcaagtattccagaagagcttgcctaaggccacagttgagtcctgggtgaaagacaagatgccaaagaaatctggtcgctggtggttttggcgaaagagagaaagcatgaccaaacagctgccagaatccaaggagggaaaatctgaggcaccgccagccagtgacctgccatccagctccaaggagccggccggtgccaggccggccgagaatgactcctcgagtgacgagggatcacaggagctcgaagaatccatcacagtggaccccatccccacagagcccctgagccacggcagcacaacttcatataagaagtctctccgcctctcctcagaccagatcgcaaaactgaagctccacgatggcccaaatgatgttgtgtttagtattacaacccagtatcaaggcacctgtcgctgtgcagggaccatttacctgtggaactggaatgacaagatcatcatttctgatattgatgggacaataaccaagtcggatgctttgggacagattctcccacagctgggcaaagactggacccaccagggtatagcaaagctctaccattccatcaatgagaatggctacaagtttctgtactgctcggctcgtgccatcggcatggccgacatgacccgtggctacctgcactgggtcaatgacaagggcacaatcttgccccggggccccctgatgctgtcccccagcagcttgttctccgccttccacagagaagtgatagaaaagaaaccagagaagttcaaaattgagtgtctaaatgatatcaagaatctgtttgccccgtctaagcagcccttctatgctgcctttggaaaccgtccaaatgatgtctatgcctacacacaagttggagttccagactgtagaatattcaccgtgaaccccaagggtgaattaatacaagaaagaaccaaaggaaacaagtcatcgtatcacaggctgagtgagctcgtggagcatgtgttcccccttctcagtaaggagcagaattccgcttttccctgcccggagttcagctccttctgctactggcgagacccgatccctgaagtggacctggatgacctgtcttgaggcggcacctcagtgggtgggcagggcttggtccccctccccacagcaagggaaggcagctggctcttctgctgacctcagataccagccttccccagcggggacgggtgcttctggagctggtcccgccatcctcctttgccttcccaggccagctgctcaggctcggcaggtctgcagctcagctcctggaaggagaagggaggaactgggcctggggctggaggcctgggatccctcctttgtgggtcgcacacatgtttcctgctgtgagctggggcctccttccattgcatcattttaaaggaagaaaaaagcagctaaaaaagagtggaccaaaacactgcacacagtgaagtgttccagtttccactgggcagttgaggtggcttctgtaaccagggctgtcttcagatgtcagggtccctgaactgctgcgggcccagtcagtgatgctggctgaagctgcctgtgcacgtttcttctctggtcgcctcatttcctgctacactgaaggggtcagctgctccagtgggccaagttgggcaggacccccgcccctgcagggcccatgcaccagagccactgagcccagtcccataaacctggccctctttggggaaagatccccacagagcatcctcctctcatctgtgacaactccacgagcccttaatttcttagtcctcaccagaagaacaggtctcacaagtatatatttgatgtctgtaataaaagtgggaaggtgggtcttaaaacagaccaaaccccgccccgcccccaacaactctgcttttagggaggcctccgaaatgcagataggcggttgagtggggtcctgggaagagcgctgaatccctctgcttgctgcctggtgtgggcctttggaaagcatcttgccttgggacaggatttctaaaattctgtgattcagatttgtcagggaagcacagtgaagcttgcttaaaggcactggccagcagtgtgtgactttggcttttgggatcacaccctgtaatcgggcccgtggaagcagcgtcaaagaggggtcttggagctcctatggagcagactgccccccgagcagtgtccccagcctagccctgtgagaccccatggggacacgggtgcctatgtattttcactaaaatatacatggtagctccatttactgatgcggttgtaatgagctcacatcgtgtctgaagagatggcaccagggaaaggtgtgccataagctgctccagagcttttggtatgctgagtgttgacagagctgcactcttaacatcaagagaactgtcaggagcccagaaccaaccccaggtcttggtctccattggcgagaacacaggacgtggtggttcctgagcagagagggatctgcagatacaggcttggcgctcggggtggtctcgtggccaactcttcatgcccctgccgttgtagtggaacctctacatgttttagtttgcttcacctaaaataatgctgatctagagatagagaaataggggtggttatttttccagattggagagttgaaagtccctgactgatttcagccattttcctagtgcttgtcggatgcagagacaatgttgaaatcccctaaacacagttctcagtggcaaaacctaggaaggctcatgttcccagagaagggaccacatgagccttctcccatgcaaagcttcccccagcttaaatagttgataaggactaattgtttaatgagtttatttatctacagtaggttagggatcctgggttctgtttatatgaagttcttcccagtttgtgaattctagtacagcagccatgcagccaccttatttcatagatgccatctgtgtgtcctcttgactaccttctatttagaggaagaatgagagctttgtgtgtttaactgagcttatagtaggacttctttgcatatgtatggtactgaaaaatcttaatatacatctttaatcctttttaggttgtcctttaaagagtttttgactagtttctttttcttgacagctcttctctttggacacatgggccttcttagagggttcagtctaggacccggctctcctggccctgtgttgagggtagctggtccctctgtccctgtgtctgctagcactagactttgttgctgcagattgatccagtgggtacataggctaattaatgtgagtctttttccttgtttaaaggagtccctcttgctgaaagtagatgattactattgctgtagtgttaggaaagtattaagtttgtgctgaaaatccattgccatttggtacaaatgacatttgttctttctgtgaaagagatgccctcgagtgtgtttgtacacaaacccttaggatggtgagttgaagcatcaccctcgcgctatcttcagtgacgggtgacggctcagggagatggcaggcagattgggctctaagtcattattctctcagttactccattggtgaaatggccctttccctctttgcagttcagtctaagtctcgtatttgctttgctgtctgtgtgctgaagctcgtcccgtgtgagttgctgtctgccccttgtcaggctgtgaggtgctcgtgtagacctggagcatgcaggctgcctccgtttttgggtactgtgttgtgttttgctctgtctaaaaacatctgcatagttttcaactggaaaaagaaaaaacttaaaaatgggatgtcctaaaatgaaagctgctcaaagtcacagaacaaccgagggacaaaggagattggatgactgggaagcgctggcccggaacagcccctgcaactgtggggcctgcacacagcccttccacagttggcactgcaggtgcaggccaaccctttaaagaataaacaaggaagtcagctctttcactttttacaagttggcaaaaacagacttccggggaatttcgatgttttcccgtgttgtagagcttccagggtttaataaaactggttaaaaattgagtctttccctgaagtaagtgctctttccagatgaaaactactcttttggttttgtttgaaagtaagaaagggaggggaaactttgctcttttaataattatgttcagcctatgatgaagtatttgattattagacagcaatgtcactaataagttttaagttgtccaaagttaattgtaaacatcatcagtacagtactcttagttacagtaaagcaattgttgcaagatgaatggctaatattttggtgcagtgtttgatgttcaaaacaaaatgttacaacaataaacgaacataacataaactgaa

SEQ ID NO: 16398 - DNA, 936 bp, Homo sapiens
  source 1..936: mol_type = unassigned DNA
agctgccggctcggccgccgcagccgcggcgtcccattcatgagggccgcccgactcagctgcggcccaggcggcttccaaggcagcggcggctgcgggcgctccgaccccgcgcgcgcccccgaccggccccgccccctcggcttccctccccggcgggtcctagccgtcgcagtccagccgccgcctgccctcagccgcccgctggccgggagcggagcccctgtggtctcaaaccatgaattatgtgggacagctggctgggcaggtgattgtcactgtgaaggaactctacaagggcattaaccaggccaccctctctgggtgcattgatgtcatcgtggtacagcagcaggatggcagctatcagtgttcaccttttcacgttcggtttggaaagctgggagtcctgagatccaaagagaaagtgattgatatagaaatcaacggcagtgcagtggatcttcacatgaagttgggtgataacggagaagctttctttgttgaggagactgaagaagaatatgaaaagcttcctgcttaccttgccacctcaccaattcctactgaagatcagttctttaaagatattgacacccctttggtgaaatcgggtggagatgaaacaccatctcagagttcagacatctcacacgtcttggaaacagagacaatttttactccaagttctgtgaaaaagaaaaaacgaaggagaaagaaatacaaacaggacagtaagaaggaagagcaggccgcatctgctgctgcagaagacacatgtgatgtaggcgtgagctccgatgatgacaagggggcccaggcagcacgaggatcttcaaatgcttccttgaaagaagaagaatgtaaagagcctttgctcttccattctggggatcattaccccttatctgatggagattggtcccctttagagac

SEQ ID NO: 16399 - DNA, 4363 bp, Homo sapiens
  source 1..4363: mol_type = unassigned DNA
cgaagacactcacctgtggagcctgtgcacgtaggtagaggcggcggctctgagtccaggagctccagtgggcagctccccagcaccagccatgaactacgtggggcagctggcggagacggtgtttgggacggtgaaggagctgtaccggggcctgaacccagccacactgagcggcggcattgacgtgctggtggtgaagcaggtggacggctcgttccggtgctcacccttccacgtgcgttttggcaagctgggcgtcctgcggtcgcgggagaaggtggtagacattgagctcaatggggagcctgtggacttgcacatgaagcttggggacagcggggaggccttctttgttcaggagctggagagcgatgatgaacatgtgcctcccggcctgtgcacctcacccatcccttgggggggtctgtctggcttcccctcggactcccagctgggcactgccagtgagcctgagggcctcgtcatggcaggcacggcctccactgggcggaggaagaggcgtcgcaggaggaaacccaagcagaaagaggatgcagtggcaactgattctagtccagaggaactggaggcaggcgctgagagtgagctatccctgccggaaaagctgaggccagagcccccaggtgtccagttggaagagaagtcttcactgcagcccaaagacatctacccctactcggatggcgagtggcccccccaggccagcctctcagcaggtgagctaacatcccctaagagcgactcggagctggaggtgcggaccccggagcccagtcccctaagagccgagtcccacatgcagtgggcctgggggaggctgcctaaggtggccagagctgagcggcccgagtcctcagtggtccttgaaggcagagctggggcaacctctcctcctcggggaggacccagcactccctctacctctgtggctggcggcgtggaccctttgggactcccaatccagcaaacagaggctggtgccgaccttcagcctgacacagaggatcccactctagtgggtccccctctccacaccccagagacagaggaaagcaagactcagagctctggggacatgggcctccctcctgcctccaagtcatggagctgggccactctggaggttccagttcccaccgggcagccagagagggtctccagggggaaaggctccccaaagagaagccagcacctgggccccagtgacatctacctggatgacttgccctccctggactctgagaatgcagcgctttacttcccccaaagtgactctgggctgggggccagaagatggagtgaacccagcagtcagaagtccctgagggaccccaaccctgaacatgaacctgaacccactctggacacagtggatacaatagcactgtccctctgtggtggactggctgacagccgggacatctccctagagaaattcaaccagcacagcgtctcttaccaggacctcaccaaaaaccccggacttttggatgacccaaacctagtggtgaaaatcaatggaaagcattataactgggctgtggctgcccccatgatcctctccctgcaagccttccagaaaaacttgcccaagagcaccatggacaagctggagagggagaagatgccccggaagggtgggcgatggtggttttcctggcgacgcagggacttcctggccgaggagcgcagtgcccagaaggagaagactgcagccaaggagcagcagggggagaagacagaagtcctgagcagtgatgacgatgccccagacagccctgtgatcctggagatcccctccttgccaccctccactccaccctccactcctacctacaagaagtccctccgcctctcctccgatcagatccggcgcctgaacctgcaagaaggtgccaatgatgtggtcttcagcgtgaccactcagtaccagggcacctgccgctgcaaggccaccatctacctgtggaaatgggacgacaaggtggtcatctctgacatcgacggcaccatcaccaagtcagatgctctgggccatatcctgccccagctggggaaagactggacacaccagggcatcaccagtctctatcacaaaatccaactaaatgggtacaagttcctgtactgctcggcgcgggccattggcatggcggacctcaccaaggggtacctgcagtgggtgagcgaggggggctgtagcctccccaagggccccatccttctgtctcccagcagcctcttctctgccctccacagagaggtgatcgagaagaaaccagaggtgttcaaggtcgcctgcctgagtgacatccagcagctgtttctgccccacggacagcccttctatgctgcctttgggaataggcccaatgatgtctttgcctaccggcaggtgggcctgcctgagtcacgcatcttcacagtcaacccccggggagagctcatccaggagctcataaagaaccacaaatccacgtatgagcggcttggtgaagtggtcgagctcctcttcccacctgtggcccgtggccccagcacagacctggccaaccctgaatacagtaacttctgctactggcgggagccactgcctgctgtggaccttgataccctggactgaacctgccctggctggctcctcctccctggcccggcccaggactggctaggtgtcctggggtataggagggtgggaattggagtgtcatggggcaaacccactgaaggggaaggaggaggctgcaggttggttggcagctagagagactcccccatcttccccgtcatatttttgccagctaagctgcagctgctccaggcgtcagtgtggcactgtcctggggcaattagcttgtcatctgggcccttgcagggttctttttttttttttttttttttttttcctgagacagggtcttgttctgttgcccaggctggagtgcagtggcatgatctctcggctcactgcaacctccgcctcccgggttcaagcgattcacctgcctcagcctcccaagtagctgggattacaggcgtgtaccaccacgcctggctaattttcgtgtttttagtagagatgggttttcaccacattggccaggctggtctcgaactcctgacctcaagtgatttgcccacctcggcctcccaaagtgctgggattacaggcatgagctaccatgccaggcctccttgcagggttttctatgcccttgatatctgtctccctgtcaacctgggaccttgctgtaagtcttgataggacagggagaagagggaggccctaccgaggctcgaggcttcagtgaagggtgacagcagtgggagtgtggtacagcctctggaaggacacagtgttctccccgccccttgtctgggagccaggactgtaccctccgaagccagacatcactgccaacatatcccccttgctggtgccctggcatctcagcacatgacacacacccacacctgcaggctgtggttccggcttggcctgctccccgtccggctgctgccgctgcctctctccagacctcgcttaaggacagtcccaaactcagctggggcaggtgttggcctgaaagtcctcccccagcctctgctggccagcttggtgctcacagctgctgggtaagctcttgcctaaggagctgtgggaagcagggctgatgccccagcaacctctcctcccactgtctttgaagaaagtagctttagaccggctaaaagctttaatccagagcctgccctactctgatagtaccagagtggagggcagaataccaaatgtccaggaaccaaaggcagggctgtggggacctgaagagcagcacagtggggcccgtgctgctgtgggggaaactgaggctgggagcctcagcagagaccggtgtcaagagtctctgggaactgcataggcctgaggaacatgcattttcaagttgtccattgatggtttcgtacctgaatttctcaccttttgtgaacatcttgggagggtgggggttttgcaggggtgttaaaagcaaggcttggagcccctttcctccagctggtggctccttctcagggcctggcctcattcaggccactttgtagagaaatgccctgacctcgcaggaaggatttccccacccccaagtggaaggaagaggacagtgtgggcaccagagggccctggaaacatcttaggggaaggaaaggaaaaggataaatttggagtggggggtctctaaacagattgcctggattccgttctttcctggggttctacagctgcctaagccctcaccttgggggaggatcaaagggaataaagagaactcttggctga

SEQ ID NO: 16400 - DNA, 4039 bp, Homo sapiens
  source 1..4039: mol_type = unassigned DNA
agtccaggagctccagtgggcagctccccagcaccagccatgaactacgtggggcagctggcggagacggtgtttgggacggtgaaggagctgtaccggggcctgaacccagccacactgagcggcggcattgacgtgctggtggtgaagcaggtggacggctcgttccggtgctcacccttccacgtgcgttttggcaagctgggcgtcctgcggtcgcgggagaaggtggtagacattgagctcaatggggagcctgtggacttgcacatgaagcttggggacagcggggaggccttctttgttcaggagctggagagcgatgatgaacatgtgcctcccggcctgtgcacctcacccatcccttgggggggtctgtctggcttcccctcggactcccagctgggcactgccagtgagcctgagggcctcgtcatggcaggcacggcctccactgggcggaggaagaggcgtcgcaggaggaaacccaagcagaaagaggatgcagtggcaactgattctagtccagaggaactggaggcaggcgctgagagtgagctatccctgccggaaaagctgaggccagagcccccaggcagtgtccagttggaagagaagtcttcactgcagcccaaagacatctacccctactcggatggcgagtggcccccccaggccagcctctcagcaggtgagctaacatcccctaagagcgactcggagctggaggtgcggaccccggagcccagtcccctaagagccgagtcccacatgcagtgggcctgggggaggctgcctaaggtggccagagctgagcggcccgagtcctcagtggtccttgaaggcagagctggggcaacctctcctcctcggggaggacccagcactccctctacctctgtggctggcggcgtggaccctttgggactcccaatccagcaaacagaggctggtgccgaccttcagcctgacacagaggatcccactctagtgggtccccctctccacaccccagagacagaggaaagcaagactcagagctctggggacatgggcctccctcctgcctccaagtcatggagctgggccactctggaggttccagttcccaccgggcagccagagagggtctccagggggaaaggctccccaaagagaagccagcacctgggccccagtgacatctacctggatgacttgccctccctggactctgagaatgcagcgctttacttcccccaaagtgactctgggctgggggccagaagatggagtgaacccagcagtcagaagtccctgagggaccccaaccctgaacatgaacctgaacccactctggacacagtggatacaatagcactgtccctctgtggtggactggctgacagccgggacatctccctagagaaattcaaccagcacagcgtctcttaccaggacctcaccaaaaaccccggacttttggatgacccaaacctagtggtgaaaatcaatggaaagcattataactgggctgtggctgcccccatgatcctctccctgcaagccttccagaaaaacttgcccaagcgcagtgcccagaaggagaagactgcagccaaggagcagcagggggagaagacagaagtcctgagcagtgatgacgatgccccagacagccctgtgatcctggagatcccctccttgccaccctccactccaccctccactcctacctacaagaagtccctccgcctctcctccgatcagatccggcgcctgaacctgcaagaaggtgccaatgatgtggtcttcagcgtgaccactcagtaccagggcacctgccgctgcaaggccaccatctacctgtggaaatgggacgacaaggtggtcatctctgacatcgacggcaccatcaccaagtcagatgctctgggccatatcctgccccagctggggaaagactggacacaccagggcatcaccagtctctatcacaaaatccaactaaatgggtacaagttcctgtactgctcggcgcgggccattggcatggcggacctcaccaaggggtacctgcagtgggtgagcgaggggggctgtagcctccccaagggccccatccttctgtctcccagcagcctcttctctgccctccacagagaggtgatcgagaagaaaccagaggtgttcaaggtcgcctgcctgagtgacatccagcagctgtttctgccccacggacagcccttctatgctgcctttgggaataggcccaatgatgtctttgcctaccggcaggtgggcctgcctgagtcacgcatcttcacagtcaacccccggggagagctcatccaggagctcataaagaaccacaaatccacgtatgagcggcttggtgaagtggtcgagctcctcttcccacctgtggcccgtggccccagcacagacctggccaaccctgaatacagtaacttctgctactggcgggagccactgcctgctgtggaccttgataccctggactgaacctgccctggctggctcctcctccctggcccggcccaggactggctaggtgtcctggggtataggagggtgggaattggagtgtcatggggcaaacccactgaaggggaaggaggaggctgcaggttggttggcagctagagagactcccccatcttccccgtcatatttttgccagctaagctgcagctgctccaggcgtcagtgtggcactgtcctggggcaattagcttgtcatctgggcccttgcagggttctttttttttttttttttttttttttcctgagacagggtcttgttctgttgcccaggctggagtgcagtggcatgatctctcggctcactgcaacctccgcctcccgggttcaagcgattcacctgcctcagcctcccaagtagctgggattacaggcgtgtaccaccacgcctggctaattttcgtgtttttagtagagatgggttttcaccacattggccaggctggtctcgaactcctgacctcaagtgatttgcccacctcggcctcccaaagtgctgggattacaggcatgagctaccatgccaggcctccttgcagggttttctatgcccttgatatctgtctccctgtcaacctgggaccttgctgtaagtcttgataggacagggagaagagggaggccctaccgaggctcgaggcttcagtgaagggtgacagcagtgggagtgtggtacagcctctggaaggacacagtgttctccccgccccttgtctgggagccaggactgtaccctccgaagccagacatcactgccaacatatcccccttgctggtgccctggcatctcagcacatgacacacacccacacctgcaggctgtggttccggcttggcctgctccccgtccggctgctgccgctgcctctctccagacctcgcttaaggacagtcccaaactcagctggggcaggtgttggcctgaaagtcctcccccagcctctgctggccagcttggtgctcacagctgctgggtaagctcttgcctaaggagctgtgggaagcagggctgatgccccagcaacctctcctcccactgtctttgaagaaagtagctttagaccggctaaaagctttaatccagagcctgccctactctgatagtaccagagtggagggcagaataccaaatgtccaggaaccaaaggcagggctgtggggacctgaagagcagcacagtggggcccgtgctgctgtgggggaaactgaggctgggagcctcagcagagaccggtgtcaagagtctctgggaactgcataggcctgaggaacatgcattttcaagttgtccattgatggtttcgtacctgaatttctcaccttttgtgaacatcttgggagggtgggggttttgcaggggtgttaaaagcaaggcttggagcccctttcctccagctggtggctccttctcagggcctggcctcattcaggccactttgtagagaaatgccctgacctcgcaggaaggatttccccacccccaagtggaaggaag

SEQ ID NO: 16401 - DNA, 808 bp, Homo sapiens
  source 1..808: mol_type = unassigned DNA
tggtgaaaatcaatggaaagcattataactgggctgtggctgcccccatgatcctctccctgcaagccttccagaaaaacttgcccaagcgcagtgcccagaaggagaagactgcagccaaggagcagcagggggagaagacagaagtcctgagcagtgatgacgatgccccagacagccctgtgatcctggagatcccctccttgccaccctccactccaccctccactcctacctacaagaagtccctccgcctctcctccgatcagatccggcgcctgaacctgcaagaaggtgccaatgatgtggtcttcagcgtgaccactcagtaccagggcacctgccgctgcaaggccaccatctacctgtggaaatgggacgacaaggtggtcatctctgacatcgacggcaccatcaccaagtcagatgctctgggccatatcctgccccagctggggaaagactggacacaccagggcatcaccagtctctatcacaaaatccaactaaatgggtacaagttcctgtactgctcggcgcgggccattggcatggcggacctcaccaaggggtacctgcagtgggtgagcgaggggggctgtagcctccccaagggccccatccttctgtctcccagcagcctcttctctgccctccacagagaggtgatcgagaagaaaccagaggtgttcaaggtcgcctgcctgagtgacatccagcagctgtttctgccccacggacagcccttctatgctgcctttgggaataggcccaatgatgtctttgcctaccggcaggtgggcctgcc

SEQ ID NO: 16402 - DNA, 776 bp, Homo sapiens
  source 1..776: mol_type = unassigned DNA
acagcctctcccagccccagcaagcgacctgtcaggcggccgtggactcagactccggagatgaagcccctgctcctggccgtcagccttggcctcattgctgccctgcaggcccaccacctcctggcctcagacgaggagattcaggatgtgtcagggacgtggtatctgaaggccatgacggtggacagggagttccctgagatgaatctggaatcggtgacacccatgaccctcacgaccctggaagggggcaacctggaagccaaggtcaccatgctgataagtggccggtgccaggaggtgaaggccgtcctggagaaaactgacgagccgggaaaatacacggccgacgggggcaagcacgtggcatacatcatcaggtcgcacgtgaaggaccactacatcttttactgtgagggcgagctgcacgggaagccggtccgaggggtgaagctcgtgggcagagaccccaagaacaacctggaagccttggaggactttgagaaagccgcaggagcccgcggactcagcacggagagcatcctcatccccaggcagagcgaaacctgctctccagggagcgattagggggacaccttggctcctcagcagcccaaggacggcaccatccagcacctccgtcattcacagggacatggaaaaagctccccacccctgcagaacgcggctggctgcaccccttcctaccaccccccgccttccccctgccctgcgccccctctcctggttctccataaagagcttcagcagtt

SEQ ID NO: 16403 - DNA, 764 bp, Homo sapiens
  source 1..764: mol_type = unassigned DNA
cagcaagcgacctgtcaggcggccgtggactcagactccggagatgaagcccctgctcctggccgtcagccttggcctcattgctgccctgcaggcccaccacctcctggcctcagacgaggagattcaggatgtgtcagggacgtggtatctgaaggccatgacggtggacagggagttccctgagatgaatctggaatcggtgacacccatgaccctcacgaccctggaagggggcaacctggaagccaaggtcaccatgctgataagtggccggtgccaggaggtgaaggccgtcctggagaaaactgacgagccgggaaaatacacggccgacgggggcaagcacgtggcatacatcatcaggtcgcacgtgaaggaccactacatcttttactgtgagggcgagctgcacgggaagccggtccgaggggtgaagctcgtgggcagagaccccaagaacaacctggaagccttggaggactttgagaaagccgcaggagcccgcggactcagcacggagagcatcctcatccccaggcagagcgaaacctgctctccagggagcgattaggggcaggggacaccttggctcctcagcagcccaaggacggcaccatccagcacctccgtcattcacagggacatggaaaaagctccccacccctgcagaacgcggctggctgcaccccttcctaccaccccccgccttccccctgccctgcgccccctctcctggttctccataaagagcttcagcagtt

SEQ ID NO: 16404 - DNA, 564 bp, Homo sapiens
  source 1..564: mol_type = unassigned DNA
atgaggcaggggctgctggtgctggcgctggtgctggtgctggtgctagtgctggctgcagggtcccaggtgcaggagtggtaccccagggagtcccacgccctcaactggaacaagttttcagggttctggtacattctggccactgccactgatgcccagggattcttgccggccagggacaagaggaagctgggggcgtccgtggtaaaggtgaacaaagtgggccagctccgcgtgctcctcgccttcagacggggtcagggctgtgggcgggcacagccacgccatccgggaaccagcgggcatctctgggcatctctttcagtgaaaggggtgaaggccttccacgtgctgtccactgactacagctacggcttggtctacctccgcctggggcgtgcaacccaaaactacaagaacctgctgctcttccataggcagaatgtttcgagcttccagagtctgaaggaattcatggacgcttgtgacattctggggctctccaaggccgccgtcatcctcccgaaagacgcgtcccgtacacacaccatcctgccatga

SEQ ID NO: 16405 - DNA, 723 bp, Homo sapiens
  source 1..723: mol_type = unassigned DNA
ggcggctccagagaggtttaaacactggccttggcggctgagggaggagggtgaagatgaggcaggggctgctggtgctggcgctggtgctggtgctggtgctagtgctggctgcagggtcccaggtgcaggagtggtaccccagggagtcccacgccctcaactggaacaagttttcagggttctggtacattctggccactgccactgatgcccagggattcttgccggccagggacaagaggaagctgggggcgtccgtggtaaaggtgaacaaagtgggccagctccgcgtgctcctcgccttcagacggttgaaggggtgccagtcccaggaggtgatcctgaggaaagacgggaagaagccggtgtttgggaacgcctgtgcatacgcggcgggcccgagggaaggacaggagggagtgaaaggggtgaaggccttccacgtgctgtccactgactacagctacggcttggtctacctccgcctggggcgtgcaacccaaaactacaagaacctgctgctcttccataggcagaatgtttcgagcttccagagtctgaaggaattcatggacgcttgtgacattctggggctctccaaggccgccgtcatcctcccgaaagacgcgtcccgtacacacaccatcctgccatgagagccagcgtcctctgctcttccctttcgacgcgtggtcctcccagacccgaggagcgttgttc

SEQ ID NO: 16406 - DNA, 403 bp, Homo sapiens
  source 1..403: mol_type = unassigned DNA
acttttgagctaagtgatgatggccgctttgaggtgtggaatgcgatgactcgaggccagcactgtgacacatggtcttatgtgctgataccggcagcccagcctgggcagttcactgtggaccacggtgtggacacacgagcaggctggccgtcctcaggatcagcctgctgggcaggagctggttgctgcctcccgggacgctggaccagttcatctgcctgggcagagctcagggcctctcggatgacaacatcgtcttcccagatgtgactggctggtcaccccaggccagcgtctgttgaaggatgaagcagctcctgtccggcccagccctgcctcacagctgtgcgagctctgccctcctcagctctcaaacctgaataaatgcaccaagcccaga

SEQ ID NO: 16407 - DNA, 579 bp, Homo sapiens
  source 1..579: mol_type = unassigned DNA
atgaggctgctgtgtggcctgtggctgtggctctccttgctgaaagtcctgcaggcccagaccccaacccccctgccactcccgcccccgatgcagagcttccaaggaaaccagttccagggggaatggttcgtcctgggcctggcgggcaacagcttcaggccggagcacagggcgctgctgaacgctttcaccgcaacttttgagctaagtgatgatggccgctttgaggtgtggaatgcgatgactcgaggccagcactgtgacacatggtcttatgtgctgataccggcagcccagcctgggcagttcactgtggaccacggtgtggagcccggggcggacagagaggagacccgggtggtggacagcgactacacccagttcgccctgatgctgtcccgcagacacacgagcaggctggccgtcctcaggatcagcctgctgggcaggagctggttgctgcctcccgggacgctggaccagttcatctgcctgggcagagctcagggcctctcggatgacaacatcgtcttcccagatgtgactggctggtcaccccaggccagcgtctgttga

SEQ ID NO: 16408 - DNA, 822 bp, Homo sapiens
  source 1..822: mol_type = unassigned DNA
actcgccacctcctcttccacccctgccaggcccagcagccaccacagcgcctgcttcctcggccctgaaatcatgcccctaggtctcctgtggctgggcctagccctgttgggggctctgcatgcccaggcccaggactccacctcagacctgatcccagccccacctctgagcaaggtccctctgcagcagaacttccaggacaaccaattccaggggaagtggtatgtggtaggcctggcagggaatgcaattctcagagaagacaaagacccgcaaaagatgtatgccaccatctatgagctgaaagaagacaagagctacaatgtcacctccgtcctgtttaggaaaaagaagtgtgactactggatcaggacttttgttccaggttgccagcccggcgagttcacgctgggcaacattaagagttaccctggattaacgagttacctcgtccgagtggtgagcaccaactacaaccagcatgctatggtgttcttcaagaaagtttctcaaaacagggagtacttcaagatcaccctctacgggagaaccaaggagctgacttcggaactaaaggagaacttcatccgcttctccaaatctctgggcctccctgaaaaccacatcgtcttccctgtcccaatcgaccagtgtatcgacggctgagtgcacaggtgccgccagctgccgcaccagcccgaacaccattgagggagctgggagaccctccccacagtgccacccatgcagctgctccccaggccaccccgctgatggagccccaccttgtctgctaaataaacatgtgccctcaggcc

SEQ ID NO: 16409 - DNA, 631 bp, Homo sapiens
  source 1..631: mol_type = unassigned DNA
ctgaaatcatgcccctaggtctcctgtggctgggcctagccctgttgggggctctgcatgcccaggcccaggactccacctcagacctgatcccagccccacctctgagcaaggtccctctgcagcagaacttccaggacaaccaattccaggggaagtggtatgtggtaggcctggcagggaatgcaattctcagagaagacaaagacccgcaaaagatgtatgccaccatctatgagctgaaagaagacaagagctacaatgtcacctccgtcctgtttagggagaaggcccagaagtgtgactactggatcaggacttttgttccaggttgccagcccggcgagttcacgctgggcaacattaagagttaccctggattaacgagttacctcgtccgagtggtgagcaccaactacaaccagcatgctatggtgttcttcaagaaagtttctcaaaacagggagtacttcaagatcaccctctacgggagaaccaaggagctgacttcggaactaaaggagaacttcatccgcttctccaaatctctgggcctccctgaaaaccacatcgtcttccctgtcccaatcgaccagtgtatcgacggctgagtgcacagtgagtgtggctg

SEQ ID NO: 16410 - DNA, 828 bp, Homo sapiens
  source 1..828: mol_type = unassigned DNA
actcgccacctcctcttccacccctgccaggcccagcagccaccacagcgcctgcttcctcggccctgaaatcatgcccctaggtctcctgtggctgggcctagccctgttgggggctctgcatgcccaggcccaggactccacctcagacctgatcccagccccacctctgagcaaggtccctctgcagcagaacttccaggacaaccaattccaggggaagtggtatgtggtaggcctggcagggaatgcaattctcagagaagacaaagacccgcaaaagatgtatgccaccatctatgagctgaaagaagacaagagctacaatgtcacctccgtcctgtttagacagtggaaaaagaagtgtgactactggatcaggacttttgttccaggttgccagcccggcgagttcacgctgggcaacattaagagttaccctggattaacgagttacctcgtccgagtggtgagcaccaactacaaccagcatgctatggtgttcttcaagaaagtttctcaaaacagggagtacttcaagatcaccctctacgggagaaccaaggagctgacttcggaactaaaggagaacttcatccgcttctccaaatctctgggcctccctgaaaaccacatcgtcttccctgtcccaatcgaccagtgtatcgacggctgagtgcacaggtgccgccagctgccgcaccagcccgaacaccattgagggagctgggagaccctccccacagtgccacccatgcagctgctccccaggccaccccgctgatggagccccaccttgtctgctaaataaacatgtgccctcaggcc

SEQ ID NO: 16411 - DNA, 848 bp, Homo sapiens
  source 1..848: mol_type = unassigned DNA
ggcattcattctttcctttctgtgggtgtggggaggggaccacagggcacataccccaccctgggatccagctgagcaggggggtcagagatgacagctcttccggctcacaggccaccggcccacatacagggcaatcagaagaaagaaacagcacaaggaaggcacagagggagtcgttgtccctgccagaggcccagcagccaccacagcgcctgcttcctcggccctgaaatcatgcccctaggtctcctgtggctgggcctagccctgttgggggctctgcatgcccaggcccaggactccacctcagacctgatcccagccccacctctgagcaaggtccctctgcagcagaacttccaggacaaccaattccaggggaagtggtatgtggtaggcctggcagggaatgcaattctcagagaagacaaagacccgcaaaagatgtatgccaccatctatgagctgaaagaagacaagagctacaatgtcacctccgtcctgtttaggaaaaagaagtgtgactactggatcaggacttttgttccaggttgccagcccggcgagttcacgctgggcaacattaagagttaccctggattaacgagttacctcgtccgagtggtgagcaccaactacaaccagcatgctatggtgttcttcaagaaagtttctcaaaacagggagtacttcaagatcaccctctacgggagaaccaaggagctgacttcggaactaaaggagaacttcatccgcttctccaaatctctgggcctccctgaaaaccacatcgtcttccctgtcccaatcgaccagtgtatcgacggctgagtgcacagtgagtg

SEQ ID NO: 16412 - DNA, 1109 bp, Homo sapiens
  source 1..1109: mol_type = unassigned DNA
actcgccacctcctcttccacccctgccaggcccagcagccaccacagcgcctgcttcctcggccctgaaatcatgcccctaggtctcctgtggctgggcctagccctgttgggggctctgcatgcccaggcccaggactccacctcagacctgatcccagccccacctctgagcaaggtccctctgcagcagaacttccaggacaaccaattccaggggaagtggtatgtggtaggcctggcagggaatgcaattctcagagaagacaaagacccgcaaaagatgtatgccaccatctatgagctgaaagaagacaagagctacaatgtcacctccgtcctgtttaggaaaaagaagtgtgactactggatcaggacttttgttccaggttgccagcccggcgagttcacgctgggcaacattaagagttaccctggattaacgagttacctcgtccgagtggtgagcaccaactacaaccagcatgctatggtgttcttcaagaaagtttctcaaaacagggagtacttcaagatcaccctctacgggagaaccaaggagctgacttcggaactaaaggagaacttcatccgcttctccaaatctctgggcctccctgaaaaccacatcgtcttccctgtcccaatcggtaatggccagtctggatgaggggacggggacatggggactgttcaggcaggatgcttccctaccagggatcagggagaggagggactccgtcctcagcttcagtcactggagcagtggatggtccaggagctccttggaagccactctgggcccaggaagactgtgccccaccccagggtctatgggactcccagggacccaggccgcaagtgctctttcctggcagtttagcccgggtctgcccagacaaggatttcaggcccaggcctgagtatccatttctcagtctcactggcctgacacctctggccaccctcccaggcccccttgttctgggccatctcccccgaccctcccaggcctcgtcaccctgggttttgctgtcctggctgtcctctctcccctggggacttgctcaccactgacttgggagctgtccttgactccagggagcctg

SEQ ID NO: 16413 - DNA, 711 bp, Homo sapiens
  source 1..711: mol_type = unassigned DNA
gggactgcacatcctgggcctgcggcgcagtgtagacctgggaggatgggcggcctgctgctggctgcttttctggctttggtctcggtgcccagggcccaggccgtgtggttgggaagactggaccctgagcagcttcttgggccctggtacgtgcttgcggtggcctcccgggaaaagggctttgccatggagaaggacatgaagaacgtcgtgggggtggtggtgaccctcactccagaaaacaacctgcggacgctgtcctctcagcacgggctgggagggtgtgaccagagtgtcatggacctgataaagcgaaactccggatgggtgtttgagaatccctcaataggcgtgctggagctctgggtgctggccaccaacttcagagactatgccatcatcttcactcagctggagttcggggacgagcccttcaacaccgtggagctgtacagtctgacggagacagccagccaggaggccatggggctcttcaccaagtggagcaggagcctgggcttcctgtcacagtagcaggcccagctgcagaaggacctcacctgtgctcacaagatccttctgtgagtgctgcgtccccagtagggatggcgcccacagggtcctgtgacctcggccagtgtccacccacctcgctcagcggctcccggggcccagcaccagctcagaataaagcgattccacagcaaa

SEQ ID NO: 16414 - DNA, 867 bp, Homo sapiens
  source 1..867: mol_type = unassigned DNA
atatgccaggagggtggctgggcaggctgctgtctaggccaggctaacccctgcggtgggcgtgggtgtcaccagggccgatggcgcttgtgcagaaacccacgtctctgagctgccagcagccaagctgtcctgatgacattcccgggtgggcgcacaagcctgcactgtccgtatagaatcggcccaggctgtgcagcaggggaacccggagcccggaccccgccacggaggccaggctgccgtgcaccatcctgggtgtcctcgtggtgctccgggcgcaggtggcagcagccatggaggagctggaccggcagaagattggaggattctggagggaagtcggtgtggcctccgatcaaagcctggtgctgacggccccgaagcgggtggagggcttgttcctcaccttgagcgggagtaacctgaccgtgaaggttgcatataacagctcaggaagctgtgagatagagaagatcgtgggctcagaaatagacagtacgggaaaattcgcttttcctggccacagagagatccacgtgctggacaccgactacgagggctacgccatcctgcgggtgtccctgatgtggcggggcaggaactttcgcgtcctcaagtactttactcggagccttgaggacaaggaccggctggggttctggaagtttcgggagctgacagcagacactggtctctacctggcggcccggcctgggcggtgtgccgagctcctgaaggaggagctgatttaatggagttcctgcctcagaccacaaggttcggagcgcccgcccacccctgcccctcctgggcaccctgcccaccaggtcacctgcacctgctctgaataaactgtgaagtcaa

SEQ ID NO: 16415 - DNA, 531 bp, Homo sapiens
  source 1..531: mol_type = unassigned DNA
atggctctgcttctgctgagcctggggctgagcctcatcgcagcccaggagttcgatccccacaccgttatgcagaggaactacaacgtggccagggtttcaggggtctggtattctattttcatggcctcagatgacctgaatcggattaaagaaaatggagacctgagggtcttcgtccggaatattgaacacttgaagaacggcagcctaatatttgatttcgaatacatggtgcagggggagtgtgtggctgtggtcgtggtctgcgagaagacagagaagaatggggaatactccatcaactatgagggccagaacacagtggccgtctcggagactgactacaggctgttcatcaccttccacctccagaacttcaggaacgggaccgagacccacacgctggcgctctatgaaacctgcgaaaagtacggacttggctcacaaaatatcatcgacttgaccaacaaagatccctgctactccaagcattacaggagcccgcccaggcctcccatgcggtggtaa

SEQ ID NO: 16416 - DNA, 1775 bp, Homo sapiens
  source 1..1775: mol_type = unassigned DNA
agccaatcgtggagcagcttggctgcttgtcataaatggagcgacgtaatttcgacctgtcctttcccgggagttagcgatccctcaacccctgcactgcgctagtcctaaagaggaaatgtctctacgctgcggggatgcagcccgcaccctggggccccgggtatttgggagatatttttgcagcccagtcagaccgttaagctccttgccagataaaaaaaaggaactcctacagaatggaccagaccttcaagattttgtatctggtgatcttgcagacaggagcacctgggatgaatataaaggaaacctaaaacgccagaaaggagaaaggttaagactacctccatggctaaagacagagattcccatggggaaaaattacaataaactgaaaaatactttgcggaatttaaatctccatacagtatgtgaggaagctcgatgtcccaatattggagagtgttggggaggtggagaatatgccaccgccacagccacgatcatgttgatgggtgacacatgtacaagaggttgcagattttgttctgttaagactgcaagaaatcctcctccactggatgccagtgagccctacaatactgcaaaggcaattgcagaatggggtctggattatgttgtcctgacatctgtggatcgagatgatatgcctgatgggggagctgaacacattgcaaagaccgtatcatatttaaaggaaaggaatccaaaaatccttgtggagtgtcttactcctgattttcgaggtgatctcaaagcaatagaaaaagttgctctgtcaggattagatgtgtatgcacataatgtagaaacagtcccggaattacagagtaaggttcgtgatcctcgggccaattttgatcagtccctacgtgtactgaaacatgccaagaaggttcagcctgatgttatttctaaaacatctataatgttgggtttaggcgagaatgatgagcaagtatatgcaacaatgaaagcacttcgtgaggcagatgtagactgcttgactttaggacaatatatgcagccaacaaggcgtcaccttaaggttgaagaatatattactcctgaaaaattcaaatactgggaaaaagtaggaaatgaacttggatttcattatactgcaagtggccctttggtgcgttcttcatataaagcaggtgaatttttcctgaaaaatctagtggctaaaagaaaaacaaaagacctctaaaacttcaacaagaccttcaagatcacagaaatttttaaaatttgattccagttaataacagaggtggtgccagaatgcctggactgcagtggatgtgccccacctctttgcttaaaaaaaaaaatgtcaatagccaggcatagtggctcacgcctgtaatcccagcactttaggaggccaaggcgggtggatcacctgaggtcaggagttcgagaccagcctggccaacatggtgaaatcctgtctccactaaaaacacaaaaattagtcaggcgtggtagtgggtgcctgtaatcccagctactcgggaggctaaggcaggagaatcacttgaacctgggagggggaggttgcagtgagccaagatcgctccattgccctccagcctgggtgacaagagcaaaactccatctcaaataaataaaaaggaaaaaaaagtcaataaactgtacaaatttaattacagtaattcatttggcttttagtgtatcttctttgtcccaattaaacagttgcttgctgtgatgtaatcttaaaa

SEQ ID NO: 16417 - DNA, 1594 bp, Homo sapiens
  source 1..1594: mol_type = unassigned DNA
agccaatcgtggagcagcttggctgcttgtcataaatggagcgacgtaatttcgacctgtcctttcccgggagttagcgatccctcaacccctgcactgcgctagtcctaaagaggaaatgtctctacgctgcggggatgcagcccgcaccctggggccccgggtatttgggagatatttttgcagcccagtcagaccgttaagctccttgccagataaaaaaaaggaactcctacagaatggaccagaccttcaagattttgtatctggtgatcttgcagacaggagcacctgggatgaatataaaggaaacctaaaacgccagaaaggagaaaggttaagactacctccatggctaaagacagagattcccatggggaaaaattacaataaactgaaaaatactttgcggaatttaaatctccatacagtatgtgaggaagctcgatgtcccaatattggagagtgttggggaggtggagaatatgccaccgccacagccacgatcatgttgatgggtgacacatgtacaagaggttgcagattttgttctgttaagactgcaagaaatcctcctccactggatgccagtgagccctacaatactgcaaaggcaattgcagaatggggtctggattatgttgtcctgacatctgtggatcgagatgatatgcctgatgggggagctgaacacattgcaaagaccgtatcatatttaaaggaaaggaatccaaaaatccttgtggagtgtcttactcctgattttcgaggtgatctcaaagcaatagaaaaagttgctctgtcaggattagatgtgtatgcacataatgtagaaacagtcccggaattacagagtaaggttcgtgatcctcgggccaattttgatcagtccctacgtgtactgaaacatgccaagaaggttcagcctgatgttatttctaaaacatctataatgttgggtttaggcgagaatgatgagcaagtatatgcaacaatgaaagcacttcgtgaggcagatgtagactgcttgactttaggacaatatatgcagccaacaaggcgtcaccttaaggtgaatttttcctgaaaaatctagtggctaaaagaaaaacaaaagacctctaaaacttcaacaagaccttcaagatcacagaaatttttaaaatttgattccagttaataacagaggtggtgccagaatgcctggactgcagtggatgtgccccacctctttgcttaaaaaaaaaaatgtcaatagccaggcatagtggctcacgcctgtaatcccagcactttaggaggccaaggcgggtggatcacctgaggtcaggagttcgagaccagcctggccaacatggtgaaatcctgtctccactaaaaacacaaaaattagtcaggcgtggtagtgggtgcctgtaatcccagctactcgggaggctaaggcaggagaatcacttgaacctgggagggggaggttgcagtgagccaagatcgctccattgccctccagcctgggtgacaagagcaaaactccatctcaaataaataaaaaggaaaaaaaagtcaataaactgtacaaatttaattacagtaa

SEQ ID NO: 16418 - DNA, 2110 bp, Homo sapiens
  source 1..2110: mol_type = unassigned DNA
gtgcgatccccggcgcccgcgcgcgcccacagcgctccgccagagctgccgccgcggactcgccgggagtgggggtctccgctggtgccagcccgcttctggagaccctccgcctcctgccaacccctgctcttccaggtcgggccccggggttctgcggctgttagggacagaggcaaagaagggcaggacggtccggtttcccgtggatgttcccgcccgagaaagacagcaagttgtgtgtgcgcccgggacgcgggagggaaggtggccgccgcccgccagccatggaccatcatctttagtgcagaggatggaaagttgatgcccagtaagactgaagatccattctgcattacggaactgtggattatctgtgggtccctggtgatttcacaccttcattcactcctgcagtccctgaacacttacttggggtcctcattgccctatctggtgaaagatggcatccagcctgacttgtactggagtaatctgggctttgctgtcttttctttgtgctgccacctcctgcgtggggttctttatgccttactggctctggggatcacagctgggcaagcctgtgtccttcggtaccttccggaggtgctcatatcctgtgcatgatgagagtcggcagatgatggtgatggtggaggaatgtgggcgctatgcctccttccagggcatccccagcgcagaatggaggatctgcaccatagtgaccggcctgggttgtggcctcctcctcctggtggcgctcactgccctcatgggttgctgtgtttccgacctcatctccaggacagtgggaagagtggctggaggaattcagtttcttgggggcttgttgattggtgctggctgtgccctctaccccttgggctgggacagtgaggaagtccggcagacttgtggctacacttctggccagtttgacctggggaagtgtgaaatcggctgggcctactactgcacgggagcaggtgccactgccgccatgctgctgtgcacgtggctggcttgcttttcgggcaagaaacagaagcactacccatactgagatggagctaccaagagcagacagaggagaagatgggccaaaggggcttggagaggtcaaaacatccacctaccttcaaaaggtgggatagtagttctaatccaatacaatgctaataaaatgaaacccgataaaatcaggaacatgatataggaaggaaggattgtaggagatttgtgggggaaaaaaaaggagagtatagaatgatggagaaaaatggaccaaaggctaaaaatattgcagggcatcgggtgtttctattccacagagtattgttaatgtacaacacacacacacacacacacacacacacacacacacacacacacacaacaaatctacatatacaaacaagggtttgggttttagttttttttttttaaggtgaggactcagaaaatcaaagggctagtagaaacagtgttatgttgggaagcagggtacccccaaagatgttccctgtaggtcacggcactcccaaaagcacacaagcacatacagacatatgcatccccacacacgcctatgcacaaacgtggattatcgcacagactgggaggtttagtggtgcatttctcctctgttttctttttaatatacatttaaaatacagtattatcactttataaaacatacattaagcctaataaatggaccaataagccaaactatcagtattttgtatatcctgcataaactctaatttagttcctcaacatattttcagtgtttatgcagacctttagagttaagcctttgtatttccatgttattccacaatatgcaatatttctctgagtagcttctgctatgatattcttatgaagaaaaggggcaactttctgtccactataggagagaattcagccgaagatatgagagtaatgagagacattttccagtcattggatcgtgttttcttttgtccattattgtactgtgctgtaccacatttatttctatattcattttgtaaaaaatttaaaagtgctattttgtttgtatttgaaaatctctgtgaataaattctctctttgatcaata

SEQ ID NO: 16419 - DNA, 1675 bp, Homo sapiens
  source 1..1675: mol_type = unassigned DNA
tgcctgtatgtctgaggctgggtttgaagcctccagcgtgtttggagttaatccccattaggttggactccgcccctttctcccaaaggtaaagcaaggttttcaggcatcactgcaaagggcagctagtattcccatccttgtctaacaagctgtaaggagaagttgtttctgagatctgagcctgaagagagggaacaagtcagtcagccttcgtggtcagaagagaaacctgtgaccatgaggagcagcctgaccatggtgggaaccctctgggccttcctgtcccttgttactgctgtgaccagttctaccagttacttcctaccttactggctctttggatcccagatggggaagccagtgtcattcagcacattccggaggtgcaactaccctgtgcggggagagggacacagtctgatcatggtggaagaatgtgggcgctatgccagcttcaatgccatcccaagcctggcctggcagatgtgcacagtggtgacaggtgccggctgtgctctgctgctcctggtggcactagctgctgtcctgggttgctgcatggaggagctcatctccagaatgatgggacgttgcatgggagcagcgcagtttgttggagggctgctgataagctcaggctgtgccttataccctttaggatggaatagcccggagataatgcaaacatgtgggaatgtctccaatcaatttcagttaggtacctgtcggcttggctgggcctattactgtgctggaggtggagcagctgcagccatgttgatctgcacctggctctcttgctttgctggaagaaaccccaagcctgtcatattggtggagagcatcatgaggaataccaattcttatgctatggagcttgaccattgcctcaaaccttgagctttgaaagaagattggagagggtgggaaaggggaggagggagccctgaaaagaggtactaaggattaggccatttgtcatctgactgtcattagcatagcctagtgtttgcatgctttttaaactaattgtcgttcattttcacttatctttaagccagtaggtcactggctgtttataaaattcatcagaggaaacattctcagacatttacccaactggcaagtcgtgctaacccgaagacccaaagtacccctttatgcaaaataggatccaaagctaaggctgggtaagaatagttgtgcagggagggagcacgagatgggcagagctggttcctaccactccattcacacagttcatcagttcattcccaagtatttattgtcacccccaaacatctctggagtactactgctcaatttttgtgtcgttatcaggagtataccttggctcttcctttttttctcctgcttccccccgcaccttgtggggaagcttcaggggagcgggggagggtgattcccagtggtggggaaaacattaatcaaggatacttgcatttagcctggagccccttcctcattatgctttagaatattcataggagttccatttgtattctggctgggtgatgagcaaaaaaaatatatagtagcaaatattctctcatcctttagagataaagaaatggtgttcatcaaatgtactgagaatagactagcatttgtggggcactcaataaatttaaattcatggtgacagtgacaa

SEQ ID NO: 16420 - DNA, 1666 bp, Homo sapiens
  source 1..1666: mol_type = unassigned DNA
cacacacacacacacacacacagagctgctttgtccgctgtgaggttggaggtttggggactctgtgcccactaagctactttctatttcaagtgcctgtatgtctgaggctgggtttgaagcctccagcgtgtttggagttaatccccattaggttggactccgcccctttctcccaaaggtaaagcaaggttttcaggcatcactgcaaagggcagctagtattcccatccttgtctaacaagctgtaaggagaagttgtttctgagatctgagcctgaagagagggaacaagtcagtcagccttcgtggtcagaagagaaacctgtgaccatgaggagcagcctgaccatggtgggaaccctctgggccttcctgtcccttgttactgctgtgaccagttctaccagttacttcctaccttactggctctttggatcccagatggggaagccagtgtcattcagcacattccggaggtgcaactaccctgtgcggggagagggacacagtctgatcatggtggaagaatgtgggcgctatgccagcttcaatgccatcccaagcctggcctggcagatgtgcacagtggtgacaggtgccggctgtgctctgctgctcctggtggcactagctgctgtcctgggttgctgcatggaggagctcatctccagaatgatgggacgttgcatgggagcagcgcagtttgttggaggtacctgtcggcttggctgggcctattactgtgctggaggtggagcagctgcagccatgttgatctgcacctggctctcttgctttgctggaagaaaccccaagcctgtcatattggtggagagcatcatgaggaataccaattcttatgctatggagcttgaccattgcctcaaaccttgagctttgaaagaagattggagagggtgggaaaggggaggagggagccctgaaaagaggtactaaggattaggccatttgtcatctgactgtcattagcatagcctagtgtttgcatgctttttaaactaattgtcgttcattttcacttatctttaagccagtaggtcactggctgtttataaaattcatcagaggaaacattctcagacatttacccaactggcaagtcgtgctaacccgaagacccaaagtacccctttatgcaaaataggatccaaagctaaggctgggtaagaatagttgtgcagggagggagcacgagatgggcagagctggttcctaccactccattcacacagttcatcagttcattcccaagtatttattgtcacccccaaacatctctggagtactactgctcaatttttgtgtcgttatcaggagtataccttggctcttcctttttttctcctgcttccccccgcaccttgtggggaagcttcaggggagcgggggagggtgattcccagtggtggggaaaacattaatcaaggatacttgcatttagcctggagccccttcctcattatgctttagaatattcataggagttccatttgtattctggctgggtgatgagcaaaaaaaatatatagtagcaaatattctctcatcctttagagataaagaaatggtgttcatcaaatgtactgagaatagactagcatttgtggggcactcaataaatttaaattcatggtgacagtga

SEQ ID NO: 16421 - DNA, 5043 bp, Homo sapiens
  source 1..5043: mol_type = unassigned DNA
gggcagggcggctcggccgcctctttctctcgctgcccccgcccctcctcctcctccctctccccgagtgctagcccgggcggccgccgagcttggcgctctctcgcctcgctgcctcctcccccgcgccgcggaccctctcccctcccttgcgttgcccccctctcccgccgcctcctcccgctctcctctcgctctcctcccgcctccttcttccaggcgcggccagcgggggcaagagcgaggtggctgcgaggaggcgtcactgaaagccctgacttggggaaggctgcgggctcggagccggagacgccgagctggggccgggtgagttgggaatcagactcttgagttgacagctggcctatggtttctgcattttgttaagaagcacctcatgcaagcgagggacctgggactgctcacagccaggtggcatttttctgaagttgttcattaagacttcccagcattcctacagatataaataggtgaggccgcaggcggtgctctgggtccgggagcgctgtccccagcatgaacgcggccggcggcgggagtgaatgactgcagctgcgacttccttcccgggccgcccgagcctccttccccaccgactttcttgttttgattaactccgtggactcctgactctttcttcgcccggaacatcaatatgtgtcatgtcattgtcacctgtcgctcgatgctctggaccttgctgagtattgtggtggcttttgccgagctcattgccttcatgagtgcagactggctgatcgggaaagcgaggagccgcggcggcgtggagccggcgggcccgggcgggggctccccggagccctaccaccccaccctgggcatctacgcccgctgcatccggaacccaggggtgcagcacttccagcgggacacgctgtgcgggccctacgccgagagcttcggcgagatcgccagcggcttctggcaggccacagctattttcctggctgtgggaatctttattctctgcatggtggccttggtgtccgtcttcaccatgtgtgtacagagcatcatgaagaaaagcatcttcaatgtctgtgggctgttgcaaggaattgcaggtctattccttatcctcggtttgatactctaccctgctggctggggttgccagaaggccatagactactgtggacattatgcatctgcctacaaacctggagactgctccttgggctgggccttttataccgccattgggggcacagtcctcactttcatctgtgctgtcttctctgcacaagcagaaattgcaacctctagtgacaaagtacaggaagaaattgaagaggggaaaaatctgatctgcctcctttagtttggaagagacaatgccattttctcccttgagtaatcttgtgaaacagtccacagtttcatcatttgagtcaagtggagaactaacctttacctaccaaagccacgttccacggcccgaggcttaaacaggaccaatgagaggccacatccagctacgcaaagttactggacatgcggtctgcagtgcacattataaggaatggaacatgaaaatagtatataatcctagacctggagttgccaagttctgtcagactccatctcccccaggttcaatgaaggataataatctaaatcattagggcagcagtttctctggtaacggaagagaccgtccgccagatctgcaggctgtttctgctccaacactgcttgcttgtgagcatctctgcctcagaatggggttttgggttggagttcttgttttcctctgttctttcaagttgtctccaacgaacagaaaactataaacttactggggacaggatgtgtgctaaagggcacagcaagacactgtcttttgcttagctgaccaaaggggtcagcagggatggcgtggagtcatgctgtggaacttattctaggctgaatcctagggtaaggtggatcaactgaactgtcactccagagattttagaaatttgagtaaagaaacaataaggacctatacaatcatatgagaacaaaaatatgaaatcttgctagtgaagacgtattttttcttcttcccagcagccaggctagcaccagttctggcccagtctcctcttcttctggagatcacatgtttttcttctaaggttaggattgtgctttgactgcgaaaggaaacctcactgtttcctccttccagggactgaggtctccaagctagctgtggcttatgcagatgttcactgggaggacctgccagaatctcggcacttggggggagacctttactcccagtttggtgaccatgctgtagtcagctctatttccaatcccgacagtagcagaatggcattctacaacaaaaagaagctagttatgggagttaagtttttgtagttactggtgttgatcctgaaagcagactgagataacattaaattgctgcaactgaagaactgcagccaagaccttaattccaggaaagcacagaggacaaagttaattcaaaaagaggcgctagatcaaggtcacagcactgcctacacctgtttacaaaaagaatcaaataccactatgaataaggattcaggggtttttaatctactttccataaattaccaatatcactgattcaggaagatagtatctcagaatgaccagagcagcacagaaacaagctactctgacattatgggagcttcaaaattgtatcatgatacagaaacactccttagcactttaagaaagtgagatggaactgccagatttctggaaggagaaaaagtgtaggtatttgggttcattaatctgctcacttgaggactttgttttgaaaaagtaccttctgtggacaaggtattgtgctaccagctatacaaccctgacttcagagtttgcaaccttgccctgagtgaatcatgttaaagctgtctgagtctaaagcaccgtatcttggtgcagaacagataattatacagagatggaatgggacaaccgcagttttactacattctggtgtttggcctatatgagaaaccatcttctcacagattaagggctaagggcaaaaggggtgggaggtgtggaactagccttaatgagtttcccattcctgaaccaaaattcaaagtgagtgagatgtaaatcctgtgattttggtgaagaaaaaaacgggtatcttcatagcagcctaggaaaccttaaccatatctctaacaccacacagaaagaggctggaggagccactggacaaagcttctgtctctgtgtgtacatttataatgttctaaccaagtctcaaaccttgatgaaaaacacaaaatttttccataaacttatcagaagactcacttttctttctttcttggatagagaaaccattttctgacactaggtttacaatctcagtgtccttacaagttaagtcctaagctcacaggatcctccgagcatgtccatcacctgctctttggctaaggtggcagtgtacctctagatcaacctgggaacagtcacaagggagtgtgacttcttggccataataaactcactcgatagtgtttatgttattaatctgaatgcaacagaagacaaaagcacaggcatgcacacacacagaaccccaaaccactaaaaactacctaaacactgacttagtaaatagtaaaaaggtaatgttgggacttttaaaccttgaatccattagccaggcttgggatgaaaggaccatctaaaatcatgctagtctaaaccatgctcttccacacagctgtttaaaaaccactgggtatgaggaatatgctagaaagaaatgttaaaaatagattgttggctcacacttatttttctaataaataggaccattattactaccaggaaagtcttatttattttgcctgaaattggcttaaagaaagtctcatgacgggatgggatgggctgcgcttctcaatgaactctgaggcagaaatatttgccttggattctgtggattctttaaacctgtgtgctaataattcaaacaatgttgcattaattgtataagggtttttgtatagttttcaaacatctgtggtgtaatgatctttgttaaacatatattctgtaaagtgccatagtctttttttatgtgtagcatatttaaaaatatatatgtatattatacatacacaagtttgtgtgaaagatgtgcaataacaaaggtgtatgtatgttttgttgttttgttttggaaactggacaggagtcaaaacagggatgtttgtttctgttttggcaaggagagttccacatttttgccttcatggcttattcagtaacccataattttaatgctacacaaatcttatgtgaagaaaagactggtatgaaatcattttttcctgggtctaaaataatcgctagtgttatgtcaaagttaagcccgcacgccaggcccagttaatgctagtctttcatgtgaaatgtgaagctgccatgttgccttttctcttagtaggataactagtagctggtacataatcactgaggagctatttcttaacatgcttttatagaccatgctaatgctagaccagtatttaagggctaatctcacacctccttagctgtaagagtctggcttagaacagacctctctgtgcaataacttgtggccactggaaatccctgggccggcatttgtattggggttgcaatgactcccaagggccaaaagagttaaaggcacgactgggatttcttctgagactgtggtgaaactccttccaaggctgagggggtcagtaggtgctctggagggactcggcaccacttgatattcaacagccacttgagccaaatataaaattgtatttacagctgatggactcaatttgagccttcaaacttgtagttatcctattatattgtaaactaatacattgtctagcattgatttggttcctgtgcatatgtattttcactatgtgctcccctccccagatcttaattaaaccagattttgcaattcattcttattctttc

SEQ ID NO: 16422 - DNA, 4664 bp, Homo sapiens
  source 1..4664: mol_type = unassigned DNA
acacgtgaaggaagcctttgtgggccttcctgcgcagctgactagctgaaagccatcgtgagccagcccaggagaaaccagcagaggaacagccagccgaaccctgggattgtgagaaataatcaggtgaggccgcaggcggtgctctgggtccgggagcgctgtccccagcatgaacgcggccggcggcgggagtgaatgactgcagctgcgacttccttcccgggccgcccgagcctccttccccaccgactttcttgttttgattaactccgtggactcctgactctttcttcgcccggaacatcaatatgtgtcatgtcattgtcacctgtcgctcgatgctctggaccttgctgagtattgtggtggcttttgccgagctcattgccttcatgagtgcagactggctgatcgggaaagcgaggagccgcggcggcgtggagccggcgggcccgggcgggggctccccggagccctaccaccccaccctgggcatctacgcccgctgcatccggaacccaggggtgcagcacttccagcgggacacgctgtgcgggccctacgccgagagcttcggcgagatcgccagcggcttctggcaggccacagctattttcctggctgtgggaatctttattctctgcatggtggccttggtgtccgtcttcaccatgtgtgtacagagcatcatgaagaaaagcatcttcaatgtctgtgggctgttgcaaggaattgcaggtctattccttatcctcggtttgatactctaccctgctggctggggttgccagaaggccatagactactgtggacattatgcatctgcctacaaacctggagactgctccttgggctgggccttttataccgccattgggggcacagtcctcactttcatctgtgctgtcttctctgcacaagcagaaattgcaacctctagtgacaaagtacaggaagaaattgaagaggggaaaaatctgatctgcctcctttagtttggaagagacaatgccattttctcccttgagtaatcttgtgaaacagtccacagtttcatcatttgagtcaagtggagaactaacctttacctaccaaagccacgttccacggcccgaggcttaaacaggaccaatgagaggccacatccagctacgcaaagttactggacatgcggtctgcagtgcacattataaggaatggaacatgaaaatagtatataatcctagacctggagttgccaagttctgtcagactccatctcccccaggttcaatgaaggataataatctaaatcattagggcagcagtttctctggtaacggaagagaccgtccgccagatctgcaggctgtttctgctccaacactgcttgcttgtgagcatctctgcctcagaatggggttttgggttggagttcttgttttcctctgttctttcaagttgtctccaacgaacagaaaactataaacttactggggacaggatgtgtgctaaagggcacagcaagacactgtcttttgcttagctgaccaaaggggtcagcagggatggcgtggagtcatgctgtggaacttattctaggctgaatcctagggtaaggtggatcaactgaactgtcactccagagattttagaaatttgagtaaagaaacaataaggacctatacaatcatatgagaacaaaaatatgaaatcttgctagtgaagacgtattttttcttcttcccagcagccaggctagcaccagttctggcccagtctcctcttcttctggagatcacatgtttttcttctaaggttaggattgtgctttgactgcgaaaggaaacctcactgtttcctccttccagggactgaggtctccaagctagctgtggcttatgcagatgttcactgggaggacctgccagaatctcggcacttggggggagacctttactcccagtttggtgaccatgctgtagtcagctctatttccaatcccgacagtagcagaatggcattctacaacaaaaagaagctagttatgggagttaagtttttgtagttactggtgttgatcctgaaagcagactgagataacattaaattgctgcaactgaagaactgcagccaagaccttaattccaggaaagcacagaggacaaagttaattcaaaaagaggcgctagatcaaggtcacagcactgcctacacctgtttacaaaaagaatcaaataccactatgaataaggattcaggggtttttaatctactttccataaattaccaatatcactgattcaggaagatagtatctcagaatgaccagagcagcacagaaacaagctactctgacattatgggagcttcaaaattgtatcatgatacagaaacactccttagcactttaagaaagtgagatggaactgccagatttctggaaggagaaaaagtgtaggtatttgggttcattaatctgctcacttgaggactttgttttgaaaaagtaccttctgtggacaaggtattgtgctaccagctatacaaccctgacttcagagtttgcaaccttgccctgagtgaatcatgttaaagctgtctgagtctaaagcaccgtatcttggtgcagaacagataattatacagagatggaatgggacaaccgcagttttactacattctggtgtttggcctatatgagaaaccatcttctcacagattaagggctaagggcaaaaggggtgggaggtgtggaactagccttaatgagtttcccattcctgaaccaaaattcaaagtgagtgagatgtaaatcctgtgattttggtgaagaaaaaaacgggtatcttcatagcagcctaggaaaccttaaccatatctctaacaccacacagaaagaggctggaggagccactggacaaagcttctgtctctgtgtgtacatttataatgttctaaccaagtctcaaaccttgatgaaaaacacaaaatttttccataaacttatcagaagactcacttttctttctttcttggatagagaaaccattttctgacactaggtttacaatctcagtgtccttacaagttaagtcctaagctcacaggatcctccgagcatgtccatcacctgctctttggctaaggtggcagtgtacctctagatcaacctgggaacagtcacaagggagtgtgacttcttggccataataaactcactcgatagtgtttatgttattaatctgaatgcaacagaagacaaaagcacaggcatgcacacacacagaaccccaaaccactaaaaactacctaaacactgacttagtaaatagtaaaaaggtaatgttgggacttttaaaccttgaatccattagccaggcttgggatgaaaggaccatctaaaatcatgctagtctaaaccatgctcttccacacagctgtttaaaaaccactgggtatgaggaatatgctagaaagaaatgttaaaaatagattgttggctcacacttatttttctaataaataggaccattattactaccaggaaagtcttatttattttgcctgaaattggcttaaagaaagtctcatgacgggatgggatgggctgcgcttctcaatgaactctgaggcagaaatatttgccttggattctgtggattctttaaacctgtgtgctaataattcaaacaatgttgcattaattgtataagggtttttgtatagttttcaaacatctgtggtgtaatgatctttgttaaacatatattctgtaaagtgccatagtctttttttatgtgtagcatatttaaaaatatatatgtatattatacatacacaagtttgtgtgaaagatgtgcaataacaaaggtgtatgtatgttttgttgttttgttttggaaactggacaggagtcaaaacagggatgtttgtttctgttttggcaaggagagttccacatttttgccttcatggcttattcagtaacccataattttaatgctacacaaatcttatgtgaagaaaagactggtatgaaatcattttttcctgggtctaaaataatcgctagtgttatgtcaaagttaagcccgcacgccaggcccagttaatgctagtctttcatgtgaaatgtgaagctgccatgttgccttttctcttagtaggataactagtagctggtacataatcactgaggagctatttcttaacatgcttttatagaccatgctaatgctagaccagtatttaagggctaatctcacacctccttagctgtaagagtctggcttagaacagacctctctgtgcaataacttgtggccactggaaatccctgggccggcatttgtattggggttgcaatgactcccaagggccaaaagagttaaaggcacgactgggatttcttctgagactgtggtgaaactccttccaaggctgagggggtcagtaggtgctctggagggactcggcaccacttgatattcaacagccacttgagccaaatataaaattgtatttacagctgatggactcaatttgagccttcaaacttgtagttatcctattatattgtaaactaatacattgtctagcattgatttggttcctgtgcatatgtattttcactatgtgctcccctccccagatcttaattaaaccagattttgcaattc

SEQ ID NO: 16423 - DNA, 1852 bp, Homo sapiens
  source 1..1852: mol_type = unassigned DNA
ctgggctgaggcggaggcaggggagttgcagcgcgcgaggctccgtgagtgtgtctcctgcgcgctgagaggcggggggaggcggaggaccaggaggaggaggaggaggaggaggagggggagaatgcccggagccgccgccgctgccgccgccgccgccgccgcgatgctcccggctcaggaggctgccaagctgtaccacaccaactatgtgcggaactcgcgggccatcggcgtgctgtgggccatcttcaccatctgctttgccatcgtcaacgtggtgtgcttcatccagccctactggataggcgacggcgtggacaccccgcaagccggctatttcgggctcttccactactgcatcggcaacggcttctcccgggagctgacctgcaggggcagcttcacggacttctccacgctgccctcgggcgccttcaaagccgcctccttctttatcggcctctccatgatgctcatcattgcctgcatcatttgctttaccctcttcttcttctgcaacacggccactgtgtacaagatatgtgcctggatgcagctcacctccgctgcctgccttgtgcttggctgtatgattttccctgatggctgggactcagatgaagtaaaacggatgtgtggagaaaagacagacaagtacactcttggggcttgctcagtccgctgggcatacatcctggctattattggaattttggatgccctgatcctctcatttctagcatttgtgcttggtaatcgacaagacagcttgatggcagaggaactgaaggcagaaaacaaagttctgctaagccaatattctctagaatgagcacaaaacaaatcgaataacagctaaacaaatcgaataacagctaaacgaatcgaataacagcttttgtacatcaacatcaagaaggaatacgcctgagagagatcagagtatatagatgaatatgaacaagaatggaacattcacttgtcaacgcactttctaaatctagatcagcagagatgggagtgattttctggaaagagatgtgatcatggattaaacaccagctcattggaaactcattggatgagatcagaaaacgttcatgaaaaatcatattcaggaaataaggaagaggaatataaatgctctagagttaacatgtaaaatatatacgtactgaggtttgtaaactgtcctttttaaatcaaactgaaaacaaaaagctttaacctttcaacagaatttttaaaaaggcagttagttctaaattattcctatctcaatagccaagaggctgatcaagcgtcatttattgaggaagcatcttagaaaatgcctctgaatgttttcataggagccgtgacctttggttcttcatctctaccattcatttacttcactgtgtaattagttacaaccactcagttattaagagacgtaacgcttcaaactttttaccaagtctgtgttctgtttaatctgtccatacaagttattactgagaaagtgtttatgccatatactattactccatcaagctgtatattacaggaagtacatctttacatcataggttcccaagcaacatagatttccctatctttcaggaaacagcatcaaggaactctgaaaaatatagaaaaagttcattttcaccttggaagctcacgtgtaatattataggctactatcaaataaacactttttttctaattctccctagtatatgcataggaatttaatatactttataaataagtatctaaaatgtctcctacttttttcctatttctttgccatacatgttatcagaaatccatgtcttctatttcccttactgatgggcactca

SEQ ID NO: 16424 - DNA, 3174 bp, Homo sapiens
  source 1..3174: mol_type = unassigned DNA
ctgggctgaggcggaggcaggggagttgcagcgcgcgaggctccgtgagtgtgtctcctgcgcgctgagaggcggggggaggcggaggaccaggaggaggaggaggaggaggaggagggggagaatgcccggagccgccgccgctgccgccgccgccgccgccgcgatgctcccggctcaggaggctgccaagctgtaccacaccaactatgtgcggaactcgcgggccatcggcgtgctgtgggccatcttcaccatctgctttgccatcgtcaacgtggtgtgcttcatccagccctactggataggcgacggcgtggacaccccgcaagccggctatttcgggctcttccactactgcatcggcaacggcttctcccgggagctgacctgcaggggcagcttcacggacttctccacgctgccctcgggcgccttcaaagccgcctccttctttatcggcctctccatgatgctcatcattgcctgcatcatttgctttaccctcttcttcttctgcaacacggccactgtgtacaagatatgtgcctggatgcagctcacctccggtgactgccttgtgctttttgatttgcatttccctgatggctgggactcagatgaagtaaaacggatgtgtggagaaaagacagacaagtacactcttggggcttgctcagtccgctgggcatacatcctggctattattggaattttggatgccctgatcctctcatttctagcatttgtgcttggtaatcgacaagacagcttgatggcagaggaactgaaggcagaaaacaaagttctgctaagccaatattctctagaatgagcacaaaacaaatcgaataacagctaaacaaatcgaataacagctaaacgaatcgaataacagcttttgtacatcaacatcaagaaggaatacgcctgagagagatcagagtatatagatgaatatgaacaagaatggaacattcacttgtcaacgcactttctaaatctagatcagcagagatgggagtgattttctggaaagagatgtgatcatggattaaacaccagctcattggaaactcattggatgagatcagaaaacgttcatgaaaaatcatattcaggaaataaggaagaggaatataaatgctctagagttaacatgtaaaatatatacgtactgaggtttgtaaactgtcctttttaaatcaaactgaaaacaaaaagctttaacctttcaacagaatttttaaaaaggcagttagttctaaattattcctatctcaatagccaagaggctgatcaagcgtcatttattgaggaagcatcttagaaaatgcctctgaatgttttcataggagccgtgacctttggttcttcatctctaccattcatttacttcactgtgtaattagttacaaccactcagttattaagagacgtaacgcttcaaactttttaccaagtctgtgttctgtttaatctgtccatacaagttattactgagaaagtgtttatgccatatactattactccatcaagctgtatattacaggaagtacatctttacatcataggttcccaagcaacatagatttccctatctttcaggaaacagcatcaaggaactctgaaaaatatagaaaaagttcattttcaccttggaagctcacgtgtaatattataggctactatcaaataaacactttttttctaattctccctagtatatgcataggaatttaatatactttataaataagtatctaaaatgtctcctacttttttcctatttctttgccatacatgttatcagaaatccatgtcttctatttcccttactgatgggcactcatttttatttttttaaaaatcattccattaaacatatttctaaataatagtaagtggtactaacaaaataaataataatttaatagccttagaaataaatgactgtatacttatacaggttgaaaaaaactcggtaggaataagttacctttttgtttactaatgttggtttcaaaaatactcagattcattttagttggctgacatctggaagtagttaacaactaaccagtggacttcaacaatcatttgctcccaggcttcccccatcatcaccctcaccacatatcctgctaatatccaacaacaaacaaatatttaatattgaaatagcccattgcctgagaatgaacacaagctaaaatacatgcaagggtacttaatggaagccaaaccatgttctatacctaaggagaaaacatggacatgtagaatgcttttattcatgtattcaaaatcagaacaaatcagtgtatatcactagaacatcagatggaggataacacaagaagtgatacagatcagggttcacttctcttaccctctctctgttaggaccacattcctattttagccaaatgtttctggtacgggccatcttttcaccataaatggcattatgtttcaaatggctaaaagcatattatgggtatgctcaaaggagtaaaacccaattcacagagatgtggcttttctaaagaaccaaattaagggaatacttagtatctacaactaaagtattagtcattctgaggattatttgttgctttaagtattagctccctactacatccataacaccctacttactaaatttaattacacacaacttttcaagaattcgtattttatttgaagggaggtacctgtctactttatctacaataaaaacaaagggtattggctttctctaatccatgcaaactacaaattccatcgggagtcctacatcactaacagtggtatgaacaaaactaagaaagtacttcctatccacatgtgaatgttttaaaaaagtttttgccataaaacctaagtgtaatttagcataccacagtgctctgaagatgggtcattgacgatgtaccatttgtatataggtaatacacatgtaaatcactaattgttaattaaatataagaagtaggtttttatctttttaaaaaaaaaacaaaaaaggtgactccctttctcattctgttctgttgtattgcgtccaaaagttgtgtgtaatttttttaaggtccaagaaatgtaaagaaatttgttggaatacctgaatttctgtaaaaaaataaaaataaaaataagattttgttactt

SEQ ID NO: 16425 - DNA, 1379 bp, Homo sapiens
  source 1..1379: mol_type = unassigned DNA
gtgagtgtgtctcctgcgcgctgagaggcggggggaggcggaggaccaggaggaggaggaggaggaggaggagggggagaatgcccggagccgccgccgctgccgccgccgccgccgccgcgatgctcccggctcaggaggctgccaagctgtaccacaccaactatgtgcggaactcgcgggccatcggcgtgctgtgggccatcttcaccatctgctttgccatcgtcaacgtggtgtgcttcatccagccctactggataggcgacggcgtggacaccccgcaagccggctatttcgggctcttccactactgcatcggcaacggcttctcccgggagctgacctgcaggggcagcttcacggacttctccacgctgccctcgggcgccttcaaagccgcctccttctttatcggcctctccatgatgctcatcattgcctgcatcatttgctttaccctcttcttcttctgcaacacggccactgtgtacaagatatgtgcctggatgcagctcacctccggtgactgccttgtgctttttgatttgcatttccctgatggctgggactcagatgaagtaaaacggatgtgtggagaaaagacagacaagtacactcttggggcttgctcagtccgctgggcatacatcctggctattattggaattttggatgccctgatcctctcatttctagcatttgtgcttggtaatcgacaagacagcttgatggcagaggaactgaaggcagaaaacaaagatgatggaaatgcttaaggcaaactaaggtagtgtgagaccacaccatttctgctaagccaatattctctagaatgagcacaaaacaaatcgaataacagctaaacaaatcgaataacagctaaacgaatcgaataacagcttttgtacatcaacatcaagaaggaatacgcctgagagagatcagagtatatagatgaatatgaacaagaatggaacattcacttgtcaacgcactttctaaatctagatcagcagagatgggagtgattttctggaaagagatgtgatcatggattaaacaccagctcattggaaactcattggatgagatcagaaaacgttcatgaaaaatcatattcaggaaataaggaagaggaatataaatgctctagagttaacatgtaaaatatatacgtactgaggtttgtaaactgtcctttttaaatcaaactgaaaacaaaaagctttaacctttcaacagaatttttaaaaaggcagttagttctaaattattcctatctcaatagccaagaggctgatcaagcgtcatttattgaggaagcatcttagaaaatgcctctgaatgttttcataggagccgtgacctttggttct

SEQ ID NO: 16426 - DNA, 2147 bp, Homo sapiens
  source 1..2147: mol_type = unassigned DNA
gggcgctggccgcggtgctgaaacggcgccctccgcggacggaggagggggcggggctctcgggagccgtgagccgggaagagggagacgggcagggcggcgccagcaggccctggtgggcttgggaggaggcaggagactggagacagcctcggctagagcggacacaggcacctggcaagctttccttgaccaaatcaaggttgtccttgtcctattaagcctcttccccttgccttgaagggacctcacctggtgccctgacctcagcctcctccccaaaccccgctggggagtgacctgcttctaggcctccatccacaaagctacggacttgcagcccacgggaccccagcccagggcctgctgccctcaccatggtgaaattgctgccggcccaggaggcagccaagatctaccataccaactatgtgcggaactcgcgagccgtgggcgtgatgtggggtaccctcaccatctgcttctccgtactggtcatggccctcttcatccagccctactggatcggcgacagcgtcaacacaccgcaggcaggctacttcggccttttctcctactgcgtgggtaacgtgctgtcctccgagctcatctgcaagggcggccccctagacttctcctccatcccctctagagccttcaagactgccatgttctttgtggccttgggcatgttcctcatcattggctccatcatctgcttcagcctgttcttcatctgcaacacggccacagtctataagatctgtgcatggatgcagctggctgcggccacaggcctaatgattggctgcctggtctaccctgatggttgggactcaagtgaggtgcggcgcatgtgtggggagcagacgggcaagtacacgctgggccactgcaccatccgctgggccttcatgctggccatcctcagcattggcgacgccctcatcctctccttcctggccttcgtgttgggctaccggcaggacaagctcctccctgacgactacaaggcagatggaaccgaggaggtgtgaagcagctgaagggtcggtcatctatttcccagacacaggaaaactagggaatcaaattcttcagagataagaacttgttcttccaagtttccttgttcctggctactataggcctgaagcctgaagccttttattataacactaaaactggacagtctcctgagacaagacctcctactgtactctttctggggaagcagaactgcagtgacccacttcaaagatattcagaggctgagcggtgcagggagtgctcagttgctggggatgggatccaagtccatttcttagttccacacagcagcaaatcgcttcaccttcttgaagcctctcctctgtaaagcgagagggctaaatgggtccatctctaggggccttccctcccaggtctgtgtctgatagcatacacacacacatatatatacacacacacacacacacacacacacacacacacacatacatacacacacacatatatatacacacacacacacacacacacacacacactctctctctctctcaaacacacacaaatgcccaaccagctctaagagggcactgaagaggtggctggacatgtgctgggtcatttttagggtgaggtgtagggggtcttttgcttctcccttctcatattttgttttcttattgctgctcagaggggggtaaggaatggaggggccatcagaacttgaatcctttaacatccaccaggaagttttatgaagagtgggtgataggatctaaaatctctgcagacttttttcctcccgggagccaaatatcacatttccttatggtgcccacactgactcaaccagaactggctaccagcttcagaaatgtgttacttatgttcaagtaatttgttataggaatagatgacatttttttttttcaaaaactttggatttggcatatagtcatctatagggggattggttccaggatcccctgcagatgccaaaatacatggatgcccaagtcctcagctaaaaatagcgtagtatttgcatataacctatgcacatcctcctgtatactttaaatcatctctagattacttataatacctaatacaatgtaaatgctatgtaaatactc

SEQ ID NO: 16427 - DNA, 1038 bp, Homo sapiens
  source 1..1038: mol_type = unassigned DNA
ggggcgctggccgcggtgctgaaacggcgccctccgcggacggaggagggggcggggctctcgggagccgtgagccgggaagagggagacgggcagggcggcgccagcaggccctggtgggcttgggaggaggcaggagactggagacagcctcggctagagcggacacaggcacctggcaagctttccttgaccaaatcaaggttgtccttgtcctattaagcctcttccccttgccttgaagggacctcacctggtgccctgacctcagcctcctccccaaaccccgctggggagtgacctgcttctaggcctccatccacaaagctacggacttgcagcccacgggaccccagcccagggcctgctgccctcaccatggtgaaattgctgccggcccaggaggcagccaagatctaccataccaactatgtgcggaactcgcgagccgtgggcgtgatgtggggtaccctcaccatctgcttctccgtactggtcatggccctcttcatccagccctactggatcggcgacagcgtcaacacaccgcaggcaggctacttcggccttttctcctactgcgtgggtaacgtgctgtcctccgagctcatctgcaagggcggccccctagacttctcctccatcccctctagagccttcaagactgccatgttctttgtggccttgggcatgttcctcatcattggctccatcatctgcttcagcctgttcttcatctgcaacacggccacagtctataagatctgtgcatggatgcagctggctgcggccacaggcctaatgattggctgcctggtctaccctgatggttgggactcaagtgaggtgcggcgcatgtgtggggagcagacgggcaagtacacgctgggccactgcaccatccgctgggccttcatgctggccatcctcagcattggcgacgccctcatcctctccttcctggccttcgtgttgggctaccggcaggacaagctcctccctgacgactacaaggcagatggaaccgaggaggtgtga

SEQ ID NO: 16428 - DNA, 1961 bp, Homo sapiens
  source 1..1961: mol_type = unassigned DNA
gatgtcgcaagcaggttccagtccctgtgcctccccttcccgctcccaggaacccatccagcctcaggaactgcccccagccatcgagccttggctacttaagggacctgggcccaatccacagctgggacagtcctggcccactgcactgggaatctaggatgggggccttggccagagccctgccgtccatactgctggcattgctgcttacgtccaccccagaggctctgggtgccaaccccggcttggtcgccaggatcaccgacaagggactgcagtatgcggcccaggaggggctattggctctgcagagtgagctgctcaggatcacgctgcctgacttcaccggggacttgaggatcccccacgtcggccgtgggcgctatgagttccacagcctgaacatccacagctgtgagctgcttcactctgcgctgaggcctgtccctggccagggcctgagtctcagcatctccgactcctccatccgggtccagggcaggtggaaggtgcgcaagtcattcttcaaactacagggctcctttgatgtcagtgtcaagggcatcagcatttcggtcaacctcctgttgggcagcgagtcctccgggaggcccacagttactgcctccagctgcagcagtgacatcgctgacgtggaggtggacatgtcgggagacttggggtggctgttgaacctcttccacaaccagattgagtccaagttccagaaagtactggagagcaggatttgcgaaatgatccagaaatcggtgtcctccgatctacagccttatctccaaactctgccagttacaacagagattgacagtttcgccgacattgattatagcttagtggaagcccctcgggcaacagcccagatgctggaggtgatgtttaagggtgaaatctttcatcgtaaccaccgttctccagttaccctccttgctgcagtcatgagccttcctgaggaacacaacaaaatggtctactttgccatctcggattatgtcttcaacacggccagcctggtttatcatgaggaaggatatctgaacttctccatcacagatgacatgataccgcctgactctaatatccgactgaccaccaagtccttccgacccttcgtcccacggttagccaggctctaccccaacatgaacctggaactccagggatcagtgccctctgctccgctcctgaacttcagccctgggaatctgtctgtggacccctatatggagatagatgcctttgtgctcctgcccagctccagcaaggagcctgtcttccggctcagtgtggccactaatgtgtccgccaccttgaccttcaataccagcaagatcactgggttcctgaagccaggaaaggtaaaagtggaactgaaagaatccaaagttggactattcaatgcagagctgttggaagcgctcctcaactattacatccttaacaccttctaccccaagttcaatgataagttggccgaaggcttcccccttcctctgctgaagcgtgttcagctctacgaccttgggctgcagatccataaggacttcctgttcttgggtgccaatgtccaatacatgagagtttgaggacaagaaagatgaagcttggaggtcacagctggatctgcttgttgcatttccagctgtgcagcacgtctcagagattcttgaagaatgaagacatttctgctctcagctccgggggtgaggtgtgcctggcctctgcctccaccctcctcctcttcaccaggtgcatgcatgccctctctgagtctggactttgcttcccctccaggagggaccaccctccctgactggcctgggatatctttacaagcaggcactgtatttttttattcgccatctgatccccatgcctagcagagtgctggcacttagtaggtcctcaataaatatttattaaatgatgagatgatggaa

SEQ ID NO: 16429 - DNA, 1587 bp, Homo sapiens
  source 1..1587: mol_type = unassigned DNA
gggacagtcctggcccactgcactgggaatctaggatgggggccttggccagagccctgccgtccatactgctggcattgctgcttacgtccaccccagaggctctgggtgccaaccccggcttggtcgccaggatcaccgacaagggactgcagtatgcggcccaggaggggctattggctctgcagagtgagctgctcaggatcacgctgcctgacttcaccggggacttgaggatcccccacgtcggccgtgggcgctatgagttccacagcctgaacatccacagctgtgagctgcttcactctgcgctgaggcctgtccctggccagggcctgagtctcagcatctccgactcctccatccgggtccagggcaggtggaaggtgcgcaagtcattcttcaaactacagggctcctttgatgtcagtgtcaagggcatcagcatttcggtcaacctcctgttgggcagcgagtcctccgggaggcccacagttactgcctccagctgcagcagtgacatcgctgacgtggaggtggacatgtcgggagacttggggtggctgttgaacctcttccacaaccagattgagtccaagttccagaaagtactggagagcaggatttgcgaaatgatccagaaatcggtgtcctccgatctacagccttatctccaaactctgccagttacaacagagattgacagtttcgccgacattgattatagcttagtggaagcccctcgggcaacagcccagatgctggaggtgatgtttaagggtgaaatctttcatcgtaaccaccgttctccagttaccctccttgctgcagtcatgagccttcctgaggaacacaacaaaatggtctactttgccatctcggattatgtcttcaacacggccagcctggtttatcatgaggaaggatatctgaacttctccatcacagatgacatgataccgcctgactctaatatccgactgaccaccaagtccttccgacccttcgtcccacggttagccaggctctaccccaacatgaacctggaactccagggatcagtgccctctgctccgctcctgaacttcagccctgggaatctgtctgtggacccctatatggagatagatgcctttgtgctcctgcccagctccagcaaggagcctgtcttccggctcagtgtggccactaatgtgtccgccaccttgaccttcaataccagcaagatcactgggttcctgaagccaggaaaggtaaaagtggaactgaaagaatccaaagttggactattcaatgcagagctgttggaagcgctcctcaactattacatccttaacaccttctaccccaagttcaatgataagttggccgaaggcttcccccttcctctgctgaagcgtgttcagctctacgaccttgggctgcagatccataaggacttcccctccaggagggaccaccctccctgactggcctgggatatctttacaagcaggcactgtatttttttattcgccatctgatccccatgcctagcagagtgctggcacttagtaggtcctcaataaatatttattaaatgatgag

SEQ ID NO: 16430 - DNA, 2630 bp, Homo sapiens
  source 1..2630: mol_type = unassigned DNA
gtttctctccctgcccccgcgacttcgcgcaagatccgggaaggacacccgaggcccctgggagaccctggggaggtgaaaatcagagagcgaagcgggccgtggcccctaggcctgacccctccccgcggggtaaggcgggcaccccgcgagcgcaggggtcctcttactgctgatggcacccagctctgggcccagacgccgctcaccgtccaccgccggtgctgggtaaaatgtcggttccaggaccttaccaggcggccactgggccttcctcagcaccatccgcacctccatcctatgaagagacagtggctgttaacagttattaccccacacctccagctcccatgcctgggccaactacggggcttgtgacggggcctgatgggaagggcatgaatcctccttcgtattatacccagccagcgcccatccccaataacaatccaattaccgtgcagacggtctacgtgcagcaccccatcacctttttggaccgccctatccaaatgtgttgtccttcctgcaacaagatgatcgtgagtcagctgtcctataacgccggtgctctgacctggctgtcctgcgggagcctgtgcctgctggggtgcatagcgggctgctgcttcatccccttctgcgtggatgccctgcaggacgtggaccattactgtcccaactgcagagctctcctgggcacctacaagcgtttgtaggactcagccagacgtggagggagccgggtgccgcaggaagtcctttccacctctcatccagcttcacgcctggtggaggttctgccctggtggtctcacctctccagggggcccaccttcatgtcttcttttggggggaatacgtcgcaaaactaacaaatctccaaaccccagaaattgctgcttggagtcgtgcataggacttgcaaagacattccccttgagtgtcagttccacggtttcctgcctccctgagaccctgagtcctgccatctaactgtgatcattgccctatccgaatatcttcctgtgatctgccatcagtggctcttttttcctgcttccatgggcctttctggtggcagtctcaaactgagaagccacagttgccttatttttgaggctgttctgcccagagctcggctgaaccagcctttagtgcctaccattatcttatccgtctcttcccgtccctgatgacaaagatcttgccttacagactttacaggcttggctttgagattctgtaactgcagacttcattagcacacagattcactttaatttcttaattttttttttaaatacaaggagggggctattaacacccagtacagacatatccacaaggtcgtaaatgcatgctagaaaaatagggctggatcttatcactgccctgtctccccttgtttctctgtgccagatcttcagtgcccctttccatacagggatttttttctcatagagtaattatatgaacagtttttatgacctccttttggtctgaaatacttttgaacagaatttcttttttttaaaaaaaaacagagatggggtcttactatgttgcccaggctggtgtcgaactcctgggctcaagcgatccttctgccttggcctcccgaagtgctgggattgcaggcataagctaccatgctgggcctgaacataatttcaagaggaggatttataaaaccattttctgtaatcaaatgattggtgtcattttcccatttgccaatgtagtctcacttaaaaaaaaaaaaaagaaaaagaaatggataatttcatctactgcctttacttggggttaatgtgattcttaaacaccttcatcatggaactctcagagtggggtccgttttggtttcctggtggtgggttttgaaagataagggaaagcacattttgagcatgtctgggtaccatggtgcggatgcttgggaaccagaactgtttcagaggaatctaaagtctgattttagttttcagagacacagcttgttgtaaaacatgagaagacatgatttctaggactcaagcagcaagccaggattctaggttggctgctgtgtcatctttgaagtcaagacaaagctgggctcgaccttcaagggtcctcgttttgataatacttcagaatagggaactcatgtgaatactactatgtagaaataaaacctagaccttgagcgaacatctgtatattggttgaaaacgatagtggtaaccattgatcccccttcatttgatgtttggaaaattccagtaattatcatttttgcaacgaatatggataccacatagtactttggtgttacctgcttttgaaaaataaagtctttggttcacccggtgaactatttatgagttcttttggtgtgaagaaagggctcatgttgcatttccagccattgctacaaagaacctttatttgttcagtaacggtagaaaatccttcccgattaaaaacttcagacttgctgaatatcctgcaatgtcaagatgaccgatgttgagttgggtggatttgctaacgagtcagatttgaacatgaggctattggaacccaataggcgtcattgatggcggcaagccatagctttcaagttttaataaaatgcacaaaag

SEQ ID NO: 16431 - DNA, 1573 bp, Homo sapiens
  source 1..1573: mol_type = unassigned DNA
gagaggccagctcagacctcccggctcgacaggcggcgcgggcggcggtaaaatgtcggttccaggaccttaccaggcggccactgggccttcctcagcaccatccgcacctccatcctatgaagagacagtggctgttaacagttattaccccacacctccagctcccatgcctgggccaactacggggcttgtgacggggcctgatgggaagggcatgaatcctccttcgtattatacccagccagcgcccatccccaataacaatccaattaccgtgcagacggtctacgtgcagcaccccatcacctttttggaccgccctatccaaatgtgttgtccttcctgcaacaagatgatcgtgagtcagctgtcctataacgccggtgctctgacctggctgtcctgcgggagcctgtgcctgctgggtgtgcatagcgggctgctgcttcatccccttctgcgtggatgccctgcaggacgtggaccattactgtcccaactgcagagctctcctgggcacctacaagcgtttgtaggactcagccagacgtggagggagccgggtgccgcaggaagtcctttccacctctcatccagcttcacgcctggtggaggttctgccctggtggtctcacctctccagggggcccaccttcatgtcttcttttggggggaatacgtcgcaaaactaacaaatctccaaaccccagaaattgctgcttggagtcgtgcataggacttgcaaagacattccccttgagtgtcagttccacggtttcctgcctccctgagaccctgagtcctgccatctaactgtgatcattgccctatccgaatatcttcctgtgatctgccatcagtggctcttttttcctgcttccatgggcctttctggtggcagtctcaaactgagaagccacagttgccttatttttgaggctgttctgcccagagctcggctgaaccagcctttagtgcctaccattatcttatccgtctcttcccgtccctgatgacaaagatcttgccttacagactttacaggcttggctttgagattctgtaactgcagacttcattagcacacagattcactttaatttcttaattttttttttaaatacaaggagggggctattaacacccagtacagacatatccacaaggtcgtaaatgcatgctagaaaaatagggctggatcttatcactgccctgtctccccttgtttctctgtgccagatcttcagtgcccctttccatacagggatttttttctcatagagtaattatatgaacagtttttatgacctccttttggtctgaaatacttttgaacagaatttcttttttttaaaaaaaaacagagatggggtcttactatgttgcccaggctggtgtcgaactcctgggctcaagcgatccttctgccttggcctcccgaagtgctgggattgcaggcataagctaccatgctgggcctgaacataatttcaagaggaggatttataaaaccattttctgtaatcaaatgattggtgtcattttcccatttgccaatgtagtctcactt

SEQ ID NO: 16432 - DNA, 2565 bp, Homo sapiens
  source 1..2565: mol_type = unassigned DNA
ccttttctcggggcgcccgagaggccagctcagacctcccggctcgacaggcggcgcgggcggcggtaaaatgtcggttccaggaccttaccaggcggccactgggccttcctcagcaccatccgcacctccatcctatgaagagacagtggctgttaacagttattaccccacacctccagctcccatgcctgggccaactacggggcttgtgacggggcctgatgggaagggcatgaatcctccttcgtattatacccagccagcgcccatccccaataacaatccaattaccgtgcagacggtctacgtgcagcaccccatcacctttttggaccgccctatccaaatgtgttgtccttcctgcaacaagatgatcgtgagtcagctgtcctataacgccggtgctctgacctggctgtcctgcgggagcctgtgcctgctggggcaggagtgcagtggtacgatcgtagctctccgcagctttgatctcctgggctcctgcaatccgcccagctcagcctcctgagtacctgggaccacaggtgcatagcgggctgctgcttcatccccttctgcgtggatgccctgcaggacgtggaccattactgtcccaactgcagagctctcctgggcacctacaagcgtttgtaggactcagccagacgtggagggagccgggtgccgcaggaagtcctttccacctctcatccagcttcacgcctggtggaggttctgccctggtggtctcacctctccagggggcccaccttcatgtcttcttttggggggaatacgtcgcaaaactaacaaatctccaaaccccagaaattgctgcttggagtcgtgcataggacttgcaaagacattccccttgagtgtcagttccacggtttcctgcctccctgagaccctgagtcctgccatctaactgtgatcattgccctatccgaatatcttcctgtgatctgccatcagtggctcttttttcctgcttccatgggcctttctggtggcagtctcaaactgagaagccacagttgccttatttttgaggctgttctgcccagagctcggctgaaccagcctttagtgcctaccattatcttatccgtctcttcccgtccctgatgacaaagatcttgccttacagactttacaggcttggctttgagattctgtaactgcagacttcattagcacacagattcactttaatttcttaattttttttttaaatacaaggagggggctattaacacccagtacagacatatccacaaggtcgtaaatgcatgctagaaaaatagggctggatcttatcactgccctgtctccccttgtttctctgtgccagatcttcagtgcccctttccatacagggatttttttctcatagagtaattatatgaacagtttttatgacctccttttggtctgaaatacttttgaacagaatttcttttttttaaaaaaaaacagagatggggtcttactatgttgcccaggctggtgtcgaactcctgggctcaagcgatccttctgccttggcctcccgaagtgctgggattgcaggcataagctaccatgctgggcctgaacataatttcaagaggaggatttataaaaccattttctgtaatcaaatgattggtgtcattttcccatttgccaatgtagtctcacttaaaaaaaaaaaaaagaaaaagaaatggataatttcatctactgcctttacttggggttaatgtgattcttaaacaccttcatcatggaactctcagagtggggtccgttttggtttcctggtggtgggttttgaaagataagggaaagcacattttgagcatgtctgggtaccatggtgcggatgcttgggaaccagaactgtttcagaggaatctaaagtctgattttagttttcagagacacagcttgttgtaaaacatgagaagacatgatttctaggactcaagcagcaagccaggattctaggttggctgctgtgtcatctttgaagtcaagacaaagctgggctcgaccttcaagggtcctcgttttgataatacttcagaatagggaactcatgtgaatactactatgtagaaataaaacctagaccttgagcgaacatctgtatattggttgaaaacgatagtggtaaccattgatcccccttcatttgatgtttggaaaattccagtaattatcatttttgcaacgaatatggataccacatagtactttggtgttacctgcttttgaaaaataaagtctttggttcacccggtgaactatttatgagttcttttggtgtgaagaaagggctcatgttgcatttccagccattgctacaaagaacctttatttgttcagtaacggtagaaaatccttcccgattaaaaacttcagacttgctgaatatcctgcaatgtcaagatgaccgatgttgagttgggtggatttgctaacgagtcagatttgaacatgaggctattggaacccaataggcgtcattgatggcggcaagccatagctttcaagttttaataaaatgcacaaaag

SEQ ID NO: 16433 - DNA, 2357 bp, Homo sapiens
  source 1..2357: mol_type = unassigned DNA
gctaaaaactttaccatcttcccagttcactcccagtcggtcttaggagacaggaccgctattgtgcccattttgcagacaggaagccgagctcagagaggatgggtaacatgcccgaaggcacagagagtgtcttggtctgtccggacgcgtctgtagagttacaggaagagaagggccgccctccagagggccgggagcgccccagcgcgggtccggggtcgaggtaaaatgtcggttccaggaccttaccaggcggccactgggccttcctcagcaccatccgcacctccatcctatgaagagacagtggctgttaacagttattaccccacacctccagctcccatgcctgggccaactacggggcttgtgacggggcctgatgggaagggcatgaatcctccttcgtattatacccagccagcgcccatccccaataacaatccaattaccgtgcagacggtctacgtgcagcaccccatcacctttttggaccgccctatccaaatgtgttgtccttcctgcaacaagatgatcgtgagtcagctgtcctataacgccggtgctctgacctggctgtcctgcgggagcctgtgcctgctggggtgcatagcgggctgctgcttcatccccttctgcgtggatgccctgcaggacgtggaccattactgtcccaactgcagagctctcctgggcacctacaagcgtttgtaggactcagccagacgtggagggagccgggtgccgcaggaagtcctttccacctctcatccagcttcacgcctggtggaggttctgccctggtggtctcacctctccagggggcccaccttcatgtcttcttttggggggaatacgtcgcaaaactaacaaatctccaaaccccagaaattgctgcttggagtcgtgcataggacttgcaaagacattccccttgagtgtcagttccacggtttcctgcctccctgagaccctgagtcctgccatctaactgtgatcattgccctatccgaatatcttcctgtgatctgccatcagtggctcttttttcctgcttccatgggcctttctggtggcagtctcaaactgagaagccacagttgccttatttttgaggctgttctgcccagagctcggctgaaccagcctttagtgcctaccattatcttatccgtctcttcccgtccctgatgacaaagatcttgccttacagactttacaggcttggctttgagattctgtaactgcagacttcattagcacacagattcactttaatttcttaattttttttttaaatacaaggagggggctattaacacccagtacagacatatccacaaggtcgtaaatgcatgctagaaaaatagggctggatcttatcactgccctgtctccccttgtttctctgtgccagatcttcagtgcccctttccatacagggatttttttctcatagagtaattatatgaacagtttttatgacctccttttggtctgaaatacttttgaacagaatttcttttttttaaaaaaaaacagagatggggtcttactatgttgcccaggctggtgtcgaactcctgggctcaagcgatccttctgccttggcctcccgaagtgctgggattgcaggcataagctaccatgctgggcctgaacataatttcaagaggaggatttataaaaccattttctgtaatcaaatgattggtgtcattttcccatttgccaatgtagtctcacttaaaaaaaaaaaaaagaaaaagaaatggataatttcatctactgcctttacttggggttaatgtgattcttaaacaccttcatcatggaactctcagagtggggtccgttttggtttcctggtggtgggttttgaaagataagggaaagcacattttgagcatgtctgggtaccatggtgcggatgcttgggaaccagaactgtttcagaggaatctaaagtctgattttagttttcagagacacagcttgttgtaaaacatgagaagacatgatttctaggactcaagcagcaagccaggattctaggttggctgctgtgtcatctttgaagtcaagacaaagctgggctcgaccttcaagggtcctcgttttgataatacttcagaatagggaactcatgtgaatactactatgtagaaataaaacctagaccttgagcgaacatctgtatattggttgaaaacgatagtggtaaccattgatcccccttcatttgatgtttggaaaattccagtaattatcatttttgcaacgaatatggataccacatagtactttggtgttacctgcttttgaaaaataaagtctttggttcacccggtgaa

SEQ ID NO: 16434 - DNA, 6414 bp, Homo sapiens
  source 1..6414: mol_type = unassigned DNA
ctgggattgggacacactttctgggcactgctggccagtcccaaaatggaacataaggaagtggttcttctacttcttttatttctgaaatcagcagcacctgagcaaagccatgtggtccaggattgctaccatggtgatggacagagttatcgaggcacgtactccaccactgtcacaggaaggacctgccaagcttggtcatctatgacaccacatcaacataataggaccacagaaaactacccaaatgctggcttgatcatgaactactgcaggaatccagatgctgtggcagctccttattgttatacgagggatcccggtgtcaggtgggagtactgcaacctgacgcaatgctcagacgcagaagggactgccgtcgcgcctccgactgttaccccggttccaagcctagaggctccttccgaacaagcaccgactgagcaaaggcctggggtgcaggagtgctaccatggtaatggacagagttatcgaggcacatactccaccactgtcacaggaagaacctgccaagcttggtcatctatgacaccacactcgcatagtcggaccccagaatactacccaaatgctggcttgatcatgaactactgcaggaatccagatgctgtggcagctccttattgttatacgagggatcccggtgtcaggtgggagtactgcaacctgacgcaatgctcagacgcagaagggactgccgtcgcgcctccgactgttaccccggttccaagcctagaggctccttccgaacaagcaccgactgagcaaaggcctggggtgcaggagtgctaccatggtaatggacagagttatcgaggcacatactccaccactgtcacaggaagaacctgccaagcttggtcatctatgacaccacactcgcatagtcggaccccagaatactacccaaatgctggcttgatcatgaactactgcaggaatccagatgctgtggcagctccttattgttatacgagggatcccggtgtcaggtgggagtactgcaacctgacgcaatgctcagacgcagaagggactgccgtcgcgcctccgactgttaccccggttccaagcctagaggctccttccgaacaagcaccgactgagcagaggcctggggtgcaggagtgctaccacggtaatggacagagttatcgaggcacatactccaccactgtcactggaagaacctgccaagcttggtcatctatgacaccacactcgcatagtcggaccccagaatactacccaaatgctggcttgatcatgaactactgcaggaatccagatgctgtggcagctccttattgttatacgagggatcccggtgtcaggtgggagtactgcaacctgacgcaatgctcagacgcagaagggactgccgtcgcgcctccgactgttaccccggttccaagcctagaggctccttccgaacaagcaccgactgagcaaaggcctggggtgcaggagtgctaccatggtaatggacagagttatcgaggcacatactccaccactgtcacaggaagaacctgccaagcttggtcatctatgacaccacactcgcatagtcggaccccagaatactacccaaatgctggcttgatcatgaactactgcaggaatccagatgctgtggcagctccttattgttatacgagggatcccggtgtcaggtgggagtactgcaacctgacgcaatgctcagacgcagaagggactgccgtcgcgcctccgactgttaccccggttccaagcctagaggctccttccgaacaagcaccgactgagcaaaggcctggggtgcaggagtgctaccatggtaatggacagagttatcgaggcacatactccaccactgtcacaggaagaacctgccaagcttggtcatctatgacaccacactcgcatagtcggaccccagaatactacccaaatgctggcttgatcatgaactactgcaggaatccagatgctgtggcagctccttattgttatacgagggatcccggtgtcaggtgggagtactgcaacctgacgcaatgctcagacgcagaagggactgccgtcgcgcctccgactgttaccccggttccaagcctagaggctccttccgaacaagcaccgactgagcaaaggcctggggtgcaggagtgctaccatggtaatggacagagttatcgaggcacatactccaccactgtcacaggaagaacctgccaagcttggtcatctatgacaccacactcgcatagtcggaccccagaatactacccaaatgctggcttgatcatgaactactgcaggaatccagatgctgtggcagctccttattgttatacgagggatcccggtgtcaggtgggagtactgcaacctgacgcaatgctcagacgcagaagggactgccgtcgcgcctccgactgttaccccggttccaagcctagaggctccttccgaacaagcaccgactgagcagaggcctggggtgcaggagtgctaccacggtaatggacagagttatcgaggcacatactccaccactgtcactggaagaacctgccaagcttggtcatctatgacaccacactcgcatagtcggaccccagaatactacccaaatgctggcttgatcatgaactactgcaggaatccagatcctgtggcagccccttattgttatacgagggatcccagtgtcaggtgggagtactgcaacctgacacaatgctcagacgcagaagggactgccgtcgcgcctccaactattaccccgattccaagcctagaggctccttctgaacaagcaccaactgagcaaaggcctggggtgcaggagtgctaccacggaaatggacagagttatcaaggcacatacttcattactgtcacaggaagaacctgccaagcttggtcatctatgacaccacactcgcatagtcggaccccagcatactacccaaatgctggcttgatcaagaactactgccgaaatccagatcctgtggcagccccttggtgttatacaacagatcccagtgtcaggtgggagtactgcaacctgacacgatgctcagatgcagaatggactgccttcgtccctccgaatgttattctggctccaagcctagaggctttttttgaacaagcactgactgaggaaacccccggggtacaggactgctactaccattatggacagagttaccgaggcacatactccaccactgtcacaggaagaacttgccaagcttggtcatctatgacaccacaccagcatagtcggaccccagaaaactacccaaatgctggcctgaccaggaactactgcaggaatccagatgctgagattcgcccttggtgttacaccatggatcccagtgtcaggtgggagtactgcaacctgacacaatgcctggtgacagaatcaagtgtccttgcaactctcacggtggtcccagatccaagcacagaggcttcttctgaagaagcaccaacggagcaaagccccggggtccaggattgctaccatggtgatggacagagttatcgaggctcattctctaccactgtcacaggaaggacatgtcagtcttggtcctctatgacaccacactggcatcagaggacaacagaatattatccaaatggtggcctgaccaggaactactgcaggaatccagatgctgagattagtccttggtgttataccatggatcccaatgtcagatgggagtactgcaacctgacacaatgtccagtgacagaatcaagtgtccttgcgacgtccacggctgtttctgaacaagcaccaacggagcaaagccccacagtccaggactgctaccatggtgatggacagagttatcgaggctcattctccaccactgttacaggaaggacatgtcagtcttggtcctctatgacaccacactggcatcagagaaccacagaatactacccaaatggtggcctgaccaggaactactgcaggaatccagatgctgagattcgcccttggtgttataccatggatcccagtgtcagatgggagtactgcaacctgacgcaatgtccagtgatggaatcaactctcctcacaactcccacggtggtcccagttccaagcacagagcttccttctgaagaagcaccaactgaaaacagcactggggtccaggactgctaccgaggtgatggacagagttatcgaggcacactctccaccactatcacaggaagaacatgtcagtcttggtcgtctatgacaccacattggcatcggaggatcccattatactatccaaatgctggcctgaccaggaactactgcaggaatccagatgctgagattcgcccttggtgttacaccatggatcccagtgtcaggtgggagtactgcaacctgacacgatgtccagtgacagaatcgagtgtcctcacaactcccacagtggccccggttccaagcacagaggctccttctgaacaagcaccacctgagaaaagccctgtggtccaggattgctaccatggtgatggacggagttatcgaggcatatcctccaccactgtcacaggaaggacctgtcaatcttggtcatctatgataccacactggcatcagaggaccccagaaaactacccaaatgctggcctgaccgagaactactgcaggaatccagattctgggaaacaaccctggtgttacacaaccgatccgtgtgtgaggtgggagtactgcaatctgacacaatgctcagaaacagaatcaggtgtcctagagactcccactgttgttccagttccaagcatggaggctcattctgaagcagcaccaactgagcaaacccctgtggtccggcagtgctaccatggtaatggccagagttatcgaggcacattctccaccactgtcacaggaaggacatgtcaatcttggtcatccatgacaccacaccggcatcagaggaccccagaaaactacccaaatgatggcctgacaatgaactactgcaggaatccagatgccgatacaggcccttggtgttttaccatggaccccagcatcaggtgggagtactgcaacctgacgcgatgctcagacacagaagggactgtggtcgctcctccgactgtcatccaggttccaagcctagggcctccttctgaacaagactgtatgtttgggaatgggaaaggataccggggcaagaaggcaaccactgttactgggacgccatgccaggaatgggctgcccaggagccccatagacacagcacgttcattccagggacaaataaatgggcaggtctggaaaaaaattactgccgtaaccctgatggtgacatcaatggtccctggtgctacacaatgaatccaagaaaactttttgactactgtgatatccctctctgtgcatcctcttcatttgattgtgggaagcctcaagtggagccgaagaaatgtcctggaagcattgtaggggggtgtgtggcccacccacattcctggccctggcaagtcagtctcagaacaaggtttggaaagcacttctgtggaggcaccttaatatccccagagtgggtgctgactgctgctcactgcttgaagaagtcctcaaggccttcatcctacaaggtcatcctgggtgcacaccaagaagtgaacctcgaatctcatgttcaggaaatagaagtgtctaggctgttcttggagcccacacaagcagatattgccttgctaaagctaagcaggcctgccgtcatcactgacaaagtaatgccagcttgtctgccatccccagactacatggtcaccgccaggactgaatgttacatcactggctggggagaaacccaaggtacctttgggactggccttctcaaggaagcccagctccttgttattgagaatgaagtgtgcaatcactataagtatatttgtgctgagcatttggccagaggcactgacagttgccagggtgacagtggagggcctctggtttgcttcgagaaggacaaatacattttacaaggagtcacttcttggggtcttggctgtgcacgccccaataagcctggtgtctatgctcgtgtttcaaggtttgttacttggattgagggaatgatgagaaataattaattggacgggagacagagtgaagcatcaacctacttagaagctgaaacgtgggtaaggatttagcatgctggaaataatagacagcaatcaaacgaagacactgttcccagctaccagctatgccaaaccttggcatttttggtatttttgtgtataagcttttaaggtctgactgacaaattctgtattaaggtgtcatagctatgacatttgttaaaaataaactctgcacttattttgatttga

SEQ ID NO: 16435 - DNA, 6490 bp, Homo sapiens
  source 1..6490: mol_type = unassigned DNA
aggtacctttggggctggctttctcaaggaagcccagctccctgtgattgagaatgaagtgtgcaatcgcaatgtcctgggattgggacacactttctgggcactgctggccagtcccaaaatggaacataaggaagtggttcttctacttcttttatttctgaaatcagcagcacctgagcaaagccatgtggtccaggattgctaccatggtgatggacagagttatcgaggcacgtactccaccactgtcacaggaaggacctgccaagcttggtcatctatgacaccacatcaacataataggaccacagaaaactacccaaatgctggcttgatcatgaactactgcaggaatccagatgctgtggcagctccttattgttatacgagggatcccggtgtcaggtgggagtactgcaacctgacgcaatgctcagacgcagaagggactgccgtcgcgcctccgactgttaccccggttccaagcctagaggctccttccgaacaagcaccgactgagcaaaggcctggggtgcaggagtgctaccatggtaatggacagagttatcgaggcacatactccaccactgtcacaggaagaacctgccaagcttggtcatctatgacaccacactcgcatagtcggaccccagaatactacccaaatgctggcttgatcatgaactactgcaggaatccagatgctgtggcagctccttattgttatacgagggatcccggtgtcaggtgggagtactgcaacctgacgcaatgctcagacgcagaagggactgccgtcgcgcctccgactgttaccccggttccaagcctagaggctccttccgaacaagcaccgactgagcaaaggcctggggtgcaggagtgctaccatggtaatggacagagttatcgaggcacatactccaccactgtcacaggaagaacctgccaagcttggtcatctatgacaccacactcgcatagtcggaccccagaatactacccaaatgctggcttgatcatgaactactgcaggaatccagatgctgtggcagctccttattgttatacgagggatcccggtgtcaggtgggagtactgcaacctgacgcaatgctcagacgcagaagggactgccgtcgcgcctccgactgttaccccggttccaagcctagaggctccttccgaacaagcaccgactgagcagaggcctggggtgcaggagtgctaccacggtaatggacagagttatcgaggcacatactccaccactgtcactggaagaacctgccaagcttggtcatctatgacaccacactcgcatagtcggaccccagaatactacccaaatgctggcttgatcatgaactactgcaggaatccagatgctgtggcagctccttattgttatacgagggatcccggtgtcaggtgggagtactgcaacctgacgcaatgctcagacgcagaagggactgccgtcgcgcctccgactgttaccccggttccaagcctagaggctccttccgaacaagcaccgactgagcaaaggcctggggtgcaggagtgctaccatggtaatggacagagttatcgaggcacatactccaccactgtcacaggaagaacctgccaagcttggtcatctatgacaccacactcgcatagtcggaccccagaatactacccaaatgctggcttgatcatgaactactgcaggaatccagatgctgtggcagctccttattgttatacgagggatcccggtgtcaggtgggagtactgcaacctgacgcaatgctcagacgcagaagggactgccgtcgcgcctccgactgttaccccggttccaagcctagaggctccttccgaacaagcaccgactgagcaaaggcctggggtgcaggagtgctaccatggtaatggacagagttatcgaggcacatactccaccactgtcacaggaagaacctgccaagcttggtcatctatgacaccacactcgcatagtcggaccccagaatactacccaaatgctggcttgatcatgaactactgcaggaatccagatgctgtggcagctccttattgttatacgagggatcccggtgtcaggtgggagtactgcaacctgacgcaatgctcagacgcagaagggactgccgtcgcgcctccgactgttaccccggttccaagcctagaggctccttccgaacaagcaccgactgagcaaaggcctggggtgcaggagtgctaccatggtaatggacagagttatcgaggcacatactccaccactgtcacaggaagaacctgccaagcttggtcatctatgacaccacactcgcatagtcggaccccagaatactacccaaatgctggcttgatcatgaactactgcaggaatccagatgctgtggcagctccttattgttatacgagggatcccggtgtcaggtgggagtactgcaacctgacgcaatgctcagacgcagaagggactgccgtcgcgcctccgactgttaccccggttccaagcctagaggctccttccgaacaagcaccgactgagcagaggcctggggtgcaggagtgctaccacggtaatggacagagttatcgaggcacatactccaccactgtcactggaagaacctgccaagcttggtcatctatgacaccacactcgcatagtcggaccccagaatactacccaaatgctggcttgatcatgaactactgcaggaatccagatcctgtggcagccccttattgttatacgagggatcccagtgtcaggtgggagtactgcaacctgacacaatgctcagacgcagaagggactgccgtcgcgcctccaactattaccccgattccaagcctagaggctccttctgaacaagcaccaactgagcaaaggcctggggtgcaggagtgctaccacggaaatggacagagttatcaaggcacatacttcattactgtcacaggaagaacctgccaagcttggtcatctatgacaccacactcgcatagtcggaccccagcatactacccaaatgctggcttgatcaagaactactgccgaaatccagatcctgtggcagccccttggtgttatacaacagatcccagtgtcaggtgggagtactgcaacctgacacgatgctcagatgcagaatggactgccttcgtccctccgaatgttattctggctccaagcctagaggctttttttgaacaagcactgactgaggaaacccccggggtacaggactgctactaccattatggacagagttaccgaggcacatactccaccactgtcacaggaagaacttgccaagcttggtcatctatgacaccacaccagcatagtcggaccccagaaaactacccaaatgctggcctgaccaggaactactgcaggaatccagatgctgagattcgcccttggtgttacaccatggatcccagtgtcaggtgggagtactgcaacctgacacaatgcctggtgacagaatcaagtgtccttgcaactctcacggtggtcccagatccaagcacagaggcttcttctgaagaagcaccaacggagcaaagccccggggtccaggattgctaccatggtgatggacagagttatcgaggctcattctctaccactgtcacaggaaggacatgtcagtcttggtcctctatgacaccacactggcatcagaggacaacagaatattatccaaatggtggcctgaccaggaactactgcaggaatccagatgctgagattagtccttggtgttataccatggatcccaatgtcagatgggagtactgcaacctgacacaatgtccagtgacagaatcaagtgtccttgcgacgtccacggctgtttctgaacaagcaccaacggagcaaagccccacagtccaggactgctaccatggtgatggacagagttatcgaggctcattctccaccactgttacaggaaggacatgtcagtcttggtcctctatgacaccacactggcatcagagaaccacagaatactacccaaatggtggcctgaccaggaactactgcaggaatccagatgctgagattcgcccttggtgttataccatggatcccagtgtcagatgggagtactgcaacctgacgcaatgtccagtgatggaatcaactctcctcacaactcccacggtggtcccagttccaagcacagagcttccttctgaagaagcaccaactgaaaacagcactggggtccaggactgctaccgaggtgatggacagagttatcgaggcacactctccaccactatcacaggaagaacatgtcagtcttggtcgtctatgacaccacattggcatcggaggatcccattatactatccaaatgctggcctgaccaggaactactgcaggaatccagatgctgagattcgcccttggtgttacaccatggatcccagtgtcaggtgggagtactgcaacctgacacgatgtccagtgacagaatcgagtgtcctcacaactcccacagtggccccggttccaagcacagaggctccttctgaacaagcaccacctgagaaaagccctgtggtccaggattgctaccatggtgatggacggagttatcgaggcatatcctccaccactgtcacaggaaggacctgtcaatcttggtcatctatgataccacactggcatcagaggaccccagaaaactacccaaatgctggcctgaccgagaactactgcaggaatccagattctgggaaacaaccctggtgttacacaaccgatccgtgtgtgaggtgggagtactgcaatctgacacaatgctcagaaacagaatcaggtgtcctagagactcccactgttgttccagttccaagcatggaggctcattctgaagcagcaccaactgagcaaacccctgtggtccggcagtgctaccatggtaatggccagagttatcgaggcacattctccaccactgtcacaggaaggacatgtcaatcttggtcatccatgacaccacaccggcatcagaggaccccagaaaactacccaaatgatggcctgacaatgaactactgcaggaatccagatgccgatacaggcccttggtgttttaccatggaccccagcatcaggtgggagtactgcaacctgacgcgatgctcagacacagaagggactgtggtcgctcctccgactgtcatccaggttccaagcctagggcctccttctgaacaagactgtatgtttgggaatgggaaaggataccggggcaagaaggcaaccactgttactgggacgccatgccaggaatgggctgcccaggagccccatagacacagcacgttcattccagggacaaataaatgggcaggtctggaaaaaaattactgccgtaaccctgatggtgacatcaatggtccctggtgctacacaatgaatccaagaaaactttttgactactgtgatatccctctctgtgcatcctcttcatttgattgtgggaagcctcaagtggagccgaagaaatgtcctggaagcattgtaggggggtgtgtggcccacccacattcctggccctggcaagtcagtctcagaacaaggtttggaaagcacttctgtggaggcaccttaatatccccagagtgggtgctgactgctgctcactgcttgaagaagtcctcaaggccttcatcctacaaggtcatcctgggtgcacaccaagaagtgaacctcgaatctcatgttcaggaaatagaagtgtctaggctgttcttggagcccacacaagcagatattgccttgctaaagctaagcaggcctgccgtcatcactgacaaagtaatgccagcttgtctgccatccccagactacatggtcaccgccaggactgaatgttacatcactggctggggagaaacccaaggtacctttgggactggccttctcaaggaagcccagctccttgttattgagaatgaagtgtgcaatcactataagtatatttgtgctgagcatttggccagaggcactgacagttgccagggtgacagtggagggcctctggtttgcttcgagaaggacaaatacattttacaaggagtcacttcttggggtcttggctgtgcacgccccaataagcctggtgtctatgctcgtgtttcaaggtttgttacttggattgagggaatgatgagaaataattaattggacgggagacagagtgaagcatcaacctacttagaagctgaaacgtgggtaaggatttagcatgctggaaataatagacagcaatcaaacgaagacactgttcccagctaccagctatgccaaaccttggcatttttggtatttttgtgtataagcttttaaggtctgactgacaaattctgtattaaggtgtcatagctatgacatttgttaaaaataaactctgcacttattttgatttga

SEQ ID NO: 16436 - DNA, 4775 bp, Homo sapiens
  source 1..4775: mol_type = unassigned DNA
acacaaactctggaaaagatgaaatgaggtcgagagggacattaggtggcatctggaggagtaggacatgatggggaaagaggatgtgtggaggaggagggctttgggggtgttgtaaccaggaaggggaggagggggtgggatattatgatgcagctcacattgaacactctctttcctgttgtttccacaccagctattacgtatattgtcaccgtcttcactggggatgtccggggggctggtaccaaatccaaaatctacttggtcatgtatggggccagagggaataagaacagtgggaaaatcttcctggagggcggcgtgtttgaccgaggccgcacggacatcttccacatcgagctggctgtcctccttagccccctgagtcgggtctccgtcgggcatggcaatgtgggtgtcaacagaggctggttctgtgagaaggtggtgattctgtgccccttcactggtatccagcagaccttcccttgtagcaactggctggatgagaagaaagcggatgggttgattgagaggcagctctatgagatggtgtctctcaggaagaagcggctgaaaaaattcccttggtccctgtgggtctggacaaccgacctaaagaaagctggtaccaactctcccatcttcatccagatttatgggcagaaggggcggacagatgagattctcctgaatcccaacaacaagtggttcaaacccggcataatcgagaagtttaggattgagctcccggatcttggcaggttttataagattcgagtatggcatgataaaaggagttctggttctggatggcatttagaaaggatgaccctgatgaacactctgaacaaagacaagtacaacttcaattgcaaccgctggctggatgccaatgaggatgacaatgagatagtgagggaaatgactgcagaaggcccaacagtgcgcaggatcatgggcatggcccggtaccatgtgactgtgtgcacaggtgaacttgaaggtgctgggaccgatgccaacgtctatctctgcctttttggtgatgtgggggacacgggggaacggctgctctacaactgcaggaataacacagacctgtttgaaaagggcaatgctgacgagttcactatcgagtctgtcaccatgcggaatgtgaggcgggtgaggatcagacacgatggcaaaggctccggcagcggctggtacctggacagagtgctggtgagagaggaggggcagcctgagagcgacaacgtggagttcccatgtctcaggtggttggacaaggataaggatgatgggcagctggtccgagagttgctacccagtgacagcagcgcgacactgaagaactttcgctatcacatcagcttgaagactggggatgtctctggggccagcacggattctagagtctacatcaagctctatggggataaatctgacaccatcaagcaagttcttcttgtctctgacaacaacctcaaagactactttgaacgtggccgggtggatgagttcaccctcgagaccctgaacattggaaatatcaaccggctggtgattgggcatgacagcactggcatgcatgccagctggttcctgggcagcgttcagatccgtgtgccccgtcaaggcaagcagtacacctttcccgccaaccgctggctggacaagaaccaggctgacgggcgcctggaggtggagctgtatcccagcgaggtggtggagatccagaaattggtccactatgaggttgagatttggacaggagatgtgggtggcgcaggcaccagtgcccgagtctacatgcagatctatggagagaaaggcaagacagaagtgctcttcctctccagccgctcaaaagtttttgaacgggcgtccaaggacacattccagcttgaggcggccgacgtgggcgaggtctataagctccggctcgggcacacgggcgagggctttgggcccagctggttcgtggacaccgtgtggctgcggcacctggtggtgcgggaggtggacctcacgccggaggaggaggcccggaagaagaaggagaaggacaagctgcggcagctgctcaagaaggagcggctgaaggccaagctgcagaggaagaagaagaagaggaagggcagcgacgaagaggacgagggggaggaagaggagtcgtcctcatcagaggagtcctcgtcagaggaggaggagatggaagaagaggaggaagaggaggagtttgggccggggatgcaggaggtgattgagcagcacaagttcgaagcccaccgctggctggcccggggcaaggaggacaacgaacttgtcgtggagttggtgccagctggcaagccgggtcctgagcgaaacacctatgaggttcaggtggtcacggggaatgtgcccaaggccggcactgatgctaacgtctacctaaccatctacggcgaggagtatggagacacgggcgaacgacccctgaagaagtcagacaagtccaacaaatttgagcaggggcagacagacaccttcaccatctatgccattgacctgggggccctgaccaagattcggattcgccacgacaacacaggcaacagagcaggctggttcctggacagaatagacattactgacatgaacaacgagatcacgtactactttccatgccaacgttggctggcagtggaggaagatgatggccagctgtccagggagctgttgccagtggatgagtcctatgtgctgccacagagcgaggagggtaggggaggcggtgacaacaaccccctcgacaacctggccctggagcagaaagataaatctaccacattctcagtgaccataaagactggggttaagaagaatgcgggcacagatgctaatgtcttcatcacactctttggcacacaggatgacactggaatgaccctcctgaagtcctccaagacaaacagcgataagtttgagagggacagcattgaaatcttcacggtggagacgctggatctgggagacctgtggaaagtccggcttggccatgacaacacaggcaaggccccaggctggtttgtagactgggtagaggtggatgccccatctcttgggaagtgcatgacgtttccctgtggccgctggctggccaaaaacgaagacgacgggtccatcatcagagacctcttccatgcagagcttcagacgaggctgtacacaccatttgttccttacgagatcaccctctacaccagtgatgtctttgctgctgggacagatgccaacatcttcatcatcatctatggctgcgatgccgtgtgcacccagcagaagtatctgtgtaccaacaagagggaacagaagcagttctttgagaggaagtctgcctcccgcttcatcgtagagttagaagatgtgggagaaatcattgaaaaaattcggattggccataataacacgggcatgaatcctgggtggcactgctctcacgtggacatccgcaggctcctcccggataaagacggtgcagagaccttgactttcccatgcgatcggtggcttgccacctctgaggatgacaaaaagaccattcgagaactggttccatatgacatcttcactgagaaatacatgaaagatgggtccttacggcaagtctacaaggaagtagaagagcctctggacattgtgctgtactcggtgcagatcttcacagggaacattcctggggcagggacggatgccaaggtgtacatcaccatctatggagacctcggggacactggggagcgataccttggcaagtcagagaaccggaccaacaagttcgagagaggaacggctgacaccttcatcatcgaggccgctgacctaggcgtcatctacaagatcaagctccgccatgacaactccaagtggtgcgcagactggtacgtggagaaggtggagatctggaatgacaccaacgaggacgagttcctgttcctatgcgggcgctggctctccctgaagaaggaggatgggcgactcgagaggctcttttacgagaaggagtacactggggaccgcagcagcaactgcagcagccctgctgacttctgggagatcgccctgagctccaagatggccgatgtcgacatcagcacagtgaccgggcccatggctgactacgttcaagagggcccaattattccctactatgtgtcagtcaccactgggaagcacaaggacgcggccactgacagccgagccttcatctttctcatcggggaggatgatgaacgtagtaagcgcatctggttggactacccccgagggaagaggggcttcagccgtggctctgtggaggagttctacgtcgcaggcttggatgtgggcatcatcaagaaaatagaggttctctatgaaatgacggtgtggacaggggatgtggttggcgggggcactgactccaacatcttcatgaccctctacggcatcaacgggagcacagaggagatgcagctggacaaaaagaaagccaggtttgagcgggagcagaacgacaccttcatcatggagatcctagacattgctccattcaccaagatgcggatccggattgatggcctgggcagtcggccggagtggttcctggagagggtaaaatgtctagaccctcactcttccttccagccaccacccaccccttcccctggttcctctggcttgtcaatggaccttgttaaagcacaaatgtcactgtagaggatcattacatgaacccagcccat

SEQ ID NO: 16437 - DNA, 6202 bp, Homo sapiens
  source 1..6202: mol_type = unassigned DNA
acacaaactctggaaaagatgaaatgaggtcgagagggacattaggtggcatctggaggagtaggacatgatggggaaagaggatgtgtggaggaggagggctttgggggtgttgtaaccaggaaggggaggagggggtgggatattatgatgcagctcacattgaacactctctttcctgttgtttccacaccagctattacgtatattgtcaccgtcttcactggggatgtccggggggctggtaccaaatccaaaatctacttggtcatgtatggggccagagggaataagaacagtgggaaaatcttcctggagggcggcgtgtttgaccgaggccgcacggacatcttccacatcgagctggctgtcctccttagccccctgagtcgggtctccgtcgggcatggcaatgtgggtgtcaacagaggctggttctgtgagaaggtggtgattctgtgccccttcactggtatccagcagaccttcccttgtagcaactggctggatgagaagaaagcggatgggttgattgagaggcagctctatgagatggtgtctctcaggaagaagcggctgaaaaaattcccttggtccctgtgggtctggacaaccgacctaaagaaagctggtaccaactctcccatcttcatccagatttatgggcagaaggggcggacagatgagattctcctgaatcccaacaacaagtggttcaaacccggcataatcgagaagtttaggattgagctcccggatcttggcaggttttataagattcgagtatggcatgataaaaggagttctggttctggatggcatttagaaaggatgaccctgatgaacactctgaacaaagacaagtacaacttcaattgcaaccgctggctggatgccaatgaggatgacaatgagatagtgagggaaatgactgcagaaggcccaacagtgcgcaggatcatgggcatggcccggtaccatgtgactgtgtgcacaggtgaacttgaaggtgctgggaccgatgccaacgtctatctctgcctttttggtgatgtgggggacacgggggaacggctgctctacaactgcaggaataacacagacctgtttgaaaagggcaatgctgacgagttcactatcgagtctgtcaccatgcggaatgtgaggcgggtgaggatcagacacgatggcaaaggctccggcagcggctggtacctggacagagtgctggtgagagaggaggggcagcctgagagcgacaacgtggagttcccatgtctcaggtggttggacaaggataaggatgatgggcagctggtccgagagttgctacccagtgacagcagcgcgacactgaagaactttcgctatcacatcagcttgaagactggggatgtctctggggccagcacggattctagagtctacatcaagctctatggggataaatctgacaccatcaagcaagttcttcttgtctctgacaacaacctcaaagactactttgaacgtggccgggtggatgagttcaccctcgagaccctgaacattggaaatatcaaccggctggtgattgggcatgacagcactggcatgcatgccagctggttcctgggcagcgttcagatccgtgtgccccgtcaaggcaagcagtacacctttcccgccaaccgctggctggacaagaaccaggctgacgggcgcctggaggtggagctgtatcccagcgaggtggtggagatccagaaattggtccactatgaggttgagatttggacaggagatgtgggtggcgcaggcaccagtgcccgagtctacatgcagatctatggagagaaaggcaagacagaagtgctcttcctctccagccgctcaaaagtttttgaacgggcgtccaaggacacattccagcttgaggcggccgacgtgggcgaggtctataagctccggctcgggcacacgggcgagggctttgggcccagctggttcgtggacaccgtgtggctgcggcacctggtggtgcgggaggtggacctcacgccggaggaggaggcccggaagaagaaggagaaggacaagctgcggcagctgctcaagaaggagcggctgaaggccaagctgcagaggaagaagaagaagaggaagggcagcgacgaagaggacgagggggaggaagaggagtcgtcctcatcagaggagtcctcgtcagaggaggaggagatggaagaagaggaggaagaggaggagtttgggccggggatgcaggaggtgattgagcagcacaagttcgaagcccaccgctggctggcccggggcaaggaggacaacgaacttgtcgtggagttggtgccagctggcaagccgggtcctgagcgaaacacctatgaggttcaggtggtcacggggaatgtgcccaaggccggcactgatgctaacgtctacctaaccatctacggcgaggagtatggagacacgggcgaacgacccctgaagaagtcagacaagtccaacaaatttgagcaggggcagacagacaccttcaccatctatgccattgacctgggggccctgaccaagattcggattcgccacgacaacacaggcaacagagcaggctggttcctggacagaatagacattactgacatgaacaacgagatcacgtactactttccatgccaacgttggctggcagtggaggaagatgatggccagctgtccagggagctgttgccagtggatgagtcctatgtgctgccacagagcgaggagggtaggggaggcggtgacaacaaccccctcgacaacctggccctggagcagaaagataaatctaccacattctcagtgaccataaagactggggttaagaagaatgcgggcacagatgctaatgtcttcatcacactctttggcacacaggatgacactggaatgaccctcctgaagtcctccaagacaaacagcgataagtttgagagggacagcattgaaatcttcacggtggagacgctggatctgggagacctgtggaaagtccggcttggccatgacaacacaggcaaggccccaggctggtttgtagactgggtagaggtggatgccccatctcttgggaagtgcatgacgtttccctgtggccgctggctggccaaaaacgaagacgacgggtccatcatcagagacctcttccatgcagagcttcagacgaggctgtacacaccatttgttccttacgagatcaccctctacaccagtgatgtctttgctgctgggacagatgccaacatcttcatcatcatctatggctgcgatgccgtgtgcacccagcagaagtatctgtgtaccaacaagagggaacagaagcagttctttgagaggaagtctgcctcccgcttcatcgtagagttagaagatgtgggagaaatcattgaaaaaattcggattggccataataacacgggcatgaatcctgggtggcactgctctcacgtggacatccgcaggctcctcccggataaagacggtgcagagaccttgactttcccatgcgatcggtggcttgccacctctgaggatgacaaaaagaccattcgagaactggttccatatgacatcttcactgagaaatacatgaaagatgggtccttacggcaagtctacaaggaagtagaagagcctctggacattgtgctgtactcggtgcagatcttcacagggaacattcctggggcagggacggatgccaaggtgtacatcaccatctatggagacctcggggacactggggagcgataccttggcaagtcagagaaccggaccaacaagttcgagagaggaacggctgacaccttcatcatcgaggccgctgacctaggcgtcatctacaagatcaagctccgccatgacaactccaagtggtgcgcagactggtacgtggagaaggtggagatctggaatgacaccaacgaggacgagttcctgttcctatgcgggcgctggctctccctgaagaaggaggatgggcgactcgagaggctcttttacgagaaggagtacactggggaccgcagcagcaactgcagcagccctgctgacttctgggagatcgccctgagctccaagatggccgatgtcgacatcagcacagtgaccgggcccatggctgactacgttcaagagggcccaattattccctactatgtgtcagtcaccactgggaagcacaaggacgcggccactgacagccgagccttcatctttctcatcggggaggatgatgaacgtagtaagcgcatctggttggactacccccgagggaagaggggcttcagccgtggctctgtggaggagttctacgtcgcaggcttggatgtgggcatcatcaagaaaatagagctgggccatgacggggcctcccctgagagctgctggctggtggaagagttgtgtttggcagtgcccacccagggcaccaagtacatgttgaactgtaactgctggctggccaaggacagaggcgacggcatcacctcccgtgtcttcgacctcttggatgccatggtggtgaacattggggtgaaggttctctatgaaatgacggtgtggacaggggatgtggttggcgggggcactgactccaacatcttcatgaccctctacggcatcaacgggagcacagaggagatgcagctggacaaaaagaaagccaggtttgagcgggagcagaacgacaccttcatcatggagatcctagacattgctccattcaccaagatgcggatccggattgatggcctgggcagtcggccggagtggttcctggagaggatcctactgaagaacatgaacactggagacctgaccatgttctactatggagactggctgtcccagcggaagggcaagaagaccctggtgtgtgaaatgtgtgccgttatcgatgaggaagaaatgatggagtggacctcctacaccgtcgcagttaagaccagcgacatcctgggagcaggcactgatgccaacgtgttcatcatcatcttcggggagaacggggatagtgggacactggccctgaagcagtcggcaaactggaacaagtttgagcggaacaacacggacacattcaacttccctgacatgctgagcttgggccacctctgcaagctgagggtctggcacgacaacaaagggatatttcctggctggcatctgagctatgtcgatgtgaaggacaactcccgcgacgagaccttccacttccagtgtgactgctggctctccaagagtgagggtgacgggcagacggtccgcgactttgcctgtgccaacaacaagatctgtgatgagctggaagagaccacctacgagatcgtcatagaaacgggcaacggaggcgaaaccagggagaacgtctggctcatcctggagggcaggaagaaccgatccaaagagtttctcatggaaaattcttctaggcagcgggcctttaggaaggggaccacagacacgtttgagtttgacagcatctacttgggggacattgcctccctctgtgtgggccaccttgccagggaagaccggtttatccccaagagagaacttgcctggcatgtcaagaccatcaccatcaccgagatggagtacggcaatgtgtacttctttaactgtgactgcctcatccccctcaagaggaagaggaagtacttcaaggtattcgaggttaccaagacgacagagagctttgccagcaaggtccagagcctggtgcccgtcaagtacgaagtcatcgtgacaacaggctatgagccaggggcaggcactgatgccaacgtcttcgtgaccatctttggggccaacggagacacaggcaagcgggagctgaagcagaaaatgcgcaacctcttcgagcggggcagcacagaccgcttcttcctggagacgctggagctggtagtgaccaggctgggacttgctgcagagtgtggatgagaaattgagtcttcacccaggggatagaagtggagaagcagaggccatcaagatggtgtattttaagcaaaaactaattaacacttttccccaaaaaagctaggctaattaaattattaccaaccatatcctataaagaactcatcttagcatctgcttgctaagaagtgtatacttttccccagtttcaataaacccagtggcaagtgga

SEQ ID NO: 16438 - DNA, 3755 bp, Homo sapiens
  source 1..3755: mol_type = unassigned DNA
gatactttgtggaggggttatgagagaattgcaggcagggccccagcacctagagcccatgggccagctgacccacaggaacaaacagagaatggcgttgagtggcagatgctgaggcacttgacagacaccttcaccatctatgccattgacctgggggccctgaccaagattcggattcgccacgacaacacaggcaacagagcaggctggttcctggacagaatagacattactgacatgaacaacgagatcacgtactactttccatgccaacgttggctggcagtggaggaagatgatggccagctgtccagggagctgttgccagtggatgagtcctatgtgctgccacagagcgaggagggtaggggaggcggtgacaacaaccccctcgacaacctggccctggagcagaaagataaatctaccacattctcagtgaccataaagactggggttaagaagaatgcgggcacagatgctaatgtcttcatcacactctttggcacacaggatgacactggaatgaccctcctgaagtcctccaagacaaacagcgataagtttgagagggacagcattgaaatcttcacggtggagacgctggatctgggagacctgtggaaagtccggcttggccatgacaacacaggcaaggccccaggctggtttgtagactgggtagaggtggatgccccatctcttgggaagtgcatgacgtttccctgtggccgctggctggccaaaaacgaagacgacgggtccatcatcagagacctcttccatgcagagcttcagacgaggctgtacacaccatttgttccttacgagatcaccctctacaccagtgatgtctttgctgctgggacagatgccaacatcttcatcatcatctatggctgcgatgccgtgtgcacccagcagaagtatctgtgtaccaacaagagggaacagaagcagttctttgagaggaagtctgcctcccgcttcatcgtagagttagaagatgtgggagaaatcattgaaaaaattcggattggccataataacacgggcatgaatcctgggtggcactgctctcacgtggacatccgcaggctcctcccggataaagacggtgcagagaccttgactttcccatgcgatcggtggcttgccacctctgaggatgacaaaaagaccattcgagaactggttccatatgacatcttcactgagaaatacatgaaagatgggtccttacggcaagtctacaaggaagtagaagagcctctggacattgtgctgtactcggtgcagatcttcacagggaacattcctggggcagggacggatgccaaggtgtacatcaccatctatggagacctcggggacactggggagcgataccttggcaagtcagagaaccggaccaacaagttcgagagaggaacggctgacaccttcatcatcgaggccgctgacctaggcgtcatctacaagatcaagctccgccatgacaactccaagtggtgcgcagactggtacgtggagaaggtggagatctggaatgacaccaacgaggacgagttcctgttcctatgcgggcgctggctctccctgaagaaggaggatgggcgactcgagaggctcttttacgagaaggagtacactggggaccgcagcagcaactgcagcagccctgctgacttctgggagatcgccctgagctccaagatggccgatgtcgacatcagcacagtgaccgggcccatggctgactacgttcaagagggcccaattattccctactatgtgtcagtcaccactgggaagcacaaggacgcggccactgacagccgagccttcatctttctcatcggggaggatgatgaacgtagtaagcgcatctggttggactacccccgagggaagaggggcttcagccgtggctctgtggaggagttctacgtcgcaggcttggatgtgggcatcatcaagaaaatagaggttctctatgaaatgacggtgtggacaggggatgtggttggcgggggcactgactccaacatcttcatgaccctctacggcatcaacgggagcacagaggagatgcagctggacaaaaagaaagccaggtttgagcgggagcagaacgacaccttcatcatggagatcctagacattgctccattcaccaagatgcggatccggattgatggcctgggcagtcggccggagtggttcctggagaggatcctactgaagaacatgaacactggagacctgaccatgttctactatggagactggctgtcccagcggaagggcaagaagaccctggtgtgtgaaatgtgtgccgttatcgatgaggaagaaatgatggagtggacctcctacaccgtcgcagttaagaccagcgacatcctgggagcaggcactgatgccaacgtgttcatcatcatcttcggggagaacggggatagtgggacactggccctgaagcagtcggcaaactggaacaagtttgagcggaacaacacggacacattcaacttccctgacatgctgagcttgggccacctctgcaagctgagggtctggcacgacaacaaagggatatttcctggctggcatctgagctatgtcgatgtgaaggacaactcccgcgacgagaccttccacttccagtgtgactgctggctctccaagagtgagggtgacgggcagacggtccgcgactttgcctgtgccaacaacaagatctgtgatgagctggaagagaccacctacgagatcgtcatagaaacgggcaacggaggcgaaaccagggagaacgtctggctcatcctggagggcaggaagaaccgatccaaagagtttctcatggaaaattcttctaggcagcgggcctttaggaaggggaccacagacacgtttgagtttgacagcatctacttgggggacattgcctccctctgtgtgggccaccttgccagggaagaccggtttatccccaagagagaacttgcctggcatgtcaagaccatcaccatcaccgagatggagtacggcaatgtgtacttctttaactgtgactgcctcatccccctcaagaggaagaggaagtacttcaaggtattcgaggttaccaagacgacagagagctttgccagcaaggtccagagcctggtgcccgtcaagtacgaagtcatcgtgacaacaggctatgagccaggggcaggcactgatgccaacgtcttcgtgaccatctttggggccaacggagacacaggcaagcgggagctgaagcagaaaatgcgcaacctcttcgagcggggcagcacagaccgcttcttcctggagacgctggagctgggtgagctgcgcaaggtgcgcctggagcacgacagcagtggctactgctcaggctggctggtggagaaggtggaggtcaccaacaccagcaccggcgtggccaccatcttcaactgtggcaggtggctggacaagaagcggggggatggactcacctggagagacctcttcccttctgtctgaggggctagggcccccaccctctcactgagatgccccaatctcacatttctgccctccaccttggcggtcagcagcccttcaaagcctctagcattggcactgggggctagcagtccactgagaacttcatggggtcctgctccccaccctacccccagtttattgaacctacagtgataataattagcatgtgtcataatctgtggctgccc

SEQ ID NO: 16439 - DNA, 1358 bp, Homo sapiens
  source 1..1358: mol_type = unassigned DNA
gaaccagggtcctgacctggagtctgacctctgccagaaactcatcaggtcaccctggacaagtcatgccatctttatgggcttttgtttcctcttctgataaatgggcttaatgttgccagcctaacttcttaagatgttctgaaaatccaaggcatttaagcttggaaaggaaaaagtgccacagaaccatgaggctggggacaaactgtgaacatccccagcttccccttgcagctccatcagggtactactttccatgccaacgttggctggcagtggaggaagatgatggccagctgtccagggagctgttgccagtggatgagtcctatgtgctgccacagagcgaggagggtaggggaggcggtgacaacaaccccctcgacaacctggccctggagcagaaagataaatctaccacattctcagtgaccataaagactggggttaagaagaatgcgggcacagatgctaatgtcttcatcacactctttggcacacaggatgacactggaatgaccctcctgaagtcctccaagacaaacagcgataagtttgagagggacagcattgaaatcttcacggtggagacgctggatctgggagacctgtggaaagtccggcttggccatgacaacacaggcaaggccccaggctggtttgtagactgggtagaggtggatgccccatctcttgggaagtgcatgacgtttccctgtggccgctggctggccaaaaacgaagacgacgggtccatcatcagagacctcttccatgcagagcttcagacgaggctgtacacaccatttgttccttacgagatcaccctctacaccagtgatgtctttgctgctgggacagatgccaacatcttcatcatcatctatggctgcgatgccgtgtgcacccagcagaagtatctgtgtaccaacaagagggaacagaagcagttctttgagaggaagtctgcctcccgcttcatcgtagagttagaagatgtgggagaaatcattgaaaaaattcggattggccataataacacgggcatgaatcctgggtggcactgctctcacgtggacatccgcaggctcctcccggataaagactagagatggggtttcaccatgttggccaagctggtcttgaaatcctgacatcagggtgcagagaccttgactttcccatgcgatcggtggcttgccacctctgaggatgacaaaaagaccattcgagaactggttccatatgacatcttcactgagaaatacatgaaagatgggtccttacggcaagtctacaaggaagtagaagagcctctggacattgtgctgtactcggtgcagatcttcacaggg

SEQ ID NO: 16440 - DNA, 6848 bp, Homo sapiens
  source 1..6848: mol_type = unassigned DNA
atgatgccccagaagaaaaggcggaggaagaaggacatcgacttcctggccctgtacgaagcggagctgctgaactacgcctcggaggacgacgagggggagctggaacacgagtactacaaggccagagtgtatgaagtggtcacagccacgggggatgttcgcggtgcagggacggatgccaatgtcttcatcacgctttttggagagaatgggctctctcccaagctccagctcaccagcaagagcaagtctgcctttgagaagggcaacgtcgatgtgttccgggtgagaaccaacaatgtgggcctcatctataaagtcaggattgagcatgacaacacgggcttgaatgccagctggtacctggaccatgtgattgtgaccgacatgaagaggcctcatctccgttactacttcaactgcaacaactggctgagcaaggtggaaggtgaccgccagtggtgccgtgacctgctggccagcttcaaccccatggacatgcccagaggtaataagtatgaagtcaaggtatacactggtgatgtaattggtgcagggacagatgctgatgtcttcatcaatatttttggagagtatggagacacaggggagcgtaggctagaaaatgaaaaggacaactttgaaaagggagctgaagacaggttcatcctggatgccccggatttggggcagctgatgaagatcaatgttggccacaacaataaggggggctctgcaggttggttcctgtcccagatagtcattgaagatattgggaacaaaagaaaatatgacttcccccttaaccgctggctggccttggacgaagacgatggcaaaatccaaagggatatcttagtgggcggagctgagaccacagctattacgtatattgtcaccgtcttcactggggatgtccggggggctggtaccaaatccaaaatctacttggtcatgtatggggccagagggaataagaacagtgggaaaatcttcctggagggcggcgtgtttgaccgaggccgcacggacatcttccacatcgagctggctgtcctccttagccccctgagtcgggtctccgtcgggcatggcaatgtgggtgtcaacagaggctggttctgtgagaaggtggtgattctgtgccccttcactggtatccagcagaccttcccttgtagcaactggctggatgagaagaaagcggatgggttgattgagaggcagctctatgagatggtgtctctcaggaagaagcggctgaaaaaattcccttggtccctgtgggtctggacaaccgacctaaagaaagctggtaccaactctcccatcttcatccagatttatgggcagaaggggcggacagatgagattctcctgaatcccaacaacaagtggttcaaacccggcataatcgagaagtttaggattgagctcccggatcttggcaggttttataagattcgagtatggcatgataaaaggagttctggttctggatggcatttagaaaggatgaccctgatgaacactctgaacaaagacaagtacaacttcaattgcaaccgctggctggatgccaatgaggatgacaatgagatagtgagggaaatgactgcagaaggcccaacagtgcgcaggatcatgggcatggcccggtaccatgtgactgtgtgcacaggtgaacttgaaggtgctgggaccgatgccaacgtctatctctgcctttttggtgatgtgggggacacgggggaacggctgctctacaactgcaggaataacacagacctgtttgaaaagggcaatgctgacgagttcactatcgagtctgtcaccatgcggaatgtgaggcgggtgaggatcagacacgatggcaaaggctccggcagcggctggtacctggacagagtgctggtgagagaggaggggcagcctgagagcgacaacgtggagttcccatgtctcaggtggttggacaaggataaggatgatgggcagctggtccgagagttgctacccagtgacagcagcgcgacactgaagaactttcgctatcacatcagcttgaagactggggatgtctctggggccagcacggattctagagtctacatcaagctctatggggataaatctgacaccatcaagcaagttcttcttgtctctgacaacaacctcaaagactactttgaacgtggccgggtggatgagttcaccctcgagaccctgaacattggaaatatcaaccggctggtgattgggcatgacagcactggcatgcatgccagctggttcctgggcagcgttcagatccgtgtgccccgtcaaggcaagcagtacacctttcccgccaaccgctggctggacaagaaccaggctgacgggcgcctggaggtggagctgtatcccagcgaggtggtggagatccagaaattggtccactatgaggttgagatttggacaggagatgtgggtggcgcaggcaccagtgcccgagtctacatgcagatctatggagagaaaggcaagacagaagtgctcttcctctccagccgctcaaaagtttttgaacgggcgtccaaggacacattccagcttgaggcggccgacgtgggcgaggtctataagctccggctcgggcacacgggcgagggctttgggcccagctggttcgtggacaccgtgtggctgcggcacctggtggtgcgggaggtggacctcacgccggaggaggaggcccggaagaagaaggagaaggacaagctgcggcagctgctcaagaaggagcggctgaaggccaagctgcagaggaagaagaagaagaggaagggcagcgacgaagaggacgagggggaggaagaggagtcgtcctcatcagaggagtcctcgtcagaggaggaggagatggaagaagaggaggaagaggaggagtttgggccggggatgcaggaggtgattgagcagcacaagttcgaagcccaccgctggctggcccggggcaaggaggacaacgaacttgtcgtggagttggtgccagctggcaagccgggtcctgagcgaaacacctatgaggttcaggtggtcacggggaatgtgcccaaggccggcactgatgctaacgtctacctaaccatctacggcgaggagtatggagacacgggcgaacgacccctgaagaagtcagacaagtccaacaaatttgagcaggggcagacagacaccttcaccatctatgccattgacctgggggccctgaccaagattcggattcgccacgacaacacaggcaacagagcaggctggttcctggacagaatagacattactgacatgaacaacgagatcacgtactactttccatgccaacgttggctggcagtggaggaagatgatggccagctgtccagggagctgttgccagtggatgagtcctatgtgctgccacagagcgaggagggtaggggaggcggtgacaacaaccccctcgacaacctggccctggagcagaaagataaatctaccacattctcagtgaccataaagactggggttaagaagaatgcgggcacagatgctaatgtcttcatcacactctttggcacacaggatgacactggaatgaccctcctgaagtcctccaagacaaacagcgataagtttgagagggacagcattgaaatcttcacggtggagacgctggatctgggagacctgtggaaagtccggcttggccatgacaacacaggcaaggccccaggctggtttgtagactgggtagaggtggatgccccatctcttgggaagtgcatgacgtttccctgtggccgctggctggccaaaaacgaagacgacgggtccatcatcagagacctcttccatgcagagcttcagacgaggctgtacacaccatttgttccttacgagatcaccctctacaccagtgatgtctttgctgctgggacagatgccaacatcttcatcatcatctatggctgcgatgccgtgtgcacccagcagaagtatctgtgtaccaacaagagggaacagaagcagttctttgagaggaagtctgcctcccgcttcatcgtagagttagaagatgtgggagaaatcattgaaaaaattcggattggccataataacacgggcatgaatcctgggtggcactgctctcacgtggacatccgcaggctcctcccggataaagacggtgcagagaccttgactttcccatgcgatcggtggcttgccacctctgaggatgacaaaaagaccattcgagaactggttccatatgacatcttcactgagaaatacatgaaagatgggtccttacggcaagtctacaaggaagtagaagagcctctggacattgtgctgtactcggtgcagatcttcacagggaacattcctggggcagggacggatgccaaggtgtacatcaccatctatggagacctcggggacactggggagcgataccttggcaagtcagagaaccggaccaacaagttcgagagaggaacggctgacaccttcatcatcgaggccgctgacctaggcgtcatctacaagatcaagctccgccatgacaactccaagtggtgcgcagactggtacgtggagaaggtggagatctggaatgacaccaacgaggacgagttcctgttcctatgcgggcgctggctctccctgaagaaggaggatgggcgactcgagaggctcttttacgagaaggagtacactggggaccgcagcagcaactgcagcagccctgctgacttctgggagatcgccctgagctccaagatggccgatgtcgacatcagcacagtgaccgggcccatggctgactacgttcaagagggcccaattattccctactatgtgtcagtcaccactgggaagcacaaggacgcggccactgacagccgagccttcatctttctcatcggggaggatgatgaacgtagtaagcgcatctggttggactacccccgagggaagaggggcttcagccgtggctctgtggaggagttctacgtcgcaggcttggatgtgggcatcatcaagaaaatagaggttctctatgaaatgacggtgtggacaggggatgtggttggcgggggcactgactccaacatcttcatgaccctctacggcatcaacgggagcacagaggagatgcagctggacaaaaagaaagccaggtttgagcgggagcagaacgacaccttcatcatggagatcctagacattgctccattcaccaagatgcggatccggattgatggcctgggcagtcggccggagtggttcctggagaggatcctactgaagaacatgaacactggagacctgaccatgttctactatggagactggctgtcccagcggaagggcaagaagaccctggtgtgtgaaatgtgtgccgttatcgatgaggaagaaatgatggagtggacctcctacaccgtcgcagttaagaccagcgacatcctgggagcaggcactgatgccaacgtgttcatcatcatcttcggggagaacggggatagtgggacactggccctgaagcagtcggcaaactggaacaagtttgagcggaacaacacggacacattcaacttccctgacatgctgagcttgggccacctctgcaagctgagggtctggcacgacaacaaagggatatttcctggctggcatctgagctatgtcgatgtgaaggacaactcccgcgacgagaccttccacttccagtgtgactgctggctctccaagagtgagggtgacgggcagacggtccgcgactttgcctgtgccaacaacaagatctgtgatgagctggaagagaccacctacgagatcgtcatagaaacgggcaacggaggcgaaaccagggagaacgtctggctcatcctggagggcaggaagaaccgatccaaagagtttctcatggaaaattcttctaggcagcgggcctttaggaaggggaccacagacacgtttgagtttgacagcatctacttgggggacattgcctccctctgtgtgggccaccttgccagggaagaccggtttatccccaagagagaacttgcctggcatgtcaagaccatcaccatcaccgagatggagtacggcaatgtgtacttctttaactgtgactgcctcatccccctcaagaggaagaggaagtacttcaaggtattcgaggttaccaagacgacagagagctttgccagcaaggtccagagcctggtgcccgtcaagtacgaagtcatcgtgacaacaggctatgagccaggggcaggcactgatgccaacgtcttcgtgaccatctttggggccaacggagacacaggcaagcgggagctgaagcagaaaatgcgcaacctcttcgagcggggcagcacagaccgcttcttcctggagacgctggagctgggtgagctgcgcaaggtgcgcctggagcacgacagcagtggctactgctcaggctggctggtggagaaggtggaggtcaccaacaccagcaccggcgtggccaccatcttcaactgtggcaggtggctggacaagaagcggggggatggactcacctggagagacctcttcccttctgtctgaggggctagggcccccaccctctcactgagatgccccaatctcacatttctgccctccaccttggcggtcagcagcccttcaaagcctctagcattggcactgggggctagcagtccactgagaacttcatggggtcctgctccccaccctacccccagtttattgaacctacagtgataataattagcatgtgtcataatctgtggctgccc

SEQ ID NO: 16441 - DNA, 3970 bp, Homo sapiens
  source 1..3970: mol_type = unassigned DNA
agtacctcttcagtaacactgatactttgtggaggggttatgagagaattgcaggcagggccccagcacctagagcccatgggccagctgacccacaggaacaaacagagaatggcgttgagtggcagatgctgaggcacttggttcctggtgtggtctgcttcctcccgtgcatggagcagtgtgtgcattcacatggtgtgatccatatggccctcttcacacctaaatggtgggcaaatccgtcttcagtttctgacagtcactttggatttgcacagcaccagctcatagcagacagacaccttcaccatctatgccattgacctgggggccctgaccaagattcggattcgccacgacaacacaggcaacagagcaggctggttcctggacagaatagacattactgacatgaacaacgagatcacgtactactttccatgccaacgttggctggcagtggaggaagatgatggccagctgtccagggagctgttgccagtggatgagtcctatgtgctgccacagagcgaggagggtaggggaggcggtgacaacaaccccctcgacaacctggccctggagcagaaagataaatctaccacattctcagtgaccataaagactggggttaagaagaatgcgggcacagatgctaatgtcttcatcacactctttggcacacaggatgacactggaatgaccctcctgaagtcctccaagacaaacagcgataagtttgagagggacagcattgaaatcttcacggtggagacgctggatctgggagacctgtggaaagtccggcttggccatgacaacacaggcaaggccccaggctggtttgtagactgggtagaggtggatgccccatctcttgggaagtgcatgacgtttccctgtggccgctggctggccaaaaacgaagacgacgggtccatcatcagagacctcttccatgcagagcttcagacgaggctgtacacaccatttgttccttacgagatcaccctctacaccagtgatgtctttgctgctgggacagatgccaacatcttcatcatcatctatggctgcgatgccgtgtgcacccagcagaagtatctgtgtaccaacaagagggaacagaagcagttctttgagaggaagtctgcctcccgcttcatcgtagagttagaagatgtgggagaaatcattgaaaaaattcggattggccataataacacgggcatgaatcctgggtggcactgctctcacgtggacatccgcaggctcctcccggataaagacggtgcagagaccttgactttcccatgcgatcggtggcttgccacctctgaggatgacaaaaagaccattcgagaactggttccatatgacatcttcactgagaaatacatgaaagatgggtccttacggcaagtctacaaggaagtagaagagcctctggacattgtgctgtactcggtgcagatcttcacagggaacattcctggggcagggacggatgccaaggtgtacatcaccatctatggagacctcggggacactggggagcgataccttggcaagtcagagaaccggaccaacaagttcgagagaggaacggctgacaccttcatcatcgaggccgctgacctaggcgtcatctacaagatcaagctccgccatgacaactccaagtggtgcgcagactggtacgtggagaaggtggagatctggaatgacaccaacgaggacgagttcctgttcctatgcgggcgctggctctccctgaagaaggaggatgggcgactcgagaggctcttttacgagaaggagtacactggggaccgcagcagcaactgcagcagccctgctgacttctgggagatcgccctgagctccaagatggccgatgtcgacatcagcacagtgaccgggcccatggctgactacgttcaagagggcccaattattccctactatgtgtcagtcaccactgggaagcacaaggacgcggccactgacagccgagccttcatctttctcatcggggaggatgatgaacgtagtaagcgcatctggttggactacccccgagggaagaggggcttcagccgtggctctgtggaggagttctacgtcgcaggcttggatgtgggcatcatcaagaaaatagagctgggccatgacggggcctcccctgagagctgctggctggtggaagagttgtgtttggcagtgcccacccagggcaccaagtacatgttgaactgtaactgctggctggccaaggacagaggcgacggcatcacctcccgtgtcttcgacctcttggatgccatggtggtgaacattggggtgaaggttctctatgaaatgacggtgtggacaggggatgtggttggcgggggcactgactccaacatcttcatgaccctctacggcatcaacgggagcacagaggagatgcagctggacaaaaagaaagccaggtttgagcgggagcagaacgacaccttcatcatggagatcctagacattgctccattcaccaagatgcggatccggattgatggcctgggcagtcggccggagtggttcctggagaggatcctactgaagaacatgaacactggagacctgaccatgttctactatggagactggctgtcccagcggaagggcaagaagaccctggtgtgtgaaatgtgtgccgttatcgatgaggaagaaatgatggagtggacctcctacaccgtcgcagttaagaccagcgacatcctgggagcaggcactgatgccaacgtgttcatcatcatcttcggggagaacggggatagtgggacactggccctgaagcagtcggcaaactggaacaagtttgagcggaacaacacggacacattcaacttccctgacatgctgagcttgggccacctctgcaagctgagggtctggcacgacaacaaagggatatttcctggctggcatctgagctatgtcgatgtgaaggacaactcccgcgacgagaccttccacttccagtgtgactgctggctctccaagagtgagggtgacgggcagacggtccgcgactttgcctgtgccaacaacaagatctgtgatgagctggaagagaccacctacgagatcgtcatagaaacgggcaacggaggcgaaaccagggagaacgtctggctcatcctggagggcaggaagaaccgatccaaagagtttctcatggaaaattcttctaggcagcgggcctttaggaaggggaccacagacacgtttgagtttgacagcatctacttgggggacattgcctccctctgtgtgggccaccttgccagggaagaccggtttatccccaagagagaacttgcctggcatgtcaagaccatcaccatcaccgagatggagtacggcaatgtgtacttctttaactgtgactgcctcatccccctcaagaggaagaggaagtacttcaaggtattcgaggttaccaagacgacagagagctttgccagcaaggtccagagcctggtgcccgtcaagtacgaagtcatcgtgacaacaggctatgagccaggggcaggcactgatgccaacgtcttcgtgaccatctttggggccaacggagacacaggcaagcgggagctgaagcagaaaatgcgcaacctcttcgagcggggcagcacagaccgcttcttcctggagacgctggagctggtagtgaccaggctgggacttgctgcagagtgtggatgagaaattgagtcttcacccaggggatagaagtggagaagcagaggccatcaagatggtgtattttaagcaaaaactaattaacacttttccccaaaaaagctaggctaattaaattattaccaaccatatcctataaagaactcatcttagcatctgcttgctaagaagtgtatacttttccccagtttcaataaacccagtggcaagtgga

SEQ ID NO: 16442 - DNA, 1958 bp, Homo sapiens
  source 1..1958: mol_type = unassigned DNA
ctgcctcacagaggaagaaccgaggtgggggcttggtgaaggcacaccaggaagagcaggctgcgcctcaccctccagtggagacagagggcagacattctctttggagcacacctcaggctaaatggcaaaaccccaatctcaagtgaacatcatggaactaggggattgtctcacttctccagtggattgaggcagtgctccctctgttctctatgaaatgacggtgtggacaggggatgtggttggcgggggcactgactccaacatcttcatgaccctctacggcatcaacgggagcacagaggagatgcagctggacaaaaagaaagccaggtttgagcgggagcagaacgacaccttcatcatggagatcctagacattgctccattcaccaagatgcggatccggattgatggcctgggcagtcggccggagtggttcctggagaggatcctactgaagaacatgaacactggagacctgaccatgttctactatggagactggctgtcccagcggaagggcaagaagaccctggtgtgtgaaatgtgtgccgttatcgatgaggaagaaatgatggagtggacctcctacaccgtcgcagttaagaccagcgacatcctgggagcaggcactgatgccaacgtgttcatcatcatcttcggggagaacggggatagtgggacactggccctgaagcagtcggcaaactggaacaagtttgagcggaacaacacggacacattcaacttccctgacatgctgagcttgggccacctctgcaagctgagggtctggcacgacaacaaagggatatttcctggctggcatctgagctatgtcgatgtgaaggacaactcccgcgacgagaccttccacttccagtgtgactgctggctctccaagagtgagggtgacgggcagacggtccgcgactttgcctgtgccaacaacaagatctgtgatgagctggaagagaccacctacgagatcgtcatagaaacgggcaacggaggcgaaaccagggagaacgtctggctcatcctggagggcaggaagaaccgatccaaagagtttctcatggaaaattcttctaggcagcgggcctttaggaaggggaccacagacacgtttgagtttgacagcatctacttgggggacattgcctccctctgtgtgggccaccttgccagggaagaccggtttatccccaagagagaacttgcctggcatgtcaagaccatcaccatcaccgagatggagtacggcaatgtgtacttctttaactgtgactgcctcatccccctcaagaggaagaggaagtacttcaaggtattcgaggttaccaagacgacagagagctttgccagcaaggtccagagcctggtgcccgtcaagtacgaagtcatcgtgacaacaggctatgagccaggggcaggcactgatgccaacgtcttcgtgaccatctttggggccaacggagacacaggcaagcgggagctgaagcagaaaatgcgcaacctcttcgagcggggcagcacagaccgcttcttcctggagacgctggagctgggtgagctgcgcaaggtgcgcctggagcacgacagcagtggctactgctcaggctggctggtggagaaggtggaggtcaccaacaccagcaccggcgtggccaccatcttcaactgtggcaggtggctggacaagaagcggggggatggactcacctggagagacctcttcccttctgtctgaggggctagggcccccaccctctcactgagatgccccaatctcacatttctgccctccaccttggcggtcagcagcccttcaaagcctctagcattggcactgggggctagcagtccactgagaacttcatggggtcctgctccccaccctacccccagtttattgaacctacagtgataataattagcatgtgtcataa

SEQ ID NO: 16443 - DNA, 1824 bp, Homo sapiens
  source 1..1824: mol_type = unassigned DNA
agaaccgaggtgggggcttggtgaaggcacaccaggaagagcaggctgcgcctcaccctccagtggagacagagggcagacattctctttggagcacacctcaggctaaatggcaaaaccccaatctcaagtgaacatcatggaactaggggattgtctcacttctccagtggattgaggcagtgctccctctgttctctatgaaatgacggtgtggacaggggatgtggttggcgggggcactgactccaacatcttcatgaccctctacggcatcaacgggagcacagaggagatgcagctggacaaaaagaaagccaggtttgagcgggagcagaacgacaccttcatcatggagatcctagacattgctccattcaccaagatgcggatccggattgatggcctgggcagtcggccggagtggttcctggagaggatcctactgaagaacatgaacactggagacctgaccatgttctactatggagactggctgtcccagcggaagggcaagaagaccctggtgtgtgaaatgtgtgccgttatcgatgaggaagaaatgatggagtggacctcctacaccgtcgcagttaagaccagcgacatcctgggagcaggcactgatgccaacgtgttcatcatcatcttcggggagaacggggatagtgggacactggccctgaagcagtcggcaaactggaacaagtttgagcggaacaacacggacacattcaacttccctgacatgctgagcttgggccacctctgcaagctgagggtctggcacgacaacaaagggatatttcctggctggcatctgagctatgtcgatgtgaaggacaactcccgcgacgagaccttccacttccagtgtgactgctggctctccaagagtgagggtgacgggcagacggtccgcgactttgcctgtgccaacaacaagatctgtgatgagctggaagagaccacctacgagatcgtcatagaaacgggcaacggaggcgaaaccagggagaacgtctggctcatcctggagggcaggaagaaccgatccaaagagtttctcatggaaaattcttctaggcagcgggcctttaggaaggggaccacagacacgtttgagtttgacagcatctacttgggggacattgcctccctctgtgtgggccaccttgccagggaagaccggtttatccccaagagagaacttgcctggcatgtcaagaccatcaccatcaccgagatggagtacggcaatgtgtacttctttaactgtgactgcctcatccccctcaagaggaagaggaagtacttcaaggtattcgaggttaccaagacgacagagagctttgccagcaaggtccagagcctggtgcccgtcaagtacgaagtcatcgtgacaacaggctatgagccaggggcaggcactgatgccaacgtcttcgtgaccatctttggggccaacggagacacaggcaagcgggagctgaagcagaaaatgcgcaacctcttcgagcggggcagcacagaccgcttcttcctggagacgctggagctgggtgagctgcgcaagtagtgaccaggctgggacttgctgcagagtgtggatgagaaattgagtcttcacccaggggatagaagtggagaagcagaggccatcaagatggtgtattttaagcaaaaactaattaacacttttccccaaaaaagctaggctaattaaattattaccaaccatatcctataaagaactcatcttagcatctgcttgctaagaagtgtatacttttccccagtttcaataaacccagtggcaagtgg

SEQ ID NO: 16444 - DNA, 1352 bp, Homo sapiens
  source 1..1352: mol_type = unassigned DNA
agcatcgcgcgcaaggcctgccggttgctcggggtcgtatgacgcacttttccagctcgagccctcacgaggccgtgggtacgaccggaagccgcagttcagtgatggggagccgtgtttggcagtgcagaggtagcgaagtgtcccaagaacatggaagcatgctgatcccattttcaatgaagaattgcttccagttactttgtaactgccaggtcccagcagctggctttaaaaaaacagtaaaaaatgggctcattttacagtcaatttccaatgatgtctatcaaaatctggctgtggaagactggatccatgaccatatgaatctagaaggcaaaccaattctattcttttggcagaattctccctctgttgtaattggtaggcatcaaaatccttggcaggaatgtaacctgaatctaatgagagaagaaggtataaaactggctcggagaagaagtggaggaggaacagtctaccatgatatgggtaatatcaatttgactttctttacaaccaaaaaaaagtatgatagaatggaaaatctgaaattaattgtgagagctctgaatgctgtccaaccccagctggatgtgcaggctaccaaaagatttgaccttttacttgatggacagtttaaaatctcaggaacagcttctaagatcggccggactactgcctatcaccattgcactttattatgtagtactgatgggacgttcttgtcttctttgctaaagagcccttaccaagggatcaggagcaatgccactgctagcataccttccttagtgaaaaatcttttggaaaaggatcccactctgacctgtgaagtactaatgaatgctgttgctacagagtatgctgcttatcatcaaattgataatcacattcacctaataaacccaacggatgagacactgtttcctggaataaatagcaaagccaaagaactgcaaacttgggagtggatatatggcaaaactccaaagtttagtataaatacttcctttcatgtgttatatgaacagtcacacttggaaattaaagtattcatagacataaagaatggaagaattgaaatttgtaatattgaagcacctgatcattggttgccattggaaatacgtgacaaattaaattcaagtcttattggcagtaagttttgcccaactgaaactaccatgctaacaaatatattacttagaacatgtccacaagaccacaaactaaacagtaaatggaatattctctgtgaaaaaattaagggaataatgtgattccaagtaaatgtcttaatacagtttcaattagaaaataaaatgtctcatacttgcacattgtatgtc

SEQ ID NO: 16445 - DNA, 1289 bp, Homo sapiens
  source 1..1289: mol_type = unassigned DNA
agcatcgcgcgcaaggcctgccggttgctcggggtcgtatgacgcacttttccagctcgagccctcacgaggccgtgggtacgaccggaagccgcagcatgctgatcccattttcaatgaagaattgcttccagttactttgtaactgccaggtcccagcagctggctttaaaaaaacagtaaaaaatgggctcattttacagtcaatttccaatgatgtctatcaaaatctggctgtggaagactggatccatgaccatatgaatctagaaggcaaaccaattctattcttttggcagaattctccctctgttgtaattggtaggcatcaaaatccttggcaggaatgtaacctgaatctaatgagagaagaaggtataaaactggctcggagaagaagtggaggaggaacagtctaccatgatatgggtaatatcaatttgactttctttacaaccaaaaaaaagtatgatagaatggaaaatctgaaattaattgtgagagctctgaatgctgtccaaccccagctggatgtgcaggctaccaaaagatttgaccttttacttgatggacagtttaaaatctcaggaacagcttctaagatcggccggactactgcctatcaccattgcactttattatgtagtactgatgggacgttcttgtcttctttgctaaagagcccttaccaagggatcaggagcaatgccactgctagcataccttccttagtgaaaaatcttttggaaaaggatcccactctgacctgtgaagtactaatgaatgctgttgctacagagtatgctgcttatcatcaaattgataatcacattcacctaataaacccaacggatgagacactgtttcctggaataaatagcaaagccaaagaactgcaaacttgggagtggatatatggcaaaactccaaagtttagtataaatacttcctttcatgtgttatatgaacagtcacacttggaaattaaagtattcatagacataaagaatggaagaattgaaatttgtaatattgaagcacctgatcattggttgccattggaaatacgtgacaaattaaattcaagtcttattggcagtaagttttgcccaactgaaactaccatgctaacaaatatattacttagaacatgtccacaagaccacaaactaaacagtaaatggaatattctctgtgaaaaaattaagggaataatgtgattccaagtaaatgtcttaatacagtttcaattagaaaataaaatgtctcatacttgcacattgtatgtc

SEQ ID NO: 16446 - DNA, 1424 bp, Homo sapiens
  source 1..1424: mol_type = unassigned DNA
agcatcgcgcgcaaggcctgccggttgctcggggtcgtatgacgcacttttccagctcgagccctcacgaggccgtgggtacgaccggaagccgcagactgaatctcgctctgttgcccagcccatctcggcccactgaaacctccacctcccgggttcaagcgattctcctgcctcagcctcccgagtagctgagattacaggcgcctgccaccacgcccagcatgctgatcccattttcaatgaagaattgcttccagttactttgtaactgccaggtcccagcagctggctttaaaaaaacagtaaaaaatgggctcattttacagtcaatttccaatgatgtctatcaaaatctggctgtggaagactggatccatgaccatatgaatctagaaggcaaaccaattctattcttttggcagaattctccctctgttgtaattggtaggcatcaaaatccttggcaggaatgtaacctgaatctaatgagagaagaaggtataaaactggctcggagaagaagtggaggaggaacagtctaccatgatatgggtaatatcaatttgactttctttacaaccaaaaaaaagtatgatagaatggaaaatctgaaattaattgtgagagctctgaatgctgtccaaccccagctggatgtgcaggctaccaaaagatttgaccttttacttgatggacagtttaaaatctcaggaacagcttctaagatcggccggactactgcctatcaccattgcactttattatgtagtactgatgggacgttcttgtcttctttgctaaagagcccttaccaagggatcaggagcaatgccactgctagcataccttccttagtgaaaaatcttttggaaaaggatcccactctgacctgtgaagtactaatgaatgctgttgctacagagtatgctgcttatcatcaaattgataatcacattcacctaataaacccaacggatgagacactgtttcctggaataaatagcaaagccaaagaactgcaaacttgggagtggatatatggcaaaactccaaagtttagtataaatacttcctttcatgtgttatatgaacagtcacacttggaaattaaagtattcatagacataaagaatggaagaattgaaatttgtaatattgaagcacctgatcattggttgccattggaaatacgtgacaaattaaattcaagtcttattggcagtaagttttgcccaactgaaactaccatgctaacaaatatattacttagaacatgtccacaagaccacaaactaaacagtaaatggaatattctctgtgaaaaaattaagggaataatgtgattccaagtaaatgtcttaatacagtttcaattagaaaataaaatgtctcatacttgcacattgtatgtcaaaaaaaaa

SEQ ID NO: 16447 - DNA, 1531 bp, Homo sapiens
  source 1..1531: mol_type = unassigned DNA
agcatcgcgcgcaaggcctgccggttgctcggggtcgtatgacgcacttttccagctcgagccctcacgaggccgtgggtacgaccggaagccgcagactgaatctcgctctgttgcccagcccatctcggcccactgaaacctccacctcccgggttcaagcgattctcctgcctcagcctcccgagtagctgagattacaggcgcctgccaccacgcccaggcggtgtccctgaagtataaatccaaagccttcatgcctgtaatccgagtgctttaggaggccaaggcaggaggactgcttgagcccaggagtttgagaccagcctggacaacaaacatgctgatcccattttcaatgaagaattgcttccagttactttgtaactgccaggtcccagcagctggctttaaaaaaacagtaaaaaatgggctcattttacagtcaatttccaatgatgtctatcaaaatctggctgtggaagactggatccatgaccatatgaatctagaaggcaaaccaattctattcttttggcagaattctccctctgttgtaattggtaggcatcaaaatccttggcaggaatgtaacctgaatctaatgagagaagaaggtataaaactggctcggagaagaagtggaggaggaacagtctaccatgatatgggtaatatcaatttgactttctttacaaccaaaaaaaagtatgatagaatggaaaatctgaaattaattgtgagagctctgaatgctgtccaaccccagctggatgtgcaggctaccaaaagatttgaccttttacttgatggacagtttaaaatctcaggaacagcttctaagatcggccggactactgcctatcaccattgcactttattatgtagtactgatgggacgttcttgtcttctttgctaaagagcccttaccaagggatcaggagcaatgccactgctagcataccttccttagtgaaaaatcttttggaaaaggatcccactctgacctgtgaagtactaatgaatgctgttgctacagagtatgctgcttatcatcaaattgataatcacattcacctaataaacccaacggatgagacactgtttcctggaataaatagcaaagccaaagaactgcaaacttgggagtggatatatggcaaaactccaaagtttagtataaatacttcctttcatgtgttatatgaacagtcacacttggaaattaaagtattcatagacataaagaatggaagaattgaaatttgtaatattgaagcacctgatcattggttgccattggaaatacgtgacaaattaaattcaagtcttattggcagtaagttttgcccaactgaaactaccatgctaacaaatatattacttagaacatgtccacaagaccacaaactaaacagtaaatggaatattctctgtgaaaaaattaagggaataatgtgattccaagtaaatgtcttaatacagtttcaattagaaaataaaatgtctcatacttgcacattgtatgtc

SEQ ID NO: 16448 - DNA, 1543 bp, Homo sapiens
  source 1..1543: mol_type = unassigned DNA
agcatcgcgcgcaaggcctgccggttgctcggggtcgtatgacgcacttttccagctcgagccctcacgaggccgtgggtacgaccggaagccgcagactgaatctcgctctgttgcccagcccatctcggcccactgaaacctccacctcccgggttcaagcgattctcctgcctcagcctcccgagtagctgagattacaggcgcctgccaccacgcccagagagatatttttagcactattaaaatacatgcattggctcaatacatgaattggatcaattctggaaccctaacaagatcacatttttgaccaaagtcaatatcttggactatagttaatttatcaagcatgctgatcccattttcaatgaagaattgcttccagttactttgtaactgccaggtcccagcagctggctttaaaaaaacagtaaaaaatgggctcattttacagtcaatttccaatgatgtctatcaaaatctggctgtggaagactggatccatgaccatatgaatctagaaggcaaaccaattctattcttttggcagaattctccctctgttgtaattggtaggcatcaaaatccttggcaggaatgtaacctgaatctaatgagagaagaaggtataaaactggctcggagaagaagtggaggaggaacagtctaccatgatatgggtaatatcaatttgactttctttacaaccaaaaaaaagtatgatagaatggaaaatctgaaattaattgtgagagctctgaatgctgtccaaccccagctggatgtgcaggctaccaaaagatttgaccttttacttgatggacagtttaaaatctcaggaacagcttctaagatcggccggactactgcctatcaccattgcactttattatgtagtactgatgggacgttcttgtcttctttgctaaagagcccttaccaagggatcaggagcaatgccactgctagcataccttccttagtgaaaaatcttttggaaaaggatcccactctgacctgtgaagtactaatgaatgctgttgctacagagtatgctgcttatcatcaaattgataatcacattcacctaataaacccaacggatgagacactgtttcctggaataaatagcaaagccaaagaactgcaaacttgggagtggatatatggcaaaactccaaagtttagtataaatacttcctttcatgtgttatatgaacagtcacacttggaaattaaagtattcatagacataaagaatggaagaattgaaatttgtaatattgaagcacctgatcattggttgccattggaaatacgtgacaaattaaattcaagtcttattggcagtaagttttgcccaactgaaactaccatgctaacaaatatattacttagaacatgtccacaagaccacaaactaaacagtaaatggaatattctctgtgaaaaaattaagggaataatgtgattccaagtaaatgtcttaatacagtttcaattagaaaataaaatgtctcatacttgcacattgtatgtc

SEQ ID NO: 16449 - DNA, 803 bp, Homo sapiens
  source 1..803: mol_type = unassigned DNA
aaaccgggatgttgcgggccgtagcgcgtgggcggccgtggggtcttgggcgcgcgcggtgtttctggcggtgggtcaggacttgcgggtcgcctccgccggtgttgaagcctcttgtgtgcacactttctcctcagcacttgggacgacctaatttcactgttaggaacggttgatcccgaacacaggagggagggtaaatatcgtaaaacatgttggacgctagctgtgtgcacgccccctgggagccaaaagggcgaagtaaaacatgcacacgaccgtaatgagattctgattcagtgatggggagccgtgtttggcagtgcagaggtagcgaagtgtcccaagaacatggaagactgaatctcgctctgttgcccagcccatctcggcccactgaaacctccacctcccgggttcaagcgattctcctgcctcagcctcccgagtagctgagattacaggcgcctgccaccacgcccagcatgctgatcccattttcaatgaagaattgcttccagttactttgtaactgccaggtcccagcagctggctttaaaaaaacagtaaaaaatgggctcattttacagtcaatttccaatgatgtctatcaaaatctggctgtggaagactggatccatgaccatatgaatctagaaggcaaaccaattctattcttttggcagaattctccctctgttgtaattggtaggcatcaaaatccttggcaggaatgtaacctgaatctaatgagagaagaaggtataaaactggctcggagaagaagtggaggaggaacagtc

SEQ ID NO: 16450 - DNA, 885 bp, Homo sapiens
  source 1..885: mol_type = unassigned DNA
ggggtcgtatgacgcacttttccagctcgagccctcacgaggccgtgggtacgaccggaagccgcagttcagtgatggggagccgtgtttggcagtgcagaggtagcgaagtgtcccaagaacatggaagcatgctgatcccattttcaatgaagaattgcttccagttactttgtaactgccaggtcccagcagctggctttaaaaaaacagtaaaaaatgggctcattttacagtcaatttccaatgatgtctatcaaaatctggctgtggaagactggatccatgaccatatgaatctagaaggcaaaccaattctattcttttggcagaattctccctctgttgtaattggtaggcatcaaaatccttggcaggaatgtaacctgaatctaatgagagaagaaggtataaaactggctcggagaagaagtggaggaggaacagtctaccatgatatgggtaatatcaatttgactttctttacaaccaaaaaaaagtatgatagaatggaaaatctgaaattaattgtgagagctctgaatgctgtccaaccccagctggatgtgcaggctaccaaaagatttgaccttttacttgatggacagtttaaaatctcaggaacagcttctaagatcggccggactactgcctatcaccattgcactttattatgtagtactgatgggacgttcttgtcttctttgctaaagagcccttaccaagggatcaggagcaatgccactgctagcataccttccttagtgaaaaatcttttggaaaaggatcccactctgacctgtgaagtactaatgaatgctgttgctacagagtatgctgcttatcatcaaattgataatcacattcacctaataaacccaacgg

SEQ ID NO: 16451 - DNA, 583 bp, Homo sapiens
  source 1..583: mol_type = unassigned DNA
gatgttgcgggccgtagcgcgtgggcggccgtggggtcttgggcgcgcgcggtgtttctggcggtgggtcaggacttgcgggtcgcctccgccggtgttgaagcctcttgtgtgcacactttctcctcagcacttgggacgacctaatttcactgttaggaacggttgatcccgaacacaggagggagggtaaatatcgtaaaacatgttggacgctagctgtgtgcacgccccctgggagccaaaagggcgaagtaaaacatgcacacgaccgtaatgagattctgagtaagttgtatatcattagagaggggacaaaataatagggtcttggcgaggtcttatgaagaagctgcgcctgcctagaaagatagatgggattgtgctgttttcgctttcagttcagtgatggggagccgtgtttggcagtgcagaggtagcgaagtgtcccaagaacatggaagcatgctgatcccattttcaatgaagaattgcttccagttactttgtaactgccaggtcccagcagctggctttaaaaaaacagtaaaaaatgggctcattttacagtcaatttccaatg

SEQ ID NO: 16452 - DNA, 482 bp, Homo sapiens
  source 1..482: mol_type = unassigned DNA
ggttgctcggggtcgtatgacgcacttttccagctcgagccctcacgaggccgtgggtacgaccggaagccgcagcatgctgatcccattttcaatgaagaattgcttccagttactttgtaactgccaggtcccagcagctggctttaaaaaaacagtaaaaaatgggctcattttacagtcaatttccaatgatgtctatcaaaatctggctgtggaagactggatccatgaccatatgaatctagaaggcaaaccaattctattcttttggcagaattctccctctgttgtaattggtaggcatcaaaatccttggcaggaatgtaacctgaatctaatgagagaagaaggtataaaactggctcggagaagaagtggaggaggaacagtctaccatgatatgggtaatatcaatttgactttctttacaaccaaaaaaaagtatgatagaatggaaaatctgaaattaattgtgagag

SEQ ID NO: 16453 - DNA, 7756 bp, Homo sapiens
  source 1..7756: mol_type = unassigned DNA
agtggggcagcaaatggacagggtgggtggcggaaaagggcccgggggaagttattacagggtgtcctcttccgccgccagaagccggaagttgtgtcccggacgtgtcaaccggggtctgagtgctcagagtacagctgcaaccgcgaccatgggcgggaagaacaagcagcgaactaaagggaacctgaggccttcaaacagtggccgagctgcagaactccttgccaaagaacagggaacagtgcctggatttattggttttggaacatctcagagtgacctaggctatgttcctgctattcaaggagctgaagaaattgacagtcttgtagattctgatttccgaatggtgctgcggaaactttcaaagaaagatgtcaccacaaaattaaaagctatgcaggaatttggaaccatgtgtacagagagagacacagaaactgtgaaaggagttcttccatattggccaagaattttttgcaaaatttcacttgatcatgaccgtcgcgtccgagaagccacacaacaagcttttgaaaaacttatccttaaagtaaagaaacagttggctccctacttaaaaagtttaatgggatattggctaatggctcagtgtgatacttacacaccagctgcgtttgcagcaaaagatgcatttgaagcggcttttcctccaagcaagcaacctgaagccatagcattttgtaaggatgaaattacaagtgtgctgcaggatcatcttataaaagaaacacctgatacactcagtgacccgcaaactgttccagaggaagaaagagaagctaaattctaccgggttgtaacttgttccttattggcattaaagagattactttgccttttacctgataatgagcttgattctctggaggagaaatttaagtctcttttatcacagaataagttttggaagtatggaaaacacagtgtacctcagattcgctcagcttattttgagttagtctctgcattgtgccagcgcattccacagttgatgaaagaggaagcatccaaagtgagcccatcagttctacttagcattgatgacagtgacccaattgtctgcccagctctctgggaagctgtactctatacacttacaactattgaggactgttggcttcatgtaaatgcaaaaaagagtgtgtttcccaagctatcaactgtgattcgtgaaggtggtcggggtctagctactgtcatatatccttaccttctgccattcatcagcaagctccctcagtccatcacaaatccaaagttggatttcttcaaaaatttcctcacgtctctagttgctgggctgtcaacagagagaactaaaaccagctctttagagtcctcggcagtaatatctgctttttttgaatgcttacgttttataatgcagcaaaacttaggtgaggaagagattgaacagatgctcgtcaatgatcagttgatcccttttattgatgcagttctcaaagacccaggattgcaacatgggcagctatttaaccatttagcagaaactctaagttcctgggaagccaaagcagacacggaaaaagatgaaaaaacagctcacaacttggagaacgtactgatacatttctgggaaagactgtcagagatctgtgttgcgaaaatcagtgagccagaagctgatgttgagtccgttttgggtgtatctaacctattacaggtgcttcagaagccgaagagctcattgaagtcaagtaaaaaaaaaaatggtaaggttagatttgctgatgagatacttgaaagcaataaagagaatgaaaaatgtgtatcttcagaaggagagaagattgaaggctgggaattaacaactgaaccttctctcactcataattcttcaggccttttgtctcctctaaggaaaaaacctttggaagacttagtctgtaaactcgcagatataagtattaattatgtcaatgaacgaaagtcagagcaacatctaaggtttctttctactctgcttgactccttttcttcaagccgagtatttaaaatgctacttggtgatgaaaaacagagtattgtccaagccaaacctcttgaaatagccaagcttgtacaaaaaaatcctgcggtgcagtttttataccagaaactgataggttggctaaatgaagatcaaaggaaggattttggtttcctggtggacattttgtacagtgctctccggtgctgtgacaatgatatggaaagaaaaaaagtcttggatgatctaaccaaggtggacttgaaatggaattctcttcttaagattattgaaaaggcatgtcctagttcagataaacatgctttagtaactccttggctcaaaggcgatatccttggtgagaaattggtcaacttggcagattgtctttgtaatgaggacttggaatccagggtatcttcagaatctcacttctcagaaagatggactcttctaagcttggtattatcccaacatgttaaaaatgattacttgattggagacgtatatgttgaaagaatcattgttagacttcatgaaactttattcaaaacaaagaaattatcagaagctgaaagcagtgactcatcagtgtcttttatctgtgatgtggcctataactatttcagctcagcgaaaggatgcttgctaatgccatcatctgaagatttattattaactctctttcagttatgtgctcagagcaaagaaaaaacacatttgccagattttcttatctgtaaactgaaaaatacttggctctctggtgtaaatttattggttcatcaaactgacagttcatataaagagagtaccttcctacatttgtctgctctgtggctgaagaaccaagttcaggcttcatctttggatatcaacagtctccaagtcctcttgtctgctgttgatgatttgctaaatacacttctagagagtgaagattcttatcttatgggagtttatattggaagtgtaatgccgaacgacagtgaatgggaaaagatgaggcagtctcttcctatgcagtggttacatagacctcttttagagggaagattgagtttgaattatgaatgtttcaaaacagattttaaggaacaggacataaagacacttcccagccatttgtgtacttcagcattattgagcaaaatggtcttaattgcactgagaaaggaaacagtcttagaaaataatgagcttgagaaaataattgcagaactgctttattcactgcagtggtgtgaagaattagataacccacctatttttctaattggattttgtgaaatacttcaaaaaatgaatattacgtatgataacttacgtgtacttggtaatacgtcgggccttttgcagctgttatttaacaggtccagagaacatggcacactgtggtctcttattattgctaagttgatcctttcccgaagcatttcatctgatgaagtaaaaccacattataagagaaaagaaagtttttttccactaactgaaggcaatttgcataccattcaaagtctatgtccatttttgtcaaaagaagaaaagaaagaatttagtgctcaatgtatacctgctcttttgggctggactaagaaagatctttgcagcactaatggaggttttggacatcttgccattttcaattcttgtctgcaaaccaaaagtatagatgatggagagctattacatggaatattaaaaatcataatatcctggaagaaagagcatgaagatatttttcttttcagttgtaatctatcagaagcaagtccagaggtactgggtgtaaatatagaaataatccggtttctttccctatttctgaaatactgctcatcccctttggcagagagtgagtgggacttcatcatgtgctccatgttggcttggttggagacaacaagtgagaatcaggcattgtattctattccacttgtgcaactgtttgcctgtgtcagctgtgatttggcctgtgacctcagtgctttctttgattccacaactctggataccattggcaatcttcctgtaaatctaatcagtgaatggaaagaatttttttcccaaggcatccacagtttgcttttacctattttggtgactgttacaggagaaaacaaagatgtgtctgaaacatcctttcagaatgcaatgctgaaacccatgtgtgaaacattaacgtatatctcaaaggaacagctattgagtcacaaacttcctgcaagattagttgctgaccaaaaaacaaacttaccagaatatctccagactttgttaaatacattggccccattactcctcttcagagctaggcctgtgcaaattgctgtttatcatatgctatacaaattgatgcctgaattaccacagtatgatcaggataatctaaagtcatacggagatgaagaagaagagccagccttgtcaccaccagcagcactgatgtctcttcttagcattcaagaggacttactagaaaatgttttggggtgtattcctgttggacagatagttactattaaaccactgagtgaagacttctgttatgttctgggataccttctcacttggaaattaatactaactttcttcaaagctgcatcatcacagcttcgggctttgtattccatgtatcttcggaaaacaaagagtttgaataaattgctctatcacctgttcaggcttatgccagaaaatccaacctatgcagagacagcagttgaggtcccaaataaggaccctaaaacattctttactgaggagctccagctgagtattagagaaacaacaatgcttccataccacattccacacttggcttgttcagtctatcatatgacattaaaagacttgcctgccatggttaggttgtggtggaatagcagtgagaagcgtgttttcaatattgtggatagatttacaagcaagtatgtcagcagtgttctttcttttcaagaaatatcttctgtacaaacaagtacacaactatttaatggcatgacggttaaagctcgagctactactcgagaggtaatggctacttatactattgaggacatagttattgaacttataatacaactgccttcaaattatccactgggttcaataatagtagaaagtgggaaaagagtaggagtagctgttcagcagtggcggaactggatgctgcagttaagcacttacctcacccatcagaatggaagtattatggaaggcttagctttatggaaaaataacgtagacaaacgttttgagggtgttgaagattgcatgatctgtttctcagtcattcacggtttcaactattcccttcccaaaaaagcctgtagaacatgcaagaaaaaattccattcagcctgcttgtacaaatggtttacatctagcaacaaatccacttgtccactgtgtcgtgagacgtttttctgagatttttttcactggaagggatccctgaagtacatcaaacaaaggcattggatttggatccgtctgaaagtgtggatgtggggaagccagtgagcattacttttaaataggaccttctctggaaaattattttggttaatgtaataatcctaaaatcaggtttacttaactttagattgctttgtaaatgtttggaaactttcttttacaaaagaatattacatatttgagagaaaatatttctattaatggtttaatttctttgtatatttaaaaataaatatgaaaaacccctaaattacagaattggaatttgtgaaaagattgcacaactatattattgataaacccattccgtttgttgatctgtgttttagaatagtccaagtgaagcaaaacgaactgagagagctgatttacatctatagatattttaagccttatttattagttatgacaataaattagtattctgatatttgtagattattttaatgataaaaatgacactaagctattaatacggcttgtcttaagatatctggaggcatgctctgaaatcctatataaaagagtttaaactgaactttaaggtgcctccatttatcaagggttatgaaactcagaaaattaaattcttgatgctgacctttttgcttgtgggagaattatttctatatattagtgaaatttgaattgtaaacttgtcagtgaatttatcactctgagcgagtctctagagggtgagaatttgagagaaatagtaatttgattatttcattcatgaagcggagtggtagttatccttctattgagagggaagaaataaatgagtattactgaaacttaaagatcagtggaaaaaaaaaacatttaaaaatgttgtaggagactttcaattttggaagcaaactgagctattcttaccagccaaagttatactaaataagagacttgggggagcaaatgtttttcagccttcagaaatgaaagttaaggattttagcactaggtaaaattcagtataataggctgaagtggagtaagtgaaaacctgccttttgccactcttaaaaattgtgcccaaaatataaaagtgtggaactttagaacttggaataattttattgcagtcttccattacatggaaatagcatatctaatatctaggttacttgagagaccagctaatcatctctgttgcacatgtttaattggcaaaaagcaattcatgataaataaaattactgctttccatctactgggtaaaatgactattgaaatagtatgaatgtggtcagaggattatagttgagagtgaagtactatgtgtgagttatagatctctcgaattatatttatagatgcagtgtcctgcccagttttgtttgcctcctacattttactgtaaaatatttattgtcttctagccttgagcctctgagggtcagtaagtgaagtacagatagcaaaattttactacctcgttaacccttttcttaaaatattctctatctttctatgtctctttctgacatagtaatcccaaaggattgtgttactccccgtgaaagttattacttttcctttaaaaatggttttataataagactgtttaaaacctttccagtattggtacatcttggcttctggcccaaaccccaagcagaaaagaaaatggaataatggagcattgtttttccacattagtattagggcatcagattcttggtgaaacactataattaagtagttataattaaataactgttcttcatacttaggactcttaatacatttctttaagacttgtaagtataattgtaaagcttgttaactgtttatatactaaagaaaaagctttacaagataagactgaaattcagaataccacatctgtacagcgttgacaactctaactaaaaggattacagcccttaaaattttagcttaaggacattttaaaattgcatgagattagcaaaattattaatttaaaaccccaaagtaaattgcaaattttaaaatttatttttgactcttttatcacatgctccaatgtatgtacataagtgtctgtggcttaaataatatgttgttatttgatacatttttgtggtgcaagtaattaatgttattatttgattgttataccatatgtgcccattaaaattctttttaattaaaaatatttcaaatatgcagaaaaataataatataaatgcccttgtacccttcacatactattttgccatatttgcttctgatttttaaataaataaaatgttactcttttgtacttct

SEQ ID NO: 16454 - DNA, 7762 bp, Homo sapiens
  source 1..7762: mol_type = unassigned DNA
agtggggcagcaaatggacagggtgggtggcggaaaagggcccgggggaagttattacagggtgtcctcttccgccgccagaagccggaagttgtgtcccggacgtgtcaaccggggtctgagtgctcagagtacagctgcaaccgcgaccatgggcgggaagaacaagcagcgaactaaagggaacctgaggccttcaaacagtggccgagctgcagaactccttgccaaagaacagggaacagtgcctggatttattggttttggaacatctcagagtgacctaggctatgttcctgctattcaaggagctgaagaaattgacagtcttgtagattctgatttccgaatggtgctgcggaaactttcaaagaaagatgtcaccacaaaattaaaagcaaatgctatgcaggaatttggaaccatgtgtacagagagagacacagaaactgtgaaaggagttcttccatattggccaagaattttttgcaaaatttcacttgatcatgaccgtcgcgtccgagaagccacacaacaagcttttgaaaaacttatccttaaagtaaagaaacagttggctccctacttaaaaagtttaatgggatattggctaatggctcagtgtgatacttacacaccagctgcgtttgcagcaaaagatgcatttgaagcggcttttcctccaagcaagcaacctgaagccatagcattttgtaaggatgaaattacaagtgtgctgcaggatcatcttataaaagaaacacctgatacactcagtgacccgcaaactgttccagaggaagaaagagaagctaaattctaccgggttgtaacttgttccttattggcattaaagagattactttgccttttacctgataatgagcttgattctctggaggagaaatttaagtctcttttatcacagaataagttttggaagtatggaaaacacagtgtacctcagattcgctcagcttattttgagttagtctctgcattgtgccagcgcattccacagttgatgaaagaggaagcatccaaagtgagcccatcagttctacttagcattgatgacagtgacccaattgtctgcccagctctctgggaagctgtactctatacacttacaactattgaggactgttggcttcatgtaaatgcaaaaaagagtgtgtttcccaagctatcaactgtgattcgtgaaggtggtcggggtctagctactgtcatatatccttaccttctgccattcatcagcaagctccctcagtccatcacaaatccaaagttggatttcttcaaaaatttcctcacgtctctagttgctgggctgtcaacagagagaactaaaaccagctctttagagtcctcggcagtaatatctgctttttttgaatgcttacgttttataatgcagcaaaacttaggtgaggaagagattgaacagatgctcgtcaatgatcagttgatcccttttattgatgcagttctcaaagacccaggattgcaacatgggcagctatttaaccatttagcagaaactctaagttcctgggaagccaaagcagacacggaaaaagatgaaaaaacagctcacaacttggagaacgtactgatacatttctgggaaagactgtcagagatctgtgttgcgaaaatcagtgagccagaagctgatgttgagtccgttttgggtgtatctaacctattacaggtgcttcagaagccgaagagctcattgaagtcaagtaaaaaaaaaaatggtaaggttagatttgctgatgagatacttgaaagcaataaagagaatgaaaaatgtgtatcttcagaaggagagaagattgaaggctgggaattaacaactgaaccttctctcactcataattcttcaggccttttgtctcctctaaggaaaaaacctttggaagacttagtctgtaaactcgcagatataagtattaattatgtcaatgaacgaaagtcagagcaacatctaaggtttctttctactctgcttgactccttttcttcaagccgagtatttaaaatgctacttggtgatgaaaaacagagtattgtccaagccaaacctcttgaaatagccaagcttgtacaaaaaaatcctgcggtgcagtttttataccagaaactgataggttggctaaatgaagatcaaaggaaggattttggtttcctggtggacattttgtacagtgctctccggtgctgtgacaatgatatggaaagaaaaaaagtcttggatgatctaaccaaggtggacttgaaatggaattctcttcttaagattattgaaaaggcatgtcctagttcagataaacatgctttagtaactccttggctcaaaggcgatatccttggtgagaaattggtcaacttggcagattgtctttgtaatgaggacttggaatccagggtatcttcagaatctcacttctcagaaagatggactcttctaagcttggtattatcccaacatgttaaaaatgattacttgattggagacgtatatgttgaaagaatcattgttagacttcatgaaactttattcaaaacaaagaaattatcagaagctgaaagcagtgactcatcagtgtcttttatctgtgatgtggcctataactatttcagctcagcgaaaggatgcttgctaatgccatcatctgaagatttattattaactctctttcagttatgtgctcagagcaaagaaaaaacacatttgccagattttcttatctgtaaactgaaaaatacttggctctctggtgtaaatttattggttcatcaaactgacagttcatataaagagagtaccttcctacatttgtctgctctgtggctgaagaaccaagttcaggcttcatctttggatatcaacagtctccaagtcctcttgtctgctgttgatgatttgctaaatacacttctagagagtgaagattcttatcttatgggagtttatattggaagtgtaatgccgaacgacagtgaatgggaaaagatgaggcagtctcttcctatgcagtggttacatagacctcttttagagggaagattgagtttgaattatgaatgtttcaaaacagattttaaggaacaggacataaagacacttcccagccatttgtgtacttcagcattattgagcaaaatggtcttaattgcactgagaaaggaaacagtcttagaaaataatgagcttgagaaaataattgcagaactgctttattcactgcagtggtgtgaagaattagataacccacctatttttctaattggattttgtgaaatacttcaaaaaatgaatattacgtatgataacttacgtgtacttggtaatacgtcgggccttttgcagctgttatttaacaggtccagagaacatggcacactgtggtctcttattattgctaagttgatcctttcccgaagcatttcatctgatgaagtaaaaccacattataagagaaaagaaagtttttttccactaactgaaggcaatttgcataccattcaaagtctatgtccatttttgtcaaaagaagaaaagaaagaatttagtgctcaatgtatacctgctcttttgggctggactaagaaagatctttgcagcactaatggaggttttggacatcttgccattttcaattcttgtctgcaaaccaaaagtatagatgatggagagctattacatggaatattaaaaatcataatatcctggaagaaagagcatgaagatatttttcttttcagttgtaatctatcagaagcaagtccagaggtactgggtgtaaatatagaaataatccggtttctttccctatttctgaaatactgctcatcccctttggcagagagtgagtgggacttcatcatgtgctccatgttggcttggttggagacaacaagtgagaatcaggcattgtattctattccacttgtgcaactgtttgcctgtgtcagctgtgatttggcctgtgacctcagtgctttctttgattccacaactctggataccattggcaatcttcctgtaaatctaatcagtgaatggaaagaatttttttcccaaggcatccacagtttgcttttacctattttggtgactgttacaggagaaaacaaagatgtgtctgaaacatcctttcagaatgcaatgctgaaacccatgtgtgaaacattaacgtatatctcaaaggaacagctattgagtcacaaacttcctgcaagattagttgctgaccaaaaaacaaacttaccagaatatctccagactttgttaaatacattggccccattactcctcttcagagctaggcctgtgcaaattgctgtttatcatatgctatacaaattgatgcctgaattaccacagtatgatcaggataatctaaagtcatacggagatgaagaagaagagccagccttgtcaccaccagcagcactgatgtctcttcttagcattcaagaggacttactagaaaatgttttggggtgtattcctgttggacagatagttactattaaaccactgagtgaagacttctgttatgttctgggataccttctcacttggaaattaatactaactttcttcaaagctgcatcatcacagcttcgggctttgtattccatgtatcttcggaaaacaaagagtttgaataaattgctctatcacctgttcaggcttatgccagaaaatccaacctatgcagagacagcagttgaggtcccaaataaggaccctaaaacattctttactgaggagctccagctgagtattagagaaacaacaatgcttccataccacattccacacttggcttgttcagtctatcatatgacattaaaagacttgcctgccatggttaggttgtggtggaatagcagtgagaagcgtgttttcaatattgtggatagatttacaagcaagtatgtcagcagtgttctttcttttcaagaaatatcttctgtacaaacaagtacacaactatttaatggcatgacggttaaagctcgagctactactcgagaggtaatggctacttatactattgaggacatagttattgaacttataatacaactgccttcaaattatccactgggttcaataatagtagaaagtgggaaaagagtaggagtagctgttcagcagtggcggaactggatgctgcagttaagcacttacctcacccatcagaatggaagtattatggaaggcttagctttatggaaaaataacgtagacaaacgttttgagggtgttgaagattgcatgatctgtttctcagtcattcacggtttcaactattcccttcccaaaaaagcctgtagaacatgcaagaaaaaattccattcagcctgcttgtacaaatggtttacatctagcaacaaatccacttgtccactgtgtcgtgagacgtttttctgagatttttttcactggaagggatccctgaagtacatcaaacaaaggcattggatttggatccgtctgaaagtgtggatgtggggaagccagtgagcattacttttaaataggaccttctctggaaaattattttggttaatgtaataatcctaaaatcaggtttacttaactttagattgctttgtaaatgtttggaaactttcttttacaaaagaatattacatatttgagagaaaatatttctattaatggtttaatttctttgtatatttaaaaataaatatgaaaaacccctaaattacagaattggaatttgtgaaaagattgcacaactatattattgataaacccattccgtttgttgatctgtgttttagaatagtccaagtgaagcaaaacgaactgagagagctgatttacatctatagatattttaagccttatttattagttatgacaataaattagtattctgatatttgtagattattttaatgataaaaatgacactaagctattaatacggcttgtcttaagatatctggaggcatgctctgaaatcctatataaaagagtttaaactgaactttaaggtgcctccatttatcaagggttatgaaactcagaaaattaaattcttgatgctgacctttttgcttgtgggagaattatttctatatattagtgaaatttgaattgtaaacttgtcagtgaatttatcactctgagcgagtctctagagggtgagaatttgagagaaatagtaatttgattatttcattcatgaagcggagtggtagttatccttctattgagagggaagaaataaatgagtattactgaaacttaaagatcagtggaaaaaaaaaacatttaaaaatgttgtaggagactttcaattttggaagcaaactgagctattcttaccagccaaagttatactaaataagagacttgggggagcaaatgtttttcagccttcagaaatgaaagttaaggattttagcactaggtaaaattcagtataataggctgaagtggagtaagtgaaaacctgccttttgccactcttaaaaattgtgcccaaaatataaaagtgtggaactttagaacttggaataattttattgcagtcttccattacatggaaatagcatatctaatatctaggttacttgagagaccagctaatcatctctgttgcacatgtttaattggcaaaaagcaattcatgataaataaaattactgctttccatctactgggtaaaatgactattgaaatagtatgaatgtggtcagaggattatagttgagagtgaagtactatgtgtgagttatagatctctcgaattatatttatagatgcagtgtcctgcccagttttgtttgcctcctacattttactgtaaaatatttattgtcttctagccttgagcctctgagggtcagtaagtgaagtacagatagcaaaattttactacctcgttaacccttttcttaaaatattctctatctttctatgtctctttctgacatagtaatcccaaaggattgtgttactccccgtgaaagttattacttttcctttaaaaatggttttataataagactgtttaaaacctttccagtattggtacatcttggcttctggcccaaaccccaagcagaaaagaaaatggaataatggagcattgtttttccacattagtattagggcatcagattcttggtgaaacactataattaagtagttataattaaataactgttcttcatacttaggactcttaatacatttctttaagacttgtaagtataattgtaaagcttgttaactgtttatatactaaagaaaaagctttacaagataagactgaaattcagaataccacatctgtacagcgttgacaactctaactaaaaggattacagcccttaaaattttagcttaaggacattttaaaattgcatgagattagcaaaattattaatttaaaaccccaaagtaaattgcaaattttaaaatttatttttgactcttttatcacatgctccaatgtatgtacataagtgtctgtggcttaaataatatgttgttatttgatacatttttgtggtgcaagtaattaatgttattatttgattgttataccatatgtgcccattaaaattctttttaattaaaaatatttcaaatatgcagaaaaataataatataaatgcccttgtacccttcacatactattttgccatatttgcttctgatttttaaataaataaaatgttactcttttgtacttct

SEQ ID NO: 16455 - DNA, 7749 bp, Homo sapiens
  source 1..7749: mol_type = unassigned DNA
cagcaaatggacagggtgggtggcggaaaagggcccgggggaagttattacagggtgtcctcttccgccgccagaagccggaagttgtgtcccggacgtgtcaaccggggtctgagtgctcagagtacagctgcaaccgcgaccatgggcgggaagaacaagcagcgaactaaagggaacctgaggccttcaaacagtggccgagctgcagaactccttgccaaagaacagggaacagtgcctggatttattggttttggaacatctcagagtgacctaggctatgttcctgctattcaaggagctgaagaaattgacagtcttgtagattctgatttccgaatggtgctgcggaaactttcaaagaaagatgtcaccacaaaattaaaagctatgcaggaatttggaaccatgtgtacagagagagacacagaaactgtgaaaggagttcttccatattggccaagaattttttgcaaaatttcacttgatcatgaccgtcgcgtccgagaagccacacaacaagcttttgaaaaacttatccttaaagtaaagaaacagttggctccctacttaaaaagtttaatgggatattggctaatggctcagtgtgatacttacacaccagctgcgtttgcagcaaaagatgcatttgaagcggcttttcctccaagcaagcaacctgaagccatagcattttgtaaggatgaaattacaagtgtgctgcaggatcatcttataaaagaaacacctgatacactcagtgacccgcaaactgttccagaggaagaaagagaagctaaattctaccgggttgtaacttgttccttattggcattaaagagattactttgccttttacctgataatgagcttgattctctggaggagaaatttaagtctcttttatcacagaataagttttggaagtatggaaaacacagtgtacctcagattcgctcagcttattttgagttagtctctgcattgtgccagcgcattccacagttgatgaaagaggaagcatccaaagtgagcccatcagttctacttagcattgatgacagtgacccaattgtctgcccagctctctgggaagctgtactctatacacttacaactattgaggactgttggcttcatgtaaatgcaaaaaagagtgtgtttcccaagctatcaactgtgattcgtgaaggtggtcggggtctagctactgtcatatatccttaccttctgccattcatcagcaagctccctcagtccatcacaaatccaaagttggatttcttcaaaaatttcctcacgtctctagttgctgggctgtcaacagagagaactaaaaccagctctttagagtcctcggcagtaatatctgctttttttgaatgcttacgttttataatgcagcaaaacttaggtgaggaagagattgaacagatgctcgtcaatgatcagttgatcccttttattgatgcagttctcaaagacccaggattgcaacatgggcagctatttaaccatttagcagaaactctaagttcctgggaagccaaagcagacacggaaaaagatgaaaaaacagctcacaacttggagaacgtactgatacatttctgggaaagactgtcagagatctgtgttgcgaaaatcagtgagccagaagctgatgttgagtccgttttgggtgtatctaacctattacaggtgcttcagaagccgaagagctcattgaagtcaagtaaaaaaaaaaatggtaaggttagatttgctgatgagatacttgaaagcaataaagagaatgaaaaatgtgtatcttcagaaggagagaagattgaaggctgggaattaacaactgaaccttctctcactcataattcttcaggccttttgtctcctctaaggaaaaaacctttggaagacttagtctgtaaactcgcagatataagtattaattatgtcaatgaacgaaagtcagagcaacatctaaggtttctttctactctgcttgactccttttcttcaagccgagtatttaaaatgctacttggtgatgaaaaacagagtattgtccaagccaaacctcttgaaatagccaagcttgtacaaaaaaatcctgcggtgcagtttttataccagaaactgataggttggctaaatgaagatcaaaggaaggattttggtttcctggtggacattttgtacagtgctctccggtgctgtgacaatgatatggaaagaaaaaaagtcttggatgatctaaccaaggtggacttgaaatggaattctcttcttaagattattgaaaaggcatgtcctagttcagataaacatgctttagtaactccttggctcaaaggcgatatccttggtgagaaattggtcaacttggcagattgtctttgtaatgaggacttggaatccagggtatcttcagaatctcacttctcagaaagatggactcttctaagcttggtattatcccaacatgttaaaaatgattacttgattggagacgtatatgttgaaagaatcattgttagacttcatgaaactttattcaaaacaaagaaattatcagaagctgaaagcagtgactcatcagtgtcttttatctgtgatgtggcctataactatttcagctcagcgaaaggatgcttgctaatgccatcatctgaagatttattattaactctctttcagttatgtgctcagagcaaagaaaaaacacatttgccagattttcttatctgtaaactgaaaaatacttggctctctggtgtaaatttattggttcatcaaactgacagttcatataaagagagtaccttcctacatttgtctgctctgtggctgaagaaccaagttcaggcttcatctttggatatcaacagtctccaagtcctcttgtctgctgttgatgatttgctaaatacacttctagagagtgaagattcttatcttatgggagtttatattggaagtgtaatgccgaacgacagtgaatgggaaaagatgaggcagtctcttcctatgcagtggttacatagacctcttttagagggaagattgagtttgaattatgaatgtttcaaaacagattttaaggaacaggacataaagacacttcccagccatttgtgtacttcagcattattgagcaaaatggtcttaattgcactgagaaaggaaacagtcttagaaaataatgagcttgagaaaataattgcagaactgctttattcactgcagtggtgtgaagaattagataacccacctatttttctaattggattttgtgaaatacttcaaaaaatgaatattacgtatgataacttacgtgtacttggtaatacgtcgggccttttgcagctgttatttaacaggtccagagaacatggcacactgtggtctcttattattgctaagttgatcctttcccgaagcatttcatctgatgaagtaaaaccacattataagagaaaagaaagtttttttccactaactgaaggcaatttgcataccattcaaagtctatgtccatttttgtcaaaagaagaaaagaaagaatttagtgctcaatgtatacctgctcttttgggctggactaagaaagatctttgcagcactaatggaggttttggacatcttgccattttcaattcttgtctgcaaaccaaaagtatagatgatggagagctattacatggaatattaaaaatcataatatcctggaagaaagagcatgaagatatttttcttttcagttgtaatctatcagaagcaagtccagaggtactgggtgtaaatatagaaataatccggtttctttccctatttctgaaatactgctcatcccctttggcagagagtgagtgggacttcatcatgtgctccatgttggcttggttggagacaacaagtgagaatcaggcattgtattctattccacttgtgcaactgtttgcctgtgtcagctgtgatttggcctgtgacctcagtgctttctttgattccacaactctggataccattggcaatcttcctgtaaatctaatcagtgaatggaaagaatttttttcccaaggcatccacagtttgcttttacctattttggtgactgttacaggagaaaacaaagatgtgtctgaaacatcctttcagaatgcaatgctgaaacccatgtgtgaaacattaacgtatatctcaaaggaacagctattgagtcacaaacttcctgcaagattagttgctgaccaaaaaacaaacttaccagaatatctccagactttgttaaatacattggccccattactcctcttcagagctaggcctgtgcaaattgctgtttatcatatgctatacaaattgatgcctgaattaccacagtatgatcaggataatctaaagtcatacggagatgaagaagaagagccagccttgtcaccaccagcagcactgatgtctcttcttagcattcaagaggacttactagaaaatgttttggggtgtattcctgttggacagatagttactattaaaccactgagtgaagacttctgttatgttctgggataccttctcacttggaaattaatactaactttcttcaaagctgcatcatcacagcttcgggctttgtattccatgtatcttcggaaaacaaagagtttgaataaattgctctatcacctgttcaggcttatgccagaaaatccaacctatgcagagacagcagttgaggtcccaaataaggaccctaaaacattctttactgaggagctccagctgagtattagagaaacaacaatgcttccataccacattccacacttggcttgttcagtctatcatatgacattaaaagacttgcctgccatggttaggttgtggtggaatagcagtgagaagcgtgttttcaatattgtggatagatttacaagcaagtatgtcagcagtgttctttcttttcaagaaatatcttctgtacaaacaagtacacaactatttaatggcatgacggttaaagctcgagctactactcgagaggtaatggctacttatactattgaggacatagttattgaacttataatacaactgccttcaaattatccactgggttcaataatagtagaaagtgggaaaagagtaggagtagctgttcagcagtggcggaactggatgctgcagttaagcacttacctcacccatcagaatggaagtattatggaaggcttagctttatggaaaaataacgtagacaaacgttttgagggtgttgaagattgcatgatctgtttctcagtcattcacggtttcaactattcccttcccaaaaaagcctgtagaacatgcaagaaaaaattccattcagcctgcttgtacaaatggtttacatctagcaacaaatccacttgtccactgtgtcgtgagacgtttttctgagatttttttcactggaagggatccctgaagtacatcaaacaaaggcattggatttggatccgtctgaaagtgtggatgtggggaagccagtgagcattacttttaaataggaccttctctggaaaattattttggttaatgtaataatcctaaaatcaggtttacttaactttagattgctttgtaaatgtttggaaactttcttttacaaaagaatattacatatttgagagaaaatatttctattaatggtttaatttctttgtatatttaaaaataaatatgaaaaacccctaaattacagaattggaatttgtgaaaagattgcacaactatattattgataaacccattccgtttgttgatctgtgttttagaatagtccaagtgaagcaaaacgaactgagagagctgatttacatctatagatattttaagccttatttattagttatgacaataaattagtattctgatatttgtagattattttaatgataaaaatgacactaagctattaatacggcttgtcttaagatatctggaggcatgctctgaaatcctatataaaagagtttaaactgaactttaaggtgcctccatttatcaagggttatgaaactcagaaaattaaattcttgatgctgacctttttgcttgtgggagaattatttctatatattagtgaaatttgaattgtaaacttgtcagtgaatttatcactctgagcgagtctctagagggtgagaatttgagagaaatagtaatttgattatttcattcatgaagcggagtggtagttatccttctattgagagggaagaaataaatgagtattactgaaacttaaagatcagtggaaaaaaaaaacatttaaaaatgttgtaggagactttcaattttggaagcaaactgagctattcttaccagccaaagttatactaaataagagacttgggggagcaaatgtttttcagccttcagaaatgaaagttaaggattttagcactaggtaaaattcagtataataggctgaagtggagtaagtgaaaacctgccttttgccactcttaaaaattgtgcccaaaatataaaagtgtggaactttagaacttggaataattttattgcagtcttccattacatggaaatagcatatctaatatctaggttacttgagagaccagctaatcatctctgttgcacatgtttaattggcaaaaagcaattcatgataaataaaattactgctttccatctactgggtaaaatgactattgaaatagtatgaatgtggtcagaggattatagttgagagtgaagtactatgtgtgagttatagatctctcgaattatatttatagatgcagtgtcctgcccagttttgtttgcctcctacattttactgtaaaatatttattgtcttctagccttgagcctctgagggtcagtaagtgaagtacagatagcaaaattttactacctcgttaacccttttcttaaaatattctctatctttctatgtctctttctgacatagtaatcccaaaggattgtgttactccccgtgaaagttattacttttcctttaaaaatggttttataataagactgtttaaaacctttccagtattggtacatcttggcttctggcccaaaccccaagcagaaaagaaaatggaataatggagcattgtttttccacattagtattagggcatcagattcttggtgaaacactataattaagtagttataattaaataactgttcttcatacttaggactcttaatacatttctttaagacttgtaagtataattgtaaagcttgttaactgtttatatactaaagaaaaagctttacaagataagactgaaattcagaataccacatctgtacagcgttgacaactctaactaaaaggattacagcccttaaaattttagcttaaggacattttaaaattgcatgagattagcaaaattattaatttaaaaccccaaagtaaattgcaaattttaaaatttatttttgactcttttatcacatgctccaatgtatgtacataagtgtctgtggcttaaataatatgttgttatttgatacatttttgtggtgcaagtaattaatgttattatttgattgttataccatatgtgcccattaaaattctttttaattaaaaatatttcaaatatgcagaaaaataataatataaatgcccttgtacccttcacatactattttgccatatttgcttctgatttttaaataaataaaatgttactcttttgtacttct

SEQ ID NO: 16456 - DNA, 2099 bp, Homo sapiens
  source 1..2099: mol_type = unassigned DNA
gtactgcattcatgaagtaggctttgaaaattatacatcttggacaagtttttaagggatagtgggctttccttacacaactaaaataacctttacttcacataaggtttcctgctagaaactttcaaacacatacaaaaatcagagaaaatacactgggtagtaacaaacatctctttttgttctatttcaggctattttggcattctgctggatatatgttcgtaaataccaaagtcggcgggaaagtgaagttgtctccaccataacagcaattttttctctagcaattgcacttatcacatcagcacttctaccagtggatatatttttggtttcttacatgaaaaatcaaaatggtacatttaaggactgggctaatgctaatgtcagcagacagattgaggacactgtattatacggttactatactttatattctgttatattgttctgtgtgttcttctggatcccttttgtctacttctattatgaagaaaaggatgatgatgatactagtaaatgtactcaaattaaaacggcactcaagtatactttgggatttgttgtgatttgtgcactgcttcttttagttggtgcctttgttccattgaatgttcccaataacaaaaattctacagagtgggaaaaagtgaagtccctatttgaagaacttggaagtagtcatggtttagctgcattgtcattttctatcagttctctgaccttgattggaatgttggcagctataacttacacagcctatggcatgtctgcgttacctttaaatctgataaaaggcactagaagcgctgcttatgaacgtttggaaaacactgaagacattgaagaagtagaacaacacattcaaacgattaaatcaaaaagcaaagatggtcgacctttgccagcaagggataaacgcgccttaaaacaatttgaagaaaggttacgaacacttaagaagagagagaggcatttagaattcattgaaaacagctggtggacaaaattttgtggcgctctgcgtcccctgaagatcgtctggggaatatttttcatcttagttgcattgctgtttgtaatttctctcttcttgtcaaatttagataaagctcttcattcagctggaatagattctggtttcataatttttggagctaacctgagtaatccactgaatatgcttttgcctttactacaaacagttttccctcttgattatattcttataacaattattattatgtactttatttttacttcaatggcaggaattcgaaatattggcatatggttcttttggattagattatataaaatcagaagaggtagaaccaggccccaagcactcctttttctctgcatgatacttctgcttattgtccttcacactagctacatgatttatagtcttgctccccaatatgttatgtatggaagccaaaattacttaatagagactaatataacttctgataatcataaaggcaattcaaccctttctgtgccaaagagatgtgatgcagatgctcctgaagatcagtgtactgttacccggacatacctattccttcacaagttctggttcttcagtgctgcttactattttggtaactgggcctttcttggggtatttttgattggattaattgtatcctgttgtaaagggaagaaatcggttattgaaggagtagatgaagattcagacataagtgatgatgagccctctgtctattctgcttgacagccttctgtcttaaaggttttataatgctgactgaatatctgttatgcatttttaaagtattaaactaacattaggatttgctaactagctttcatcaaaaatgggagcatggctataagacaactatattttattatatgttttctgaagtaacattgtatcatagattaacattttaaattaccataatcatgctatgtaaatataagactactggctttgtgagggaatgtttgtgcaaaattttttcctctaatgtataatagtgttaaattgattaaaaatcttccagaattaatattcccttttgtcactttttgaaaacataataaatcatctgtatctgtgc

SEQ ID NO: 16457 - DNA, 2209 bp, Homo sapiens
  source 1..2209: mol_type = unassigned DNA
actgcgtccgcacgcgccccgcccctgagcagtccttgctgccccgcccccgctcggctcgccgccaggggacgctagtgggtccagtctccttggcaaccacttgctcctccccctccgcccctttaacctttagggtgcgcgggtgcagtatatctcgcgctctctcccctttccccctcccctttccccaccccgggcgctcaggttggtctggaccggaagcgaagatggcgacttctggcgcggcctcggcggagctggtgatcggctggtgcatattcggcctcttactactggctattttggcattctgctggatatatgttcgtaaataccaaagtcggcgggaaagtgaagttgtctccaccataacagcaattttttctctagcaattgcacttatcacatcagcacttctaccagtggatatatttttggtttcttacatgaaaaatcaaaatggtacatttaaggactgggctaatgctaatgtcagcagacagattgaggacactgtattatacggttactatactttatattctgttatattgttctgtgtgttcttctggatcccttttgtctacttctattatgaagaaaaggatgatgatgatactagtaaatgtactcaaattaaaacggcactcaagtatactttgggatttgttgtgatttgtgcactgcttcttttagttggtgcctttgttccattgaatgttcccaataacaaaaattctacagagtgggaaaaagtgaagtccctatttgaagaacttggaagtagtcatggtttagctgcattgtcattttctatcagttctctgaccttgattggaatgttggcagctataacttacacagcctatggcatgtctgcgttacctttaaatctgataaaaggcactagaagcgctgcttatgaacgtttggaaaacactgaagacattgaagaagtagaacaacacattcaaacgattaaatcaaaaagcaaagatggtcgacctttgccagcaagggataaacgcgccttaaaacaatttgaagaaaggttacgaacacttaagaagagagagaggcatttagaattcattgaaaacagctggtggacaaaattttgtggcgctctgcgtcccctgaagatcgtctggggaatatttttcatcttagttgcattgctgtttgtaatttctctcttcttgtcaaatttagataaagctcttcattcagctggaatagattctggtttcataatttttggagctaacctgagtaatccactgaatatgcttttgcctttactacaaacagttttccctcttgattatattcttataacaattattattatgtactttatttttacttcaatggcaggaattcgaaatattggcatatggttcttttggattagattatataaaatcagaagaggtagaaccaggccccaagcactcctttttctctgcatgatacttctgcttattgtccttcacactagctacatgatttatagtcttgctccccaatatgttatgtatggaagccaaaattacttaatagagactaatataacttctgataatcataaaggcaattcaaccctttctgtgccaaagagatgtgatgcagatgctcctgaagatcagtgtactgttacccggacatacctattccttcacaagttctggttcttcagtgctgcttactattttggtaactgggcctttcttggggtatttttgattggattaattgtatcctgttgtaaagggaagaaatcggttattgaaggagtagatgaagattcagacataagtgatgatgagccctctgtctattctgcttgacagccttctgtcttaaaggttttataatgctgactgaatatctgttatgcatttttaaagtattaaactaacattaggatttgctaactagctttcatcaaaaatgggagcatggctataagacaactatattttattatatgttttctgaagtaacattgtatcatagattaacattttaaattaccataatcatgctatgtaaatataagactactggctttgtgagggaatgtttgtgcaaaattttttcctctaatgtataatagtgttaaattgattaaaaatcttccagaattaatattcccttttgtcactttttgaaaacataataaatcatctgtatctgtgcctta

SEQ ID NO: 16458 - DNA, 1230 bp, Homo sapiens
  source 1..1230: mol_type = unassigned DNA
cttctctcctcactcacccttcctggtgctttgggctctccttccttctcagacaagatgtcttatcagaaaaagcagcccacccctcagcccccagtggactgcgtgaagacctctggcggcggtggcggtggcggcggcagcggcggtggtggctgcggcttcttcggcggcggcggctcagggggcggtagcagcggttctggctgcggctactccggcggcggtggctactctggcggcggctgcggcgggggctcctccggcggcgggggcgggggcggcattggaggctgcggagggggctccggtgggagcgtcaagtactccggaggcggcggctcctccggcgggggctctggctgtttctccagcggtgggggcggctccggctgcttctcctccggtggcggcggctcctccgggggcggctccggctgcttctccagcggtgggggcggctcctccgggggcggctccggctgcttctcctccggcggcggcggcttctcgggccaggcggtccagtgccagagctacggaggcgtctctagcggcggctcctccgggggcggctccggctgcttctccagcggcgggggcggcggctctgtctgcggctactctggcggcggctctggctgcggcggaggctcctctggcggcagcggctccggctacgtctcctcgcagcaggtcactcagacctcgtgcgcgccccagccgagttacggaggggggtcgtccggcggcggcggcagcggcggaagcggctgcttctccagcggcgggggcggcgggagctccggctgcggcggcggctcctccgggattggcagcggctgcatcatcagtggcgggggctccgtctgcggaggtggttcctctggaggcggcggcggcggctcctccgtgggtggctccgggagtggcaagggcgtcccgatctgccaccagacccagcagaagcaggcgcctacctggccgtccaaatagatcccccagggtaccacggaggcgaaggagttggaggtgttttccaggggcaccgatgggcttagagctctcatgatgctacccgaggtttgcaaatccttcatgtcttaacctacctggaagaagccattgagctctccggctgcatctagttctgctgtttagcctctttggtttctgtacaactacctcccaaccccagtgcctcagtcaataaatttgcaaattcatgag

SEQ ID NO: 16459 - DNA, 1190 bp, Homo sapiens
  source 1..1190: mol_type = unassigned DNA
ggctctccttccttctcagacaagatgtcttatcagaaaaagcagcccacccctcagcccccagtggactgcgtgaagacctctggcggcggtggcggtggcggcggcagcggcggtggtggctgcggcttcttcggcggcggcggctcagggggcggtagcagcggttctggctgcggctactccggcggcggtggctactctggcggcggctgcggcgggggctcctccggcggcgggggcgggggcggcattggaggctgcggagggggctccggtgggagcgtcaagtactccggaggcggcggctcctccggcgggggctctggctgtttctccagcggtgggggcggctccggctgcttctcctccggtggcggcggctcctccgggggcggctccggctgcttctccagcggtgggggcggctcctccgggggcggctccggctgcttctcctccggcggcggcggcttctcgggccaggcggtccagtgccagagctacggaggcgtctctagcggcggctcctccgggggcggctccggctgcttctccagcggcgggggcggcggctctgtctgcggctactctggcggcggctctggctgcggcggaggctcctctggcggcagcggctccggctacgtctcctcgcagcaggtcactcagacctcgtgcgcgccccagccgagttacggagggggggtccggcggcggcggcagcggcggaagcggctgcttctccagcggcgggggcggcgggagctccggctgcggcggcggctcctccgggattggcagcggctgcatcatcagtggcgggggctccgtctgcggaggtggttcctctggaggcggcggcggcggctcctccgtgggtggctccgggagtggcaagggcgtcccgatctgccaccagacccagcagaagcaggcgcctacctggccgtccaaatagatcccccagggtaccacggaggcgaaggagttggaggtgttttccaggggcaccgatgggcttagagctctcatgatgctacccgaggtttgcaaatccttcatgtcttaacctacctggaagaagccattgagctctccggctgcatctagttctgctgtttagcctctttggtttctgtacaactacctcccaaccccagtgcctcagtcaataaatttgcaaattc

SEQ ID NO: 16460 - DNA, 2940 bp, Homo sapiens
  source 1..2940: mol_type = unassigned DNA
gcggcggagctggcgctgggaggggaggagcgcgcagcccgcgcgccgcagggccgggcggaaagtttttcctgacggagttttggctgcggcagcggcggcggcggccggagcgggccatggacgcgctcaagtcggcggggcgggcgctgatccggagccccagcttggccaagcagagctgggggggcggtggccggcaccgcaagctgcctgagaactggacagacacgcgggagacgctgctggaggggatgctgttcagcctcaagtacctgggcatgacgctagtggagcagcccaagggtgaggagctgtcggccgccgccatcaagaggatcgtggctacagctaaggccagtgggaagaagctgcagaaggtgactctgaaggtgtcgccacggggaattatcctgacagacaacctcaccaaccagctcattgagaacgtgtccatatacaggatctcctattgcacagcagacaagatgcacgacaaggtgtttgcatacatcgcccagagccagcacaaccagagcctcgagtgccacgccttcctctgcaccaagcggaagatggcacaggctgttaccctcaccgtagcccaggccttcaaagtcgcctttgagttttggcaggtgtccaaggaagagaaagagaagagggacaaagccagccaagagggaggggacgtcctgggggcccgccaagactgcaccccctccttgaagagcttggtcgccactgggaacctgctggacttagaggagacagctaaggccccgctgtccacggtcagcgccaacaccaccaacatggacgaggtgccgcggccacaagccttgagtggcagcagtgttgtctgggagctggatgatggcctggatgaagcgttttcgaggcttgcccagtctcggacaaaccctcaggtcctggacactggcctgacagcccaggacatgcattacgcccagtgcctctcgcctgtcgactgggacaagcctgacagcagcggcacagagcaggatgacctcttcagcttctgagggcccggggccagccggacacaagcggccctgacacgtgatggaccaaagccacctgctgcgggggagccagttctggggcccgcctgccacctctcccagccctcagcattgtcagcctgaagatcagagctgcagccagtcaggcaggggagagatttttcttttaagccctgctctttctctgagaaccaaaagatgccttgaatatttattcagtgacttctggcttatgctcagaagccagtctgcgtcaggcacgtctcctgctgcgtgacatgtgcagtgctgtaatcggctcccgcttgctctcctggagcaagctctgccctggctgtgggtatcaggactgtgaccaaagcatttctagtcccttctctctttctaaggacccaaatttccctgggggcatcctgcttcctgaaagctgttggatttcagtgatttttccccccaccccccagcacaggagagcacccacagccgcagaaggggaatgtgtcctcctgctctgcttcctcagggcccagcaggcgggggtttgagccctggaccccaggctcttagagactaaggggcagctcctgaccaaagacgatacagcttggcactttaaagcattaacagcaggtgtgaccctgagggctcctccatggtgctgcattgagtccagctttccttctgcccttcctccaggagaaggggcccaaggtccccgtggatggtctccacctgtgcttggaaccagtgtaactggctgctccctgctcccagggactgacacggggatcatctctgtgaccgccctccgtcgggcccctgcctgccttctcccctccacgcaaggctgtgctcttcctctggtttctgtgtgtccgtttgagtgtctgcgccccgcctccccatacttcctgggatgatgtgtgaaacctgacacctagatttatttggaaatattctatgaccactttacagatgaggaaacaggcctcaagcgtggaggggtagagtgaagagtagaacccaggtctgatgccaaagctgctttcttctctgcctcctcctcacgcaactcacacctccttttcttctagctttgttgtcctcccaggaaccaaaaaaccccagctattttctgaccaaaatgtgtttcataacaaaccatctggtgcctttccacacagaactggcaggagcctcgtgtcctgctagctgtctctcttgttgatttccgtgaaaatgcaagtgtttgaagtctgctcattccgagggtgaaacaaaatccaaccctgtcagaatcatgctgttctctttgctgacactgtgaccctgggtcgggacagaccagcagcaatctgtctttagaatcgctttccttcctccccttttgcccccgtggggctcccggcatcctgaaagccagcaaagcctccagcatcttttccatcctgaggtgcctcccagtggcctggcttgtcggagcaagtttcatcagccctagggaaaacacggccctcctgggaacctccttacctggagtaaccggacaccttagacggaggtgcctgagggtggggtgggatttgcagggtcattatcagaacatgaggataacttccttgcccctgctctgtagccacctccttggcaccggcctctatttgtcataaggcggcgtgggcgaggcctgacacaggccagccttggcacgaggggggccaggggttctgagaagcgctgccctgtgagagccacgctggccttcgtctccatctctggttgacgggctgtccgtgtgcctcctgtgtgtctgcagacaagtcttgctgtgctttatttgtgaaactttaatgaggaaaaaacaaataataaatgttctcgttttgaaactcaa

SEQ ID NO: 16461 - DNA, 2171 bp, Homo sapiens
  source 1..2171: mol_type = unassigned DNA
acacagcctgggggcatccgaatgcacgggagatgttttacactcagatgaaacaaactgtttagacctcggggaaaagagactgtgcttgaacaaaatgaaccaggagaaagcgccctcctgagacatgtctctgctttcatgtttgaattgcctgggattctgttctctaatttctgatccttataaactaaaactgcctaggaacattgagcatcctgactttgaaggagtctctgtggtgtttttgtgctaccatacatggggaataatgatgtgaggcagagggagagggaatgaatgggagagccaagagggaagagcgagccggggggaaaggagcgcgcagtgtttcctgctgcggttaggacctcacgccttgccagtacagagctcggtggcaagagccgctgggagctgctcccatcagttagaggatgtggagagggagcaccagaagaggacagcccgcagcctggctcgcagcctgagggacgctgtgggtgctcccagccgggcgagcacgctctgggagcggatctgcaggggagaagcacgcgagcctaacgtgagcgtcccgcctgtcgcgtgtcctgccttggtaagcgccctctccggtccttccacactgaaagcttccagcagagatcaagggaaggagtattgtgtgagacttgcagatttcctcctttctgtctggactggtttgatatttgcctgttgaaaagattactgaacgcagtgtgacaagatgagccgtctagctgcgttctgcttgcctgtgtgtgtgacacgtccaggtgtgaggccaaacctgagaagtgcagactgctcactgatagacgttgctgtaaacagtagtgccctgggtgtacagctggtctcaggatcggagaccccggacttattctctgctcggtgacacggccggcttcctgccgcagagctcctggtttctgttgatggcagttgataattggtagccacagtctgcggtcggagccacagcatttgagtctagcacctggggtgggccctgctgatacagtagagagagagtgaacgaggcagacagaaacacaccccccccccctccacgctcacacactctcccacaccccatgccagctataactgcagctctgagctgcctggagaggagattgccggaagctgaagggatgctttgaacgtgggggggctgcgtcacagttggactcccacttgcagaggacctgattatgtccagtgaccacctgaacaacagcacactgaaggaggctcagttcaaagacctgttcttaaaaaaagcggagctggagttcgcccaaatcatcatcatcgtcgtggtggtcacggtgatggtggtggtcatcgtctgcctgctgaaccactacaaagtctccacgcggtccttcatcaaccgcccgaaccagagccggaggcgggaggacgggctgccgcaggaagggtgcctgtggccttcagacagcgccgcaccgcggctgggcgcctcggagatcatgcatgccccgcggtccagggacaggttcacagcgccgtccttcatccagagggatcgcttcagccgcttccagcccacctacccctatgtgcagcacgagattgatcttcctcccaccatctccctgtccgacggtgaagagccacctccttaccaggggccctgcaccctgcagctccgggaccctgaacagcagatggaactcaaccgagagtccgtgagggccccacccaaccgaaccatatttgacagtgatttaatagacattgctatgtatagcgggggtccatgcccacccagcagcaactcgggcatcagtgcaagcacctgcagcagtaacgggaggatggaggggccaccccccacatacagcgaggtgatgggccaccacccaggcgcctctttcctccatcaccagcgcagcaacgcacacaggggcagcagactgcagtttcagcagaacaatgcagagagcacaatagtacccatcaaaggcaaagataggaagcctgggaacctggtctgattccttccaacgtgcacttcagctggagaaagaaaccaagaagggaagcggccgctgggcccctcctgcgcacagtgttgttcagtttcacatggtacaaataagtaaaaccaaatgagc

SEQ ID NO: 16462 - DNA, 14897 bp, Homo sapiens
  source 1..14897: mol_type = unassigned DNA
cagcggtgcgagctccaggcccatgcactgaggaggcggaaacaaggggagcccccagagctccatcaagccccctccaaaggctcccctacccggtccacgccccccaccccccctccccgcctcctcccaattgtgcatttttgcagccggaggcggctccgagatggggctgtgagcttcgcccggggagggggaaagagcagcgaggagtgaagcgggggggtggggtgaagggtttggatttcggggcagggggcgcacccccgtcagcaggccctccccaaggggctcggaactctacctcttcacccacgcccctggtgcgctttgccgaaggaaagaataagaacagagaaggaggagggggaaaggaggaaaagggggaccccccaactggggggggtgaaggagagaagtagcaggaccagaggggaaggggctgctgcttgcatcagcccacaccatgctgaccccgccgttgctcctgctgctgcccctgctctcagctctggtcgcggcggctatcgacgcccctaagacttgcagccccaagcagtttgcctgcagagatcaaataacctgtatctcaaagggctggcggtgcgacggtgagagggactgcccagacggatctgacgaggcccctgagatttgtccacagagtaaggcccagcgatgccagccaaacgagcataactgcctgggtactgagctgtgtgttcccatgtcccgcctctgcaatggggtccaggactgcatggacggctcagatgaggggccccactgccgagagctccaaggcaactgctctcgcctgggctgccagcaccattgtgtccccacactcgatgggcccacctgctactgcaacagcagctttcagcttcaggcagatggcaagacctgcaaagattttgatgagtgctcagtgtacggcacctgcagccagctatgcaccaacacagacggctccttcatatgtggctgtgttgaaggatacctcctgcagccggataaccgctcctgcaaggccaagaacgagccagtagaccggccccctgtgctgttgatagccaactcccagaacatcttggccacgtacctgagtggggcccaggtgtctaccatcacacctacgagcacgcggcagaccacagccatggacttcagctatgccaacgagaccgtatgctgggtgcatgttggggacagtgctgctcagacgcagctcaagtgtgcccgcatgcctggcctaaagggcttcgtggatgagcacaccatcaacatctccctcagtctgcaccacgtggaacagatggccatcgactggctgacaggcaacttctactttgtggatgacatcgatgataggatctttgtctgcaacagaaatggggacacatgtgtcacattgctagacctggaactctacaaccccaagggcattgccctggaccctgccatggggaaggtgtttttcactgactatgggcagatcccaaaggtggaacgctgtgacatggatgggcagaaccgcaccaagctcgtcgacagcaagattgtgtttcctcatggcatcacgctggacctggtcagccgccttgtctactgggcagatgcctatctggactatattgaagtggtggactatgagggcaagggccgccagaccatcatccagggcatcctgattgagcacctgtacggcctgactgtgtttgagaattatctctatgccaccaactcggacaatgccaatgcccagcagaagacgagtgtgatccgtgtgaaccgctttaacagcaccgagtaccaggttgtcacccgggtggacaagggtggtgccctccacatctaccaccagaggcgtcagccccgagtgaggagccatgcctgtgaaaacgaccagtatgggaagccgggtggctgctctgacatctgcctgctggccaacagccacaaggcgcggacctgccgctgccgttccggcttcagcctgggcagtgacgggaagtcatgcaagaagccggagcatgagctgttcctcgtgtatggcaagggccggccaggcatcatccggggcatggatatgggggccaaggtcccggatgagcacatgatccccattgaaaacctcatgaacccccgagccctggacttccacgctgagaccggcttcatctactttgccgacaccaccagctacctcattggccgccagaagattgatggcactgagcgggagaccatcctgaaggacggcatccacaatgtggagggtgtggccgtggactggatgggagacaatctgtactggacggacgatgggcccaaaaagacaatcagcgtggccaggctggagaaagctgctcagacccgcaagactttaatcgagggcaaaatgacacaccccagggctattgtggtggatccactcaatgggtggatgtactggacagactgggaggaggaccccaaggacagtcggcgtgggcggctggagagggcgtggatggatggctcacaccgagacatctttgtcacctccaagacagtgctttggcccaatgggctaagcctggacatcccggctgggcgcctctactgggtggatgccttctacgaccgcatcgagacgatactgctcaatggcacagaccggaagattgtgtatgaaggtcctgagctgaaccacgcctttggcctgtgtcaccatggcaactacctcttctggactgagtatcggagtggcagtgtctaccgcttggaacggggtgtaggaggcgcaccccccactgtgacccttctgcgcagtgagcggccccccatctttgagatccgaatgtatgatgcccagcagcagcaagttggcaccaacaaatgccgggtgaacaatggcggctgcagcagcctgtgcttggccacccctgggagccgccagtgcgcctgtgctgaggaccaggtgttggacgcagacggcgtcacttgcttggcgaacccatcctacgtgcctccaccccagtgccagccaggcgagtttgcctgtgccaacagccgctgcatccaggagcgctggaagtgtgacggagacaacgattgcctggacaacagtgatgaggccccagccctctgccatcagcacacctgcccctcggaccgattcaagtgcgagaacaaccggtgcatccccaaccgctggctctgcgacggggacaatgactgtgggaacagtgaagatgagtccaatgccacttgttcagcccgcacctgcccccccaaccagttctcctgtgccagtggccgctgcatccccatctcctggacgtgtgatctggatgacgactgtggggaccgctctgatgagtctgcttcgtgtgcctatcccacctgcttccccctgactcagtttacctgcaacaatggcagatgtatcaacatcaactggagatgcgacaatgacaatgactgtggggacaacagtgacgaagccggctgcagccactcctgttctagcacccagttcaagtgcaacagcgggcgttgcatccccgagcactggacctgcgatggggacaatgactgcggagactacagtgatgagacacacgccaactgcaccaaccaggccacgaggccccctggtggctgccacactgatgagttccagtgccggctggatggactatgcatccccctgcggtggcgctgcgatggggacactgactgcatggactccagcgatgagaagagctgtgagggagtgacccacgtctgcgatcccagtgtcaagtttggctgcaaggactcagctcggtgcatcagcaaagcgtgggtgtgtgatggcgacaatgactgtgaggataactcggacgaggagaactgcgagtccctggcctgcaggccaccctcgcacccttgtgccaacaacacctcagtctgcctgccccctgacaagctgtgtgatggcaacgacgactgtggcgacggctcagatgagggcgagctctgcgaccagtgctctctgaataacggtggctgcagccacaactgctcagtggcacctggcgaaggcattgtgtgttcctgccctctgggcatggagctggggcccgacaaccacacctgccagatccagagctactgtgccaagcatctcaaatgcagccaaaagtgcgaccagaacaagttcagcgtgaagtgctcctgctacgagggctgggtcctggaacctgacggcgagagctgccgcagcctggaccccttcaagccgttcatcattttctccaaccgccatgaaatccggcgcatcgatcttcacaaaggagactacagcgtcctggtgcccggcctgcgcaacaccatcgccctggacttccacctcagccagagcgccctctactggaccgacgtggtggaggacaagatctaccgcgggaagctgctggacaacggagccctgactagtttcgaggtggtgattcagtatggcctggccacacccgagggcctggctgtagactggattgcaggcaacatctactgggtggagagtaacctggatcagatcgaggtggccaagctggatgggaccctccggaccaccctgctggccggtgacattgagcacccaagggcaatcgcactggatccccgggatgggatcctgttttggacagactgggatgccagcctgccccgcattgaggcagcctccatgagtggggctgggcgccgcaccgtgcaccgggagaccggctctgggggctggcccaacgggctcaccgtggactacctggagaagcgcatcctttggattgacgccaggtcagatgccatttactcagcccgttacgacggctctggccacatggaggtgcttcggggacacgagttcctgtcgcacccgtttgcagtgacgctgtacgggggggaggtctactggactgactggcgaacaaacacactggctaaggccaacaagtggaccggccacaatgtcaccgtggtacagaggaccaacacccagccctttgacctgcaggtgtaccacccctcccgccagcccatggctcccaatccctgtgaggccaatgggggccagggcccctgctcccacctgtgtctcatcaactacaaccggaccgtgtcctgcgcctgcccccacctcatgaagctccacaaggacaacaccacctgctatgagtttaagaagttcctgctgtacgcacgtcagatggagatccgaggtgtggacctggatgctccctactacaactacatcatctccttcacggtgcccgacatcgacaacgtcacagtgctagactacgatgcccgcgagcagcgtgtgtactggtctgacgtgcggacacaggccatcaagcgggccttcatcaacggcacaggcgtggagacagtcgtctctgcagacttgccaaatgcccacgggctggctgtggactgggtctcccgaaacctgttctggacaagctatgacaccaataagaagcagatcaatgtggcccggctggatggctccttcaagaacgcagtggtgcagggcctggagcagccccatggccttgtcgtccaccctctgcgtgggaagctctactggaccgatggtgacaacatcagcatggccaacatggatggcagcaatcgcaccctgctcttcagtggccagaagggccccgtgggcctggctattgacttccctgaaagcaaactctactggatcagctccgggaaccataccatcaaccgctgcaacctggatgggagtgggctggaggtcatcgatgccatgcggagccagctgggcaaggccaccgccctggccatcatgggggacaagctgtggtgggctgatcaggtgtcggaaaagatgggcacatgcagcaaggctgacggctcgggctccgtggtccttcggaacagcaccaccctggtgatgcacatgaaggtctatgacgagagcatccagctggaccataagggcaccaacccctgcagtgtcaacaacggtgactgctcccagctctgcctgcccacgtcagagacgacccgctcctgcatgtgcacagccggctatagcctccggagtggccagcaggcctgcgagggcgtaggttcctttctcctgtactctgtgcatgagggaatcaggggaattcccctggatcccaatgacaagtcagatgccctggtcccagtgtccgggacctcgctggctgtcggcatcgacttccacgctgaaaatgacaccatctactgggtggacatgggcctgagcacgatcagccgggccaagcgggaccagacgtggcgtgaagacgtggtgaccaatggcattggccgtgtggagggcattgcagtggactggatcgcaggcaacatctactggacagaccagggctttgatgtcatcgaggtcgcccggctcaatggctccttccgctacgtggtgatctcccagggtctagacaagccccgggccatcaccgtccacccggagaaagggtacttgttctggactgagtggggtcagtatccgcgtattgagcggtctcggctagatggcacggagcgtgtggtgctggtcaacgtcagcatcagctggcccaacggcatctcagtggactaccaggatgggaagctgtactggtgcgatgcacggacagacaagattgaacggatcgacctggagacaggtgagaaccgcgaggtggttctgtccagcaacaacatggacatgttttcagtgtctgtgtttgaggatttcatctactggagtgacaggactcatgccaacggctctatcaagcgcgggagcaaagacaatgccacagactccgtgcccctgcgaaccggcatcggcgtccagcttaaagacatcaaagtcttcaaccgggaccggcagaaaggcaccaacgtgtgcgcggtggccaatggcgggtgccagcagctgtgcctgtaccggggccgtgggcagcgggcctgcgcctgtgcccacgggatgctggctgaagacggagcatcgtgccgcgagtatgccggctacctgctctactcagagcgcaccattctcaagagtatccacctgtcggatgagcgcaacctcaatgcgcccgtgcagcccttcgaggaccctgagcacatgaagaacgtcatcgccctggcctttgactaccgggcaggcacctctccgggcacccccaatcgcatcttcttcagcgacatccactttgggaacatccaacagatcaacgacgatggctccaggaggatcaccattgtggaaaacgtgggctccgtggaaggcctggcctatcaccgtggctgggacactctctattggacaagctacacgacatccaccatcacgcgccacacagtggaccagacccgcccaggggccttcgagcgtgagaccgtcatcactatgtctggagatgaccacccacgggccttcgttttggacgagtgccagaacctcatgttctggaccaactggaatgagcagcatcccagcatcatgcgggcggcgctctcgggagccaatgtcctgacccttatcgagaaggacatccgtacccccaatggcctggccatcgaccaccgtgccgagaagctctacttctctgacgccaccctggacaagatcgagcggtgcgagtatgacggctcccaccgctatgtgatcctaaagtcagagcctgtccaccccttcgggctggccgtgtatggggagcacattttctggactgactgggtgcggcgggcagtgcagcgggccaacaagcacgtgggcagcaacatgaagctgctgcgcgtggacatcccccagcagcccatgggcatcatcgccgtggccaacgacaccaacagctgtgaactctctccatgccgaatcaacaacggtggctgccaggacctgtgtctgctcactcaccagggccatgtcaactgctcatgccgagggggccgaatcctccaggatgacctcacctgccgagcggtgaattcctcttgccgagcacaagatgagtttgagtgtgccaatggcgagtgcatcaacttcagcctgacctgcgacggcgtcccccactgcaaggacaagtccgatgagaagccatcctactgcaactcccgccgctgcaagaagactttccggcagtgcagcaatgggcgctgtgtgtccaacatgctgtggtgcaacggggccgacgactgtggggatggctctgacgagatcccttgcaacaagacagcctgtggtgtgggcgagttccgctgccgggacgggacctgcatcgggaactccagccgctgcaaccagtttgtggattgtgaggacgcctcagatgagatgaactgcagtgccaccgactgcagcagctacttccgcctgggcgtgaagggcgtgctcttccagccctgcgagcggacctcactctgctacgcacccagctgggtgtgtgatggcgccaatgactgtggggactacagtgatgagcgcgactgcccaggtgtgaaacgccccagatgccctctgaattacttcgcctgccctagtgggcgctgcatccccatgagctggacgtgtgacaaagaggatgactgtgaacatggcgaggacgagacccactgcaacaagttctgctcagaggcccagtttgagtgccagaaccatcgctgcatctccaagcagtggctgtgtgacggcagcgatgactgtggggatggctcagacgaggctgctcactgtgaaggcaagacgtgcggcccctcctccttctcctgccctggcacccacgtgtgcgtccccgagcgctggctctgtgacggtgacaaagactgtgctgatggtgcagacgagagcatcgcagctggttgcttgtacaacagcacttgtgacgaccgtgagttcatgtgccagaaccgccagtgcatccccaagcacttcgtgtgtgaccacgaccgtgactgtgcagatggctctgatgagtcccccgagtgtgagtacccgacctgcggccccagtgagttccgctgtgccaatgggcgctgtctgagctcccgccagtgggagtgtgatggcgagaatgactgccacgaccagagtgacgaggctcccaagaacccacactgcaccagccaagagcacaagtgcaatgcctcgtcacagttcctgtgcagcagtgggcgctgtgtggctgaggcactgctctgcaacggccaggatgactgtggcgacagctcggacgagcgtggctgccacatcaatgagtgtctcagccgcaagctcagtggctgcagccaggactgtgaggacctcaagatcggcttcaagtgccgctgtcgccctggcttccggctgaaggacgacggccggacgtgtgctgatgtggacgagtgcagcaccaccttcccctgcagccagcgctgcatcaacactcatggcagctataagtgtctgtgtgtggagggctatgcaccccgcggcggcgacccccacagctgcaaggctgtgactgacgaggaaccgtttctgatcttcgccaaccggtactacctgcgcaagctcaacctggacgggtccaactacacgttacttaagcagggcctgaacaacgccgttgccttggattttgactaccgagagcagatgatctactggacagatgtgaccacccagggcagcatgatccgaaggatgcaccttaacgggagcaatgtgcaggtcctacaccgtacaggcctcagcaaccccgatgggctggctgtggactgggtgggtggcaacctgtactggtgcgacaaaggccgggacaccatcgaggtgtccaagctcaatggggcctatcggacggtgctggtcagctctggcctccgtgagcccagggctctggtggtggatgtgcagaatgggtacctgtactggacagactggggtgaccattcactgatcggccgcatcggcatggatgggtccagccgcagcgtcatcgtggacaccaagatcacatggcccaatggcctgacgctggactatgtcactgagcgcatctactgggccgacgcccgcgaggactacattgaatttgccagcctggatggctccaatcgccacgttgtgctgagccaggacatcccgcacatctttgcactgaccctgtttgaggactacgtctactggaccgactgggaaacaaagtccattaaccgagcccacaagaccacgggcaccaacaaaacgctcctcatcagcacgctgcaccggcccatggacctgcatgtcttccatgccctgcgccagccagacgtgcccaatcacccctgcaaggtcaacaatggtggctgcagcaacctgtgcctgctgtcccccgggggagggcacaaatgtgcctgccccaccaacttctacctgggcagcgatgggcgcacctgtgtgtccaactgcacggctagccagtttgtatgcaagaacgacaagtgcatccccttctggtggaagtgtgacaccgaggacgactgcggggaccactcagacgagcccccggactgccctgagttcaagtgccggcccggacagttccagtgctccacaggtatctgcacaaaccctgccttcatctgcgatggcgacaatgactgccaggacaacagtgacgaggccaactgtgacatccacgtctgcttgcccagtcagttcaaatgcaccaacaccaaccgctgtattcccggcatcttccgctgcaatgggcaggacaactgcggagatggggaggatgagagggactgccccgaggtgacctgcgcccccaaccagttccagtgctccattaccaaacggtgcatcccccgggtctgggtctgcgaccgggacaatgactgtgtggatggcagtgatgagcccgccaactgcacccagatgacctgtggtgtggacgagttccgctgcaaggattcgggccgctgcatcccagcgcgttggaagtgtgacggagaggatgactgtggggatggctcggatgagcccaaggaagagtgtgatgaacgcacctgtgagccataccagttccgctgcaagaacaaccgctgcgtgcccggccgctggcagtgcgactacgacaacgattgcggtgacaactccgatgaagagagctgcacccctcggccctgctccgagagtgagttctcctgtgccaacggccgctgcatcgcggggcgctggaaatgcgatggagaccacgactgcgcggacggctcggacgagaaagactgcaccccccgctgtgacatggaccagttccagtgcaagagcggccactgcatccccctgcgctggcgctgtgacgcagacgccgactgcatggacggcagcgacgaggaggcctgcggcactggcgtgcggacctgccccctggacgagttccagtgcaacaacaccttgtgcaagccgctggcctggaagtgcgatggcgaggatgactgtggggacaactcagatgagaaccccgaggagtgtgcccggttcgtgtgccctcccaaccggcccttccgttgcaagaatgaccgcgtctgtctgtggatcgggcgccaatgcgatggcacggacaactgtggggatgggactgatgaagaggactgtgagccccccacagcccacaccacccactgcaaagacaagaaggagtttctgtgccggaaccagcgctgcctctcctcctccctgcgctgcaacatgttcgatgactgcggggacggctctgacgaggaggactgcagcatcgaccccaagctgaccagctgcgccaccaatgccagcatctgtggggacgaggcacgctgcgtgcgcaccgagaaagcggcctactgtgcctgccgctcgggcttccacaccgtgcccggccagcccggatgccaagacatcaacgagtgcctgcgcttcggcacctgctcccagctctgcaacaacaccaagggcggccacctctgcagctgcgctcggaacttcatgaagacgcacaacacctgcaaggccgaaggctctgagtaccaggtcctgtacatcgctgatgacaatgagatccgcagcctgttccccggccacccccattcggcttacgagcaggcattccagggtgacgagagtgtccgcattgatgctatggatgtccatgtcaaggctggccgtgtctattggaccaactggcacacgggcaccatctcctaccgcagcctgccacctgctgcgcctcctaccacttccaaccgccaccggcgacagattgaccggggtgtcacccacctcaacatttcagggctgaagatgcccagaggcatcgccatcgactgggtggccggaaacgtgtactggaccgactcgggccgagatgtgattgaggtggcgcagatgaagggcgagaaccgcaagacgctcatctcgggcatgattgacgagccccacgccattgtggtggacccactgagggggaccatgtactggtcagactggggcaaccaccccaagattgagacggcagcgatggatgggacgcttcgggagacactggtgcaggacaacattcagtggcccacaggcctggccgtggattatcacaatgagcggctgtactgggcagacgccaagctttcagtcatcggcagcatccggctcaatggcacggaccccattgtggctgctgacagcaaacgaggcctaagtcaccccttcagcatcgacgtctttgaggattacatctatggtgtcacctacatcaataatcgtgtcttcaagatccataagtttggccacagccccttggtcaacctgacagggggcctgagccacgcctctgacgtggtcctttaccatcagcacaagcagcccgaagtgaccaacccatgtgaccgcaagaaatgcgagtggctctgcctgctgagccccagtgggcctgtctgcacctgtcccaatgggaagcggctggacaacggcacatgcgtgcctgtgccctctccaacgccccccccagatgctccccggcctggaacctgtaacctgcagtgcttcaacggtggcagctgtttcctcaatgcacggaggcagcccaagtgccgctgccaaccccgctacacgggtgacaagtgtgaactggaccagtgctgggagcactgtcgcaatgggggcacctgtgctgcctccccctctggcatgcccacgtgccggtgccccacgggcttcacgggccccaaatgcacccagcaggtgtgtgcgggctactgtgccaacaacagcacctgcactgtcaaccagggcaaccagccccagtgccgatgcctacccggcttcctgggcgaccgctgccagtaccggcagtgctctggctactgtgagaactttggcacatgccagatggctgctgatggctcccgacaatgccgctgcactgcctactttgagggatcgaggtgtgaggtgaacaagtgcagccgctgtctcgaaggggcctgtgtggtcaacaagcagagtggggatgtcacctgcaactgcacggatggccgggtggcccccagctgtctgacctgcgtcggccactgcagcaatggcggctcctgtaccatgaacagcaaaatgatgcctgagtgccagtgcccaccccacatgacagggccccggtgtgaggagcacgtcttcagccagcagcagccaggacatatagcctccatcctaatccctctgctgttgctgctgctgctggttctggtggccggagtggtattctggtataagcggcgagtccaaggggctaagggcttccagcaccaacggatgaccaacggggccatgaacgtggagattggaaaccccacctacaagatgtacgaaggcggagagcctgatgatgtgggaggcctactggacgctgactttgccctggaccctgacaagcccaccaacttcaccaaccccgtgtatgccacactctacatggggggccatggcagtcgccactccctggccagcacggacgagaagcgagaactcctgggccggggccctgaggacgagataggggaccccttggcatagggccctgccccgtcggactgcccccagaaagcctcctgccccctgccagtgaagtccttcagtgagcccctccccagccagcccttccctggccccgccggatgtataaatgtaaaaatgaaggaattacattttatatgtgagcgagcaagccggcaagcgagcacagtattatttctccatcccctccctgcctgctccttggcacccccatgctgccttcagggagacaggcagggagggcttggggctgcacctcctaccctcccaccagaacgcaccccactgggagagctggtggtgcagccttcccctccctgtataagacactttgccaaggctctcccctctcgccccatccctgcttgcccgctcccacagcttcctgagggctaattctgggaagggagagttctttgctgcccctgtctggaagacgtggctctgggtgaggtaggcgggaaaggatggagtgttttagttcttgggggaggccaccccaaaccccagccccaactccaggggcacctatgagatggccatgctcaacccccctcccagacaggccctccctgtctccagggcccccaccgaggttcccagggctggagacttcctctggtaaacattcctccagcctcccctcccctggggacgccaaggaggtgggccacacccaggaagggaaagcgggcagccccgttttggggacgtgaacgttttaataatttttgctgaattcctttacaactaaataacacagatattgttataaataaaattgtaaaaaaaaaaa

SEQ ID NO: 16463 - DNA, 6886 bp, Homo sapiens
  source 1..6886: mol_type = unassigned DNA
aaatgtggaagctgaagctgcaagtcaagggcccgtctgacaagtccggcagggccgggaaaggggttaaggcgagcaagtgggtgtggcccgtgcgttgattggcaggggtgggaccgggcttgtcacccgccccggctactccaacccctgggcgggcgggggtaccgcctgggcaagggccggggcgccgggccgagccacctcttcccctcccccgcttccctgtcgcgctccgctggctggacgcgctggaggagtggagcagcacccggccggccctgggggctgacagtcggcaaagtttggcccgaagaggaagtggtctcaaaccccggcaggtggcgaccaggccagaccaggggcgctcgctgcctgcgggcgggctgtaggcgagggcgcgccccagtgccgagacccggggcttcaggagccggccccgggagagaagagtgcggcggcggacggagaaaacaactccaaagttggcgaaaggcaccgcccctactcccgggctgccgccgcctccccgcccccagccctggcatccagagtacgggtcgagcccgggccatggagcccccctggggaggcggcaccagggagcctgggcgcccggggctccgccgcgaccccatcgggtagaccacagaagctccgggacccttccggcacctctggacagcccaggatgctgttggccaccctcctcctcctcctccttggaggcgctctggcccatccagaccggattatttttccaaatcatgcttgtgaggaccccccagcagtgctcttagaagtgcagggcaccttacagaggcccctggtccgggacagccgcacctcccctgccaactgcacctggctcatcctgggcagcaaggaacagactgtcaccatcaggttccagaagctacacctggcctgtggctcagagcgcttaaccctacgctcccctctccagccactgatctccctgtgtgaggcacctcccagccctctgcagctgcccgggggcaacgtcaccatcacttacagctatgctggggccagagcacccatgggccagggcttcctgctctcctacagccaagattggctgatgtgcctgcaggaagagtttcagtgcctgaaccaccgctgtgtatctgctgtccagcgctgtgatggggttgatgcctgtggcgatggctctgatgaagcaggttgcagctcagaccccttccctggcctgaccccaagacccgtcccctccctgccttgcaatgtcaccttggaggacttctatggggtcttctcctctcctggatatacacacctagcctcagtctcccacccccagtcctgccattggctgctggacccccatgatggccggcggctggccgtgcgcttcacagccctggacttgggctttggagatgcagtgcatgtgtatgacggccctgggccccctgagagctcccgactactgcgtagtctcacccacttcagcaatggcaaggctgtcactgtggagacactgtctggccaggctgttgtgtcctaccacacagttgcttggagcaatggtcgtggcttcaatgccacctaccatgtgcggggctattgcttgccttgggacagaccctgtggcttaggctctggcctgggagctggcgaaggcctaggtgagcgctgctacagtgaggcacagcgctgtgacggctcatgggactgtgctgacggcacagatgaggaggactgcccaggctgcccacctggacacttcccctgtggggctgctggcacctctggtgccacagcctgctacctgcctgctgaccgctgcaactaccagactttctgtgctgatggagcagatgagagacgctgtcggcattgccagcctggcaatttccgatgccgggacgagaagtgcgtgtatgagacgtgggtgtgcgatgggcagccagactgtgcggacggcagtgatgagtgggactgctcctatgttctgccccgcaaggtcattacagctgcagtcattggcagcctagtgtgcggcctgctcctggtcatcgccctgggctgcacctgcaagctctatgccattcgcacccaggagtacagcatctttgcccccctctcccggatggaggctgagattgtgcagcagcaggcacccccttcctacgggcagctcattgcccagggtgccatcccacctgtagaagactttcctacagagaatcctaatgataactcagtgctgggcaacctgcgttctctgctacagatcttacgccaggatatgactccaggaggtggcccaggtgcccgccgtcgtcagcggggccgcttgatgcgacgcctggtacgccgtctccgccgctggggcttgctccctcgaaccaacaccccggctcgggcctctgaggccagatcccaggtcacaccttctgctgctccccttgaggccctagatggtggcacaggtccagcccgtgagggcggggcagtgggtgggcaagatggggagcaggcacccccactgcccatcaaggctcccctcccatctgctagcacgtctccagcccccactactgtccctgaagccccagggccactgccctcactgcccctagagccatcactattgtctggagtggtgcaggccctgcgaggccgcctgttgcccagcctggggcccccaggaccaacccggagcccccctggaccccacacagcagtcctggccctggaagatgaggacgatgtgctactggtgccactggctgagccgggggtgtgggtagctgaggcagaggatgagccactgcttacctgaggggacctgggggctctactgaggcctctcccctgggggctctactcatagtggcacaaccttttagaggtgggtcagcctcccctccaccacttccttccctgtccctggatttcagggacttggtgggcctcccgttgaccctatgtagctgctataaagttaagtgtccctcaggcagggagagggctcacagagtctcctctgtacgtggccatggccagacaccccagtcccttcaccaccacctgctccccacgccaccaccatttgggtggctgtttttaaaaagtaaagttcttagaggatcataggtctggacactccatccttgccaaacctctacccaaaagtggccttaagcaccggaatgccaattaactagagaccctccagcccccaaggggaggatttgggcagaacctgaggttttgccatccacaatccctcctacagggcctggctcacaaaaagagtgcaacaaatgcttctattccatagctacggcattgctcagtaagttgaggtcaaaaataaaggaatcatacatctcaaaattttgcaaattagctgcgagcctgagccccgcctctgcccatctcagtctatgctcacctcatcccactcctccctgtggagccctttgcttggccctctacctcctgccctcttcctgttcatctcccaaccactgcactcttgatttttataccacacagaaggtaagaaaattctaggaaccctaaggatcaatcctctccattttcactcaaatgcctggggcccagctctgcaatgactgactccagggcctctttcctcactgccagcatagaagtcaggggagccagctgggccctgcggtcaggaaggttctcatttttggagcataccctgagcccagatcataggagcagctgtccctggtgggacacaggagtcatgactcctaccctccaccctccacacccaccaggcatttagcagtctgtcctatgcaagacagatgaattctcagccaggatacctcaaggcaggcaaaggtgagtggagggagaattcacaaacattcagggtgtgtggtgctggcatcaccatggccaaatccaagaggtcttcctggaagagggcccaaactggaaccaaaagaatgctgtcagcagttggaatagagctgtgaattctagacagggggagtgtccccagaacaagcaaacggaggagacaagagggcaagggttataggaaagaccctgggcctgagagcacaagcagcggccagagctgcagcgctggggtgggtgatggagggaatgattcgcaagcagtgttggaacccagcccctagtgagcaaagtgacagaagctgccccagagtttggaaggaagatcgaggcagaagatgtagaaggaagctgtgggggtgggagtgatgcctcaggaacaaaactgaggaattccctaacggacccagtccctggggaaagaggctcccctcaggctctccttgtctagccccacacctggcagagcctgtcacccagcctagccccacgcctggcagagcccatcacccagcctagccccacacctggtggagaggccctgttgattacaccctgtcagcctcctcaaacccagcactaattgcacaattttcctctcttctagtgagcaagagcctgaggaagtagcagagaggggtgtgggcccatgtgcagttctgggaccctggcaccttggctcagggaagacccgagctcctttcactgcagaccctctccagagactggggagagggctctggagaacctggttcttgcttactgttctccctttgggccctccttcccaaacgcaaacaatccaggatccactcagcgtcaggcccaatggaaatagtgaagcagtgattttccctcccctgcctctccatagcctggtcttttgccctctcctttgctcttctcttcccccatagccacctcaaatacctgcagcctgatatcttcatcccttcatccagaccttttctctcctagtggtattgcaaactgaaagtggacaaagacttaaggtaaacctgctcctcatggtggaatgcttccaaatgctggaaggaggactttagggcagagttcactaaggaggcttgtgcttatagatcagtgggcctgaaagaagtttctctaggttctggttgtgtgctgtacgaggtgtaggtagtaataatactcttgtcagccacagtgaagccccaagctagccgggataggggactgaccttgtacaggcagcatggagaaactaagacagagtgtcctgcccaagtgatggcactggggagcagtcactcaggtttatttccaccagggcccaagaaaaaaagaaatgaggcaacctaaaattccatcaagatagataccaatatccaaggtgcttggtcttagcggtgtgggacccacgttaaggctcttggtgggaaggtgggaggtgttttcagcatgagatagggttcaggctgtgaatcagagtctagagcctaagataaaagaagataccagggctgggccacggtggctttcgcctgtaatcctagcactttgggaggccaaggcaggcagactgcctgagctcaggagttcgagactagcctgagcaacacggtgaaaccctgtctctactaaaatacaaaaaagtagccaggtgtggcggcatgcacctgtagtcccagctactcgagaggctgaggcaggagaattgcttgaacccgggaggcggaggttgcagtgagtggagatcgcgccactgcactctagcctgggtgacagagcgagactccttctccaaaaaaaaagaaaagaagataccagaactcagtccttaagaaacaaaattctgccaggcgcagtagctcacacctgtaatcccagcactttggaggggccaaggcaggcggatcgcttgaggccaagagttcaagaacagcctgggcaacatgatgaaaccctgtctctaccaaaaatactaaaaattagccagtctcacaacctggtctcaaaataaataaatagatttaaaaaaaaaatcatgggcctgaaccaagctccagacctcactaggaggggagaaggaccccccagccacacagcccaaggctgcagaagcacctaggtggttagagagtgagtgcctggatggggcgcagtggctcacacctgtaatcccagcactttgggaggccgaggcaggcggatcacgaggtcaagagatcaagaccatcctggccaacatggtgacaccgtgtctctactaaaaatacaaaaataagctgggcatggtggtgcgtgcctgtagtcccatctactcgggaggctgaagcaggagaatcacttgaacctgggaggcaaaggttgcagtgagctgagatcgcgccactgcactccagcctggcaacagagcgagacaagactccatctcaaaaaaaaaagtgagtgcccgatgatgccagattcttcatcacctgaagtgaacccacacaacagggctgggccatgggcatcataaaccccattttgcaagctcaggaggagctttagggaaatcagaagactggcccagtctctaccaagtggtggatttagagccggcatggcttcgttccaaatctcacccttgtcccaccattccatgggacctcccattcctgagggagcctggatacgggcaagtgcacaacccgggaggttgaggttacagtgagccatgatcgcaccactgcagtccagcccgagcaatagggtgagaccctccctctgaaaaaaataaaaatactcattttggaaggaagtcattctaaaatgttacacttgtcttcagcatatctgcaatataataattttctgcataactgaggatcattcacagaaaccaatggcttttctccagcagtgtcttctgaagttgtaacagtaggggcacggggagctatttgcttttatgctaaatgaccttagaccacttataaaatgcatatgagtgctttaaatgtta

SEQ ID NO: 16464 - DNA, 1780 bp, Homo sapiens
  source 1..1780: mol_type = unassigned DNA
atgctgttggccaccctcctcctcctcctccttggaggcgctctggcccatccagaccggattatttttccaaatcatgcttgtgaggaccccccagcagtgctcttagaagtgcagggcaccttacagaggcccctggtccgggacagccgcacctcccctgccaactgcacctggctcatcctgggcagcaaggaacagactgtcaccatcaggttccagaagctacacctggcctgtggctcagagcgcttaaccctacgctcccctctccagccactgatctccctgtgtgaggcacctcccagccctctgcagctgcccgggggcaacgtcaccatcacttacagctatgctggggccagagcacccatgggccagggcttcctgctctcctacagccaagattggctgatgtgcctgcaggaagagtttcagtgcctgaaccaccgctgtgtatctgctgtccagcgctgtgatggggttgatgcctgtggcgatggctctgatgaagcaggttgcagctcagaccccttccctggcctgaccccaagacccgtcccctccctgccttgcaatgtcaccttggaggacttctatggggtcttctcctctcctggatatacacacctagcctcagtctcccacccccagtcctgccattggctgctggacccccatgatggccggcggctggccgtgcgcttcacagccctggacttgggctttggagatgcagtgcatgtgtatgacggccctgggccccctgagagctcccgactactgcgtagtctcacccacttcagcaatggcaaggctgtcactgtggagacactgtctggccaggctgttgtgtcctaccacacagttgcttggagcaatggtcgtggcttcaatgccacctaccatgtgcggggctattgcttgccttgggacagaccctgtggcttaggctctggcctgggagctggcgaaggcctaggtgagcgctgctacagtgaggcacagcgctgtgacggctcatgggactgtgctgacggcacagatgaggaggactgcccaggctgcccacctggacacttcccctgtggggctgctggcacctctggtgccacagcctgctacctgcctgctgaccgctgcaactaccagactttctgtgctgatggagcagatgagagacgctgtcggcattgccagcctggcaatttccgatgccgggacgagaagtgcgtgtatgagacgtgggtgtgcgatgggcagccagactgtgcggacggcagtgatgagtgggactgctcctatgttctgccccgcaaggtcattacagctgcagtcattggcagcctagtgtgcggcctgctcctggtcatcgccctgggctgcacctgcaagctctatgccattcgcacccaggagtacagcatctttgcccccctctcccggatggaggctgagattgtgcagcagcaggcacccccttcctacgggcagctcattgcccagggtgccatcccacctgtagaagactttcctacagagaatcctaatgataactcagtgctgggcaacctgcgttctctgctacagatcttacgccaggatatgactccaggaggtggcccaggtgcccgccgtcgtcagcggggccgcttgatgcgacgcctgtgagcaagagcctgaggaagtagcagagaggggtgtgggcccatgtgcagttctgggaccctggcaccttggctcagggaagacccgagctcctttcactgcagaccctctc
